United States Patent Application Publication US 2006/0194265 A1 - sequence listing, part 7

SEQ ID NO: 1088 - DNA, 25261 bp, Homo sapiens
ttcctgccaaggagcagcagaaatgcctctatcataaagaaagtatttctgactttcttcctcttccctatctgggagttgaatttcccctcactttggagcagcccgacccagagtagctgcagcatgcttcatttgcattctgctactactaattgaagccagctggcaagggacgtttgggggaattgtcggcttctttggaaggtggtggggatgctacagctcgtatatcagggagcagcggcttgcttacaaagcacttttgctggtgatgggtcctggacagttgaggtggaagtggcctcggacaaccgtgggatctctgcttgtatattttttcttcaaaagacattaaaaaaaaaaaaagctaactcctcacattccacaaggatgagtcttgcttattccctaggcgtagctgtccctgccaaaaaaaaaaaaagctaattcattttctctttgctggagagactgaatcagtctcggggggctatcctcacctctcacacagccctgtctggctctcccttagcttggtgcacactgagaacagctgagctcagccaagccgaaaccacaaggttgaagctgacagtccgagcgccccacacctcatgcctggagtgtccatgccagatgctgctgcccagtcggcaggcacaaggaggatctcaccaggaggcaggccccggtttccacagaagacgctggccgtctctcagccaccctgcaacccacctcccaggccagcccctcgggagaagggaccctgtgggcctcaagcagccgctgctcatttacaaagctcctctttgctttgcagcctccatcttgtctccccactcactcctcaacccatgactatattaaccatgtcttttattttctctattatgacgttttaccatctgaggtgactgtccctcccacggttagccaattcatagagatcggagataactctcccacccaaccagtccagagagcacgctccaaacacctctattgactctcacactcagagccaccagccacctgccctgattgcccaaggccaggttccacacaactaggacagcccctatgcccagagcccactgcaattattcaacatagccaatcctaagcctgctcaccctgccttgcccatttgttcccttgaaaaccacaatgaaggtgcccgcccacaactgccccctccccctgtgcctcctgaccgacccagtgcttcccagtgacccccaccatgtggcgtgccccctactcgggatctacgagtttaacaaatcatcttttcaatggaggccgcctcctgccctgcggcccttgctgtacctaataataaaaactgtatcttgaaacaatgacttcagacctcagttaccactgttctgaaactgtcctcaccaggtgacctcctgttgccaaatctaatggataggatacatttttgtctgtacttcacaccgctgaccacaccctcactgaactcgcctgtttctgtggcttcgccctctcctcattctccatccttctggccacctcctcagactcctcagctgcaaccactcccttaagtgtcagcgctctttggggtcctgtcctgggttctgttttcttctaggtctacacatgctcccggggtgctcattaccacctacttgccaacaaccagcagttaacctctcctctcctccgacctcgctcctcagctctggcctgaacctctccatgtgcacatcccacaggctctcaagctcaacgtggccagcactgaatacatgatcttttgcactgaagctgcttcctctctctgatccttcagagtagccaaccccaaaatctcagagtccttgtgatgcctcccaaagacatccaggaaggcactgaacatcccctgacttgggtctctcccatctgccccaccttctccacctccactgctcctgccccatctcagaccctcatccccctcactgatgcagctcccaggtgcacttcacacctccacccttgtttctggggctccctctgtcaggaatgcctttcttcccctttccagaaaacaaccactgctttctcccaaacccttctttgaattccctccttcttgcctcatgggcagcacctatgatacttgaatgcccttactccttatatttatccaaaaatatttattgtgtgactctactttgtgccaggacctggaagcccctgagctacagcagcaaataagacggatatgggtcttgaccccaaggaagtgtgcgtcacatcaccctctctcccagaagccaccttccgcctccccacctctgcgctgagtgcaccgcagggcaaagaaccacaggcaggagaggattcatggggccctccagtcactcgccatgctgcccccacagtaatctttcttttttttttttaaatttttttttttttgagacagagtctcactctgtcgcccaggctggagtgcagtggtgcgatctcagctaactacaacctccgcctcccaggttcaagtgatccttgtgtctcagcctcccgagtagctgggactacaggcgcctgtcacctcaactggctaatgtttgtatttttaggagagatggggttttgccacattggccaggctggtctggaactcctgacctcaggtgatctgcccatctcagcctattgaagtgctgggattacaggcatgagccactgcacccaacctcccagagtaatccttctaaaaaatacacctatccagccatttcacactcttcctgtaagcctgtcatgatgcctcattatccaagtccagacagacaaggacttcctcgactgcctcttccccatttctccatcatcctctctcagccttcaccgccacgagaaataaaactgcctgttttttcctgcctctgctttgctttgctgtatttctgttcctttgctcacgctgcctcctctgtcttagatcctctcccctctcctcgcctggtttcttagttagctattgttctgtaacaaatcaccccaactagtaaccaaaggcagcttttctgtgggtcagcagtttggtcagggaacagctccatacgggatttgctgggctcactcctgcatgtgtggccaggtgacaagtgggctggacactgggtgatcctggaaaggctcactcagtgatgggcagctcccagattggggcgggggatggtagccacagcacttctgttcaggtctctccactgtgaccagctcgagcttcctcacagagccccggggtccttgcctaagatggcaagcactgaggaaatcgcttgcaccacgtttgctgaactcctgttggccaaaacatgtcttatggccaagccagagtcagtgtgaaagaggcatgactggctgagggcattaatgtggcactccaccacagtttgctctctactcctaaagatgctctgtcctcccacttgtaaaatacacccacccttcccaaagcacccaatcacgacatcaggctccaagaccatgatctcaaaatgtgcagtaggtctggctgtggctgagtctccttgggtacaactcctcaggggtggctcctcttcactcagggacctgtgagctaaaaagacaagaccacacgcccaatgtacaatggtgacacagggacaggataagctcaatagatactcccatcaaaacgggagaaatgagaggcacatagatagcaatcactagttcaaagcaattctgaaatccaggcaggcacatgtcatcaggatccctatgctagaggcagggaatgttacttgaacaggacccagttctccctggctcttagttacactctctgggctgttggttttgccttccaagagatccttcttttccctaagagaaggacctctgtataggggccagcttcctgcccatagaaagttggacgcccagaggcttcttttcattttgaactgtttcagttccttttactccaaactggcggagcttttgccaatacaatactccttaaaactttatgggttttctgtgaatattactggggtctacttcatgcacccaaagccacacacataattaatttcaaaaagactccatttcagctataggacaatgcgttttttttttttttttaggcagggccttgctctgttgcccatgttgcccaggctggggtgcctcactgaagcctcaacctctcaggctcaagagatcctcccacctcagtctcccaagtatctgggaccacaggcacgtgacaccacacccagctagttttttattttttgtagagatgaggtctcattatgttgcccaggctgatctcaaactcctgggttcaagtgattttcctgccttggcctctcaaagtgctgagattacaggcatgagccactgtgcctggcaaggacaatgtccttaacattcttagaaacccttctgtcttgtcaagaaggtctaatgaacaccatttaaatctcctggggtcttaacgaaggttgtaaaatcgtacccttgatttaatctctacctttaggccagttctagttttgagagcccattgcctgatactgaaactggcaatgagatctggttttcttttccacctaacaaactgagcaggtccttttgtagctcagctctcttgtaatactttatcatgccaactagaagcacccaaatgacacttggagcattctgtctccaggtccctttagccaaatctacaaattcattaagcacttcttctgttgtctaagttgccacgagaaattttgtttttgccagttgtttcaccactacctgagtcacccttgttccagccaccaaagagtccctccttacttgaaattgcctggagccaggcatggtggctgcaggtggatagccagatgttttccatgttggctccaagagtgagtgttctggcaaaaaggatagaagctatgtggccttctaaggcctcagtgcagaagtctcttagcatcacatctgtcctactctattagctgaagcagtcacaagcccactgagatttaagacaaggggacatagatgtcacctcttttttttttttttttttgagacggagtctcgctctgtcgcccaggctggagtgcagtggctgccatctcggctcactgcaacctctgcctcccaggttcacgccattctcctgcctcagcctcccgagtagctgggactacaggcacccgccatcacgcccggctaattttttatatttgtagtagagacggggtttcactgtattaaccaggatggtctcgatctcctgacctcatgatccgcccacctcagcctcctaaagtactcagattacaggcatgagccaccgcgcccggcctagatgtcacctcttgatgaaggaatgtcaaagaatttgtgtccacattttagaatcaccacggtagccttatctgggtggctcatttctcttctgtatggcatcacttggaattacacatgcttttgtggtcccatgacaggtcacatgcctgtgtggtcccatggcaggtcacaggcctgtgtggtcccatggcaggtcaactgggggctggcagatcccaaatggtgattgatgtaaactgagatagttcagactccctcaagtggcaactgaactccaaaaaagcaagctccaacgtacaaacatttcacaagcttctgctttcatcacatttgctgatggcccattggccaaagcaaggcacgtggccaagcccagaatcagcacggaagggattacacaaaagcatggacaccgggcgggggggggcatgactcactggaggccattgatgtgacagtctaccatacctgggcaactcccatttatctttaaaagctcagttcatgcctggcctccaagaagccctctctgacagattgggtcatcacctgtccctcctctggactcccacagtaccctttacacgtctctacctctgtgtctaccctcttttttctaattatctatgtatcatttctgtttcccccattggaacaagcctttgagatggtgttctactaatctttgtatacctagcgtctagccccgtgccttggaacattattggtaccaataatgtcttaattatttggtcaattaaaccatccatgaataaagtttttaaaataactatcaaagattaaagtgtctccattggtgccttctctcaacttctgccctgcattccaagaaataatgtttagtttgtatttgtcacattctccaaccaaatatgcagttcttcagggagctgaccttgctcaggaagttgacctcgactagaggttaggagaggtagcggagtgtagagcagcagttccaagatattttaatttcatagacttagtcacatttccaaagaagtgtgagggttaacaggaagttaccaattttcttttttttatatataaagtaggacattaaaaaccacacatacacacatatcaataccaccatctcttcagaaaaatggaaaggtataaccttagaatgaaagtataggaaaggcaggtgtatagtctcaattagtcaaagattagagctcagtattatggctgccttgatatcagggagacctcaaatggcctaattacaagatcccctccctactttgctgatgaggtcccccagccaaaccaccctccttattgtgggggccaggcacaatttctgcttaaccctgagtactgggcttcagcaccctgccagcccacagaattatgcaaacagccaatcacattctcttacaggaaacgggggcattccaccgttttgacattacaaagcctgcctcccacagctcctggtaatacctgtttctgagtgcaactcccatgaagcagttcatggcgtgcagtgttatcctcccaggtatgagcatatgtgactaataaactgctattgctctcattcgtccagtgttgaggtcatgtgatccccctaactttaggggatgggaatctctccctcatcaacagggtgaagaacataaaatcaaaacaaggtgataacctgacagctatgttcagagtaccccggactgtcctcgttttacttatttcaccgtgaaccagggaaatgagtctagcagagatctgagggtccgccctgggagcactggagagcacagtgggaacatggagtcaggagacttaagatctaatagtccagaccatgcttcaaaatatttgtctgaccttgacaaatcattacctttctcgggcctcaagtcccagctataaaatagtggggcaagccaggtgcagtggctcccacctgtaatcccagcattttgagaggccaggcgggaggattacttgagcccaggagttcaagatcagcctgggcaacatggtgagatcccatctctacaaaaaaaaaaaaaaaaaattaattagctgggcatagtgtcaagtgcctattgtcccagctactcaggaggctgaggtaggaggatcacttgagcccaggaggtcaaagcttcagtgagtggtgattgcaccactgcactctagcctaggcaacagagtgagaccctggctcaaaaataaaataaaataaaatttaaaagatgggaccactgtagtcacctctgtgattctagaaagacaatctgatgaaatgagggaatggctggcagtccctaggtcatgctaaaggactgtgtgtttttagaagagtttttatccccatatgtttctgggtgggaaaacaggagatggtgggaaaagagagatctaagagaccaacagggcagccgcagtcttctggcaggaagtcttgccttagctggattcctctaaagccttgctggtttcagcactccgatcctatccacagtaaatggagttttaaaatctcctccctccaccaccttgtgctctatcccctgacctcagatgtctaatcagagccattaattccatccaatcagagatcttgcttggcagacacagaattgccacaccttctacagtctatactcccctcccctgcctaaaagcaaggtgcttggggacccagaaattaggccaggtcctcataaccttatcaaaatagcactgctaggccttccacccagcaacactcagagacagggccaaagagtgggaaacggagcatccagggcctcagccagcagagcccagatgccttctgcagttaagatccctggactcagaatcagaaagctgttaagcaggaaggagtgcgctgccatgaagaggcagacagaagccagagccagtgtgtctggaatgcatcaggtagatgaatgggaagatggctgggatggagttggagggaggagggaagtcagcagccaggggccaggacattcatggccttaaaaagtatcctacaaacaagaagccaggttagctcacctatgaagagggacagtcttaccagatcatgtgttagagtccccagatcctggggagcgtgagaaaagtgcagactcagctggctctagtactagattaaggaggtcctaggtgggcaaggccagctgcatttttcataaaatgccctagaaacctctgcagtttaccaaagtgaatagctcctttggacttaaccatctgcaaggctcattccagttagagtgttccatcaccctaaatgctgggaaaccaagcgaatctcctcccacttgcaagcttccaacagtggcttccaacagtgccactgcagtatcagaaactgcagggaaggtgccagggctgacttccatgaagaaataggagaacaggcaggcagacattggggaggcccacagaatgtcgtgatcagaattcataaagaggctggcaggatacaaatcaatcaaataaacgttagttcaaaaaaattcactacacctgtgagtgagagaaagtcatcagcactgtctctaaaaatgagcctagggcttctggtgacatccaatcggtgggttatcaggagtgccccaggtgatcaggagttggcctcgactcagtcctttttgtgctgtctcctcctctttcccagagttcctctctctcttctcccactaggcagggatgagcaagaggaatggctcacccttgagagctggggtccatagcccaggtcagttctccagctctcccacttaccagccaagacaggaggtgaggattgagatgggatgaacccagcaggcggccatgggttaaaggtcgccatgaatgtaatgtgcccagcacagtgcctgctaaaaggcaacactcccttcctggtctgaagaccaaacaagcagactgtactcaggaaagccagaagaaccttccagctgtctggaccagaaggtgccagcccaggggctgaagaagacgtaatgcccagagcaaaaagcgcctgcagccccctgaagggctgggtgctctggaatagatgagggggcgaaatggggctggggaccagggacggacagggtgggtccagcacctgcctcgcttccgaagggctgctccaacactgaaaaacacccaaccagcttcctttcagaaagactggaatattccaaaacttctcactggaggctccggaggaggtgggctccagctgaaaaggaaatgtggaggcgtgggcgctcccggcctgcatcctgcacctcttacactttggttttcccacagactcctgaagaataggtcagaagaaagggttaaagccttaaaaggggaacaaccattgcggggctcagggaggaggataatgttctttgggctgccgcaccctgatccccggggtcccgaaccctcccgtccctggccaggcctgccagccacagggtgagggcccccttccgccgcaacctgccactctcacaccaatgcgggaccgccttctcttccttccccaccccccaccccaccctgccgtcctttctcccccaatctccgcctctgattggctgagcccccggctccccgctccccctctcctccatccccggtgaaaactgcgggctccgagctgggtgcagcaaccggaggcggcggcgcgtctggaggaggctgcagcagcggaagaccccagtccaggtgggaactggagccggtgggacctggggctcggggaccgccgtcaggcgcccatgcaagacttcccaacactaggcttcgggccacggtccgagggcgcccagggaagaagggcgcagagcttagggaggggcctgctttccaggcaggggcgggagggggatgcttctgcagggcaggggccgcgtggcaccctgatgtctttcggggaaggcgctcccgggctttcgcccgctgggggactggtgtctggggctggggcgctggagaacagggaggaagggcaccaaggacagcctgtgggtctacattccacccagacgtccccaaacccagctcgcagaggcggggaggaggacggatgaaactgcggggagaggatggaggatggcgagctagagggaatctgccgggtgacctcgcggcgggctgggtgcggggcaccggaggagaaggaagccgcagtgccgcaggcggggactgggtggaaggcgggcggacgggggaggggagagctggaaaaggatgagagagggggaagggggactcatttgggaaaggagaggattggaatacggaaatggattaaggatgaggcccgccgggggcttgagagggaggaagagcagaccttctctgggtctggagccgcctgaggacacagaccagaggaaatgaatacagactgcacctccccagccgctctccacccctcccctggctcttctaccctctccagccccagacccatttcttccctttcttgctctggccattgctcccccttcccctcctagatcccaagcccgcacaacatctcaaacaagagtcctcgattcaaaagccagatgccgaccccccttcctcctggatctggctcagggcagcagctccaccccgggacagagagagcattgattgtagctgcagccgccgcgggatcctagcctcacccgtcaaggggctgagcgccagggaccctgaactcgtctagtggtgcgccctgcgcacccgggcgcactcaaccgaggcaatgccctgcgcgctctcgcgggtgcacgccccttctgtggcctctcctgggcgagcactgctctgcagataggctagactaccggctccgcgtcgcctcgccaagggttggttcagccaaggctgcaaaaaacaaaaaaagaccaggcagacagcctatccagggtggctattgaaactgggctggaaaactgcagtcccaggaactccagagagctggacattgggaagcatccttggctcacatacaatcggagatcactatgtctttctctcctccaggaacacgattagcttgtgtcctatccagataggaatagatgctccctatctgggagcatccttagctatggtgaatggtatctagccatccactggggatggcgagtgacttagggatttgtgtctcacgtatatgaagcagtcatcgccagatgttggttgtttttcttaacccccatcataacccggtgggtatgtaagattcagagagattcattcattcattcacaataaatatctttggagtgtatgctatatgccagtaatctgcaaacggaaacggttttgagcattggggattttcttctgaacaggaaatgggaagtccctaaatggggagtctttgtttaacagatacagagttttactttgaaagacaaaaagagttccggagatgggctgcatagcaacgtgaatgtatccagcactgctgaatatactgaatttaagtactgaatttaaatggttaaaatagtaattattatgctttttgtattttaccacgattaaattttttttttaaatacgaagcctcagccctcataggtcttatattaccatacactatgttaatgtaagaagaggagaaagagtggtaaagttacttaaagtcacccagctagtaagtgctccatggccaagcgcagaaacacaccgtgactgggcttgttctccctccttccttgctttccctgagcaggaaagagccagtggcagtatcatgttcagtgagatgcagggacgagagggggaatggagagagggacttagatgactgccatagccactatgccatgttcccagggacccccagccctggtggtaagtgtggcacagcttggctgattcccatcctgttcccaccccagatccaggactgagatcccagaaccatgaacctggccatcagcatcgctctcctgctaacaggtacccggcatggggcaggactggggctccaggcgccctggcttccttccctccagagaagcagcttctccctcacagtctcagaaaagcgcaggtgacaaagagagggctctttttcatcctgaagtcagccaatccaccgcgctgatattctgacggcctgaggtggtttttgaaaacacagtttgctgagccctccttcacactattgaactagaatccccaactgagaacccggaaccagcatcaactccctaagatctcctgtccttgaaacacattgataggatccaaggctcaagcagagtggggagggaggctggggtctgcaaaggagaagtgggatccctggggtggggaaaggcactcagagagcagaccccggtcccctccctagccaggcccatctctccacttcaggtgggtgggaggcccctgtgccgcaggcccctccagtttgaaggaggcactgctggtgccagtcttgcaggtctcccgagggcagaaggtgaccagcctaacggcctgcctagtggaccagagccttcgtctggactgccgccatgagaataccagcagttcacccatccagtacgagttcagcctgacccgtgagacaaagaagcacgtgctctttggcactgtgggggtgcctgagcacacataccgctcccgaaccaacttcaccagcaaatacaacatgaaggtcctctacttatccgccttcactagcaaggacgagggcacctacacgtgtgcactccaccactctggccattccccacccatctcctcccagaacgtcacagtgctcagaggtgagacaagcccctaacaaggtcaagtgagctgggagagccaggctcggggacagcaggcagttcccttggctggactagagaggagaatagccccataacgctctcaccctctcccaactgctgcctggtcaactggggaaccattgccttcggtgtgaatggggtgaagagctcagggccagacaggcagagcagtgtggttccaccagaactgtgggcaaggcctttggcctccctaatcttccttctcccagcgggaaaacagggatgacaccacctccctcagccagttttcttgtcatgatgtttagtaaggttttcataagatgatatgtgtgcaagagatcagtaatctgcaaatgggaaagatggctggttctgtgagaccgggctgttcctggtcccagctaagacattgcagtacccacctcccaaagggagtacacccttgctttgggcctgtgcctgcctgagtcctgatccgtcttccttcctaccctgcccccggcccccttctctttctgcagacaaactggtcaagtgtgagggcatcagcctgctggctcagaacacctcgtggctgctgctgctcctgctctccctctccctcctccaggccacggatttcatgtccctgtgactggtggggcccatggaggagacaggaagcctcaagttccagtgcagagatcctacttctctgagtcagctgaccccctccccccaatccctcaaaccttgaggagaagtggggaccccacccctcatcaggagttccagtgctgcatgcgattatctacccacgtccacgcggccacctcaccctctccgcacacctctggctgtctttttgtactttttgttccagagctgcttctgtctggtttatttaggttttatccttccttttctttgagagttcgtgaagagggaagccaggattggggacctgatggagagtgagagcatgtgaggggtagtgggatggtggggtaccagccactggaggggtcatccttgcccatcgggaccagaaacctgggagagacttggatgaggagtggttgggctgtgcctgggcctagcacggacatggtctgtcctgacagcactcctcggcaggcatggctggtgcctgaagaccccagatgtgagggcaccaccaagaatttgtggcctaccttgtgagggagagaactgagcatctccagcattctcagccacaaccaaaaaaaaataaaaagggcagccctccttaccactgtggaagtccctcagaggccttggggcatgacccagtgaagatgcaggtttgaccaggaaagcagcgctagtggagggttggagaaggaggtaaaggatgagggttcatcatccctccctgcctaaggaagctaaaagcatggccctgctgcccctccctgcctccacccacagtggagagggctacaaaggaggacaagaccctctcaggctgtcccaagctcccaagagcttccagagctctgacccacagcctccaagtcaggtggggtggagtcccagagctgcacagggtttggcccaagtttctaagggaggcacttcctcccctcgcccatcagtgccagcccctgctggctggtgcctgagcccctcagacagccccctgccccgcaggcctgccttctcagggacttctgcggggcctgaggcaagccatggagtgagacccaggagccggacacttctcaggaaatggcttttcccaacccccagcccccacccggtggttcttcctgttctgtgactgtgtatagtgccaccacagcttatggcatctcattgaggacaaagaaaactgcacaataaaaccaagcctctggaatctgtcctcgtgtccacctggccttcgctcctccagcagtgcctgcctgcccccgcttcgctggggtctccacgggtgaggctggggaacgccacctcttcctcttccctgacttctccccaaccacttagtagcaacgctaccccaggggctaatgactgcacactgggcttcttttcagaatgaccctaacgagacacatttgcccaaataaacgaacatcccatgtctgctgactcacctggctggaacaacatgcttactgccaacatgtgggccgaaccacatggccctggctctggaatgcacaagtggctttgcgtgaatctgcgctaagctatgcagtctgctttttcttctcagctctggtagttcttcagaaatgtaccctccaggcacatccactattgcgagggtgagcacgaagggtgggagatgcccatgtcctcaaggcatcacttcctaaatccaaaagcatcggcaggagaaaggactggggacaaatactgtcccttcgggagtagggagggaacactgaggcccatccctggctccttccctaaaagtagagtaaaatggaagcgagcatcctgggattgggggcaagagggggaccgcagggtagctgtgggttccaactgctgtcagagtcagagaggcagccccaagccagcctccctgctttgccagggaatttgggggaggaaggtgacagctgcccagaggctgactcatctgatatttagcactgggtaggatgattgtttctgagcatttttcttaaaggcctcagatctaaattatgccaccggctcccactcttgctacctcccgtcaacttctctgccttgccttccacccctgtagttaccatacacagaggaggaggagctgtccttgtcccaggttgggaggctgacaaccccttagcaagatgctgccagcccagagctctccaaggggaggaacacccctgagactcaggcccctctccttcagccctgcttgggctgcaagcgccgtgccaaggaaaggcatcttggtgagaagagctgctgtgggggaagggagatcaaatgccagagaaatgtggggtgccccaccctcaggatagtaaaagagtatggaggtatttctggaaggaaatgagcggcactgtgtgaagcctcgcacctgtgtgacacttcctatggggtctttgtcacactctagtactatgtccctgaagagtttagcagccacactcttagaagggtgctgggagatggtgttgccctctgcagccatgtttaggggagcggaacctgaggcccacagtgggtgagattagctcaagaagccacagaggccaccagagggccacggacttcggaaaggagaagagaagaacagggcatcaggcctcacaacgcaaacctacccagagatgggcacagtggctcatgcctgtaatcccaccactttgggaagaggcggatcgcttgaggtcaggagttcgagactagcctcgaaaccctatctctactaaaaatacaaaaattagccaggcatggtggcctgcgcctgtaatcccagctactcaggaggctgaggcaggagaatcacttgaacccgggaggcggaggttgcagtgagccaagattgcaccactgcactccagcctgggagatagagtgagactccatctcaaaaaaataaaaaataaaataaacctacccggaatgaccatgctgaggactgggagcccgcagactttcagccacaggccgcgacagccgtgggtccctccctggtcaagtcagcaggccttgtggaggctgtggggtatctgtggtgactcaggtaattatagagggctggcccccagccctggttcctgtacacatgccccaaccccatccccatccactccctcgccagtcctaacctctttcctgggtccccccccttcagcacctaagtccatacctagggccgtggaattcccgctcaagagcaacagaagcccctctctgcacccccatttctggactggattgtccactgagacgcgcaatgtctgcatctctgacatctagaggcttcctcgggaagggcatggggatctccgtgagatgtggggactttcactggccaaccaagaaatctacacagcgtccggggacctgtgacacacatccctcccgcctcctcaacctgatgtccctctctgaatctgcagctttcgtgctgtgaaggtgtctttacatgtgaaacaaacaaacccaagtcaagagtaaatcatctcatttactagtgagaaaatgttggagctggagtccttcagagagtcctggccaggcaagagggccatcagctctcttctgctcaacaggggctctcagcctcaggacactctcaggcctggaatgtccccaacacactcaaggagaaacatgtcctgtgcagacccacaggaggcatctttgcccggcacaaggaagagctggggtcagtgggacctgtagatgtagacacatcatatggagggtgggtaggaccaatgtggcagcttcatggaggccaagtgtggctctgcaccaggaaggggctgtgatggctggaggtgcccagcagtgcaggcggggagtgcctggcagtggcgtggccaggtggaggccacctgtcaagtttgcaataaagcagtttcctgaatttggtgagaacatggactagaggactctagcctcttccccctttagggtttcacttcagtaagtcttaaaattagagtgtggtgactcacgcctgtaatcccagcactttgggaggccaaggcaggtggatcacttgaggtcaggagtttgagaccatcctggccaacatgcagaaaccctgtctctactaaaaaaaaaaaataagtaaataaataaaaattagccaggtgtggtggtgcacggctgtaatcccagctacttgggaggctgaggcaggagaatcacttgaacccaggaggcggaggttgtgggccgagatcatgccactgcactccagcctgggtggcagagtgagattcagtctcaaaaaaaaaaaaaaaggattagagcttggtgcagtggcagccacctgtaatcccaacttcttgagaagctgagatgggaggccccccttgagcccagaagtttgaggccagcctaagcaacactgtgagaccttgtctcaaaaaaataataaaaacaataattcttaaaataagctgactgggctgaaatcatgtatttgtacaacaaacattaagcatctaaatgcacctggctctgtgctaagctataaaagacacaagcccctaactgaaggggtccacagtccaataagagggaggaatcaatttcagtgcagtgatcagcactatgaggaggggaagttgtggaagacaccagtgggggttccccaacatgcattatcctcttccttctcagcaatgggacccataaactagaactgaaatgtgtgatccagaagaaagactatttcccagttccattgcagtgagatgggcctatgtgattaagttctgtccaatgggatataagcacaaaatagtatgtgtaatttctgtgaagagctctaaaagagagaaagtgtgcctttctcccactttcaccttatgctagctggaatgtggaggtgatggctggaactggagcagctattttgtactatgagatagatggaagttgtgtgttacaaatgacaaagcacaagataggagcctgagtcctccatgatggtggagctgtcagggaagccgtggacaaccttatttaagtgactgttatttgggcttttctgcattcatcgctaactaaacctaaaactaccttaaaaagaaactgcaggcccggcacagtggctaacgcctgtaatctcagcactttgggaggctgtggcgggtggattgcttgagcccaggagttcaaggtgagcctgggcaaggtggcaaaaccccatctctacaaaaaatacaaaaattagctgggcatgatggcacatgtctgtagtctcagctactcaggtagctgaggtgggaggattgattgagcctgggagtttgaggcttcagtgagccaagatcacaccaccacactccagggtaacagaatgagaccctgtcttcaaaaaaaaaaaaaaaaaaaaaagctgctacttaacactgctgaatcttacacttaaaaatggttaagattgtaatttataactttttaaccacaactttttaaaagaagccaaaggtcaaattaatagagatagaaaatagaatggtggttgccaggagctgtggggaaagggaatggggagttattgtttaatgggcacagagttttggatttgcaagatgaaaacagttccatggatgggtggtggcgatggcagcacaacagtgcaaatgtacataatgccactgaaccgtatacttttttaaaaatagaggtggggtttcactatgttgcccaggctggtttcaaactcctgggctgaagtgatcctcccccctcagcctcccaaagtgctgggattgcaggtgtgagccaccacacccagcctgaatcgtacacttaaaggtggctgagatggtaaattttatattcagtgtattttatcacgatattaaagaaatagaagaagccaaggcaccaggaaactctttggagtggttacctttatcaaaactcatcaaactgtgcacttaaaataggtgaatttcattgaatataaattacaccttatcaaagtgctgtgggaacacatatgtagggcccttttgccaggcgacagcggcttcccagaggaggagtcatgagtaagagtgcaaaaagcagcctctactattttgcaaactaattgcaaaaaaagaaattttatgttatttcttctatactctgcaaaaccagggaaaagggagaggaagccatcgtgggttcagtctgaggacaggacttagctcctctctaggttaacacacaactgctggtggatataacagctcttagagcacacaggcccatcagaagaatccctgatccagtcaatatttattcaaacatttattaggtgcacactccatgccaggccttatgtggggtaatgagactagaacagtggatggtacagacaatctcttgttctataacatttatattctagtatgggagttggatattaagcaagtaaaccaatcaataaatcaaataattatagattgggatcatttatatatagaagataataaagaataataagtgacatagccaggcatagtggctcacgcctgtaatcctagaactttgagaggccaaggtgggagaattgcttgagcccaggagtttgaggcaagcctgggtgacatagtgagactttgtctctaaaaaataataacaatattaagtgacctattagttagggtgatgagggagagcccaagggagtgtcctttgagctgagacttcaaaggtgagaacaagccagccattggaagagctgcaggaagcacagccagatggagggaatggtaaggagtggtccatgatgttactgaagaggcagacaagagccggattcaataggagccttggaggtcatggtgaagagtttgaattttattgtaagggtaacagggaagtgttgaaggatgtgatctggtcatatttttataagatccctcttgctgctctgtagaaacataaaggagaatgacagtagaacaagaaatcaggaggacattgccatggtcctaaaatagatgacagcaactttgacaaaagttgtagtggttaagatagacagaagcggtgacttcaagatacgtttagagttaaaacagagaggactggggaaatctaaataaggtctgtggattttaccaatatcaatttccagttttgatactgtactccaattatacaaaatgttgccattgggggaaactgggtgaagggtacatgagacctctaacctctgcaccccaagggtacagacaagacctctctgtactatttatgcaatttcttgtaaacctataatttactttaaatatttttaaatattttaaattttcaacacaacccaaaaaaaaaaaaagatggcaaatatttaactccagagggaggagaaaagaatgctcataacaggttagatggatttactgtgaataatatttacgtagtcatactgatataaacattccctttggtctgaatgtttgtgtcactcaaaattcaaaattcatcttttgaaatcctaaaccccaaggtgatgatatttggaggtgggctctttgggaggtgattaggtcatcagggtgaacccctaatgaatgagattagtctccttataaaagaggccccacagagatcccatactccttccactacatgaggccacagcaagaagacgctgtctataaatcagaaagtgggccctcaacaggtactaagtctgcagcacctagagcttagacttcccagcctctagaactctgagaaataaatttctgttgtttataagctgcccagtctgtggtattttgtcatagcagtatgaatggactaaggtaacactaaatagggattttaaccaaaaattatgatgacgatatattggaggatgggaaaaggttaagtgtatgtatttggtgaaggagaaaatgggcatataagaaagctaaaaccacattttccatagttgaaagtcaacagaggctgggcatggtggttcacacctgtaatcccagcactttgagaggtcaaggcaggtggatcacttgaagtcaggtgtttgagaccagcctggccaacatggtaaaccccatctctactaaaaatacaaaaattagctgggtgtggtggcacatgcctgtaatcccagctactcaggaggctgaggcaggagaatcacttgaacccgggagctttggttgcagtgagctgagaccatgccactgcactccagcctggacaacaagagcgaaactccacctcaaaaaaaaaaaaaaaagaaatgtcaatagatcctacttaacactgaaaaaaaaatcaagaaatagttctatatgtataaaatatactttatatacttttatatgttacatactttatatatatacactttatatatatatatacatatatatgagagaaatttttaaacatagaagtaaatagcagaagaaatagctagagttgagagggttgctttggggagtaagaatttaggatggggtaacagactgcttttatattataaaactagtaatacttttttgtcactataaatgtattggtttgctaaacaatataaatcaaatatatctaaagaaataccttaaatgtttggcaaaaaaaaaaaaaaccccacaggacttgcttactggtggtttggctgtttcagggatggattgagaggaagtgagaaggaatctaggatgatccttgggctcttgtttgaacaagtggatgatgacgacatctgttgagaaagaaaaggctggggaagcattgaggtgggaaagcagatatattaaatctgtgatgcccattagacatccaaatggaagcatcaagaaaacagctggatatcccagtcctgagcaagaggtaagaggtccaggctagaaacaaaagtatgctggaaattttatttggatggtagacatcgaccatgggacgagtaagatcatgcaggcagacatgacagaggaataattctataattctaggcccagagtagaatctgagacagtccaatatttaggcttttgagggtgcaaaagagattaaagagcagtcagtgaagaaagaggaaatccaggggtctgtggagccaaagaagggagagttttgaaaaacagtgatcaactgggtcaactgctatgaagtcaagtaagatgaggaccaatgcgctggtgactatggtagctagtctccaaagatggcctcctatgtaaactgggcccctgggtaatcccttctgttgaatctggcatggccttgtcttgcttatgaccaacagtatatagtagaagtcacatggcatgacttccaagcctggctcataagaagtcttgcagcttccacctggttctcctggaatgctcactcctgggacactccctcctggaacccagctgccattctgagaagcccaagccacacagagtggccacatataggcactcaagttgccagcacaagctaagctcccacccaacagccaccatccactgccagccatgtgagtgagccatcttggatgtccagctcagctgaggcttcagacgactccagtcccagctgttgactgcaacctcatgagaaacagaccccaagaagaatttcccagctgagcccagtcaaccacagaagtatgagacataataaattgttttttaaagatactaaattttgaggaggttattacacagcaataggtagccagaatagtgactttgacaagagtcacttttgacggtccagtggtaacaggagccaggttggaagtgggtgaatgaaagtgaatgaagagtgtagacttctttctcaggaagtgtggctgtgactgatgtgggaagtggagtccaggagagtccgtttatgttgaagatgggcaatcctggagtatggctgtatgttgatggcgatgatgcctggagacagggaaagactgatgaataagagggagaagaaagcgaagaattagagtctttggaaaggcaagagctagaattaaaggcaaagaaaggtgggtgcagcagctcatgcctataatcccagcactttgggaagttgagatgggatgatcacttgaggccagaagtttgagaccagcctgggcaacatagcaggaccacatctctaccaaaaaaaaaaaaaaaaaaaagttatttaaaaaaaagttaaagaagatgggtaaggaagtggaaattttgtgaagttgaagtttcttggctttgcatataagtgttctctcctttctcaaggaagtatatggcaaagtcatcagccgaatgagatggtgggaatatggagaggaggcgggggaaagtttgataaaaagagctaatataaaatagtcatatcagaaagtgggagtggtagcagaattctaaaaatagcctcctgagattccacatccaatgcatggaaactgaatgtgatgagattttacttccatgactgtgtttcgttatatggcatagctgatcctcagagacagagataagatgatctgggtagtcataattgaataacatgagcccttaaaagcagagaaacttctctggctaatggcagcagagggcctccgggaacatcaaggaaccaggcaaaaggtacccacggagccccttgagctccctgctttctcacagcttctggaggtcccagataagtccctcttggatttctgcctctgcaatttgcatcctgaactctctgaattcaagtaattttatttatgattggatccaagggttgacctggatgtttgacaggaactggattgtattcagtctacatctggaatccagactggaatccagaaatcaaactgggtgttcaacaggaactgaactggatctagctggagacctcaggaaagcacaattttaggacagaatttagattgtcagaatctaaggagtctaggactcctccatctagaactccagctaattttatgttcagaaattatgggcccagaacctgtgcctttctagagaaacaggtatacctcaggaagattagcagaatgacagcaaccacaatggggaagttttattctagatgagattttatttgggctgagtgcagtgactcatgcctgtaataccagcactttgggaggccgaggcaggtagatcgcttgagctcaggaatttgagaccagcctgggcaacatggtgaaaccctgtctctacaaaaaatacaaaaattagctgggtgtggtggtgtgcccctgtagtcccagctacttaggaggctgagatgagaggatcacttgagcccaggaggtcgaggctgcagtgagctgtgtttgtgccactgtactgcagcctgggcaaagagcaagaccctgtctcaaaaaaacaaaaaagaaagattcatttatgtgtgcattagaaaaaaaggggaggatcttgaaggcctcagaaacaatgagatacatttttattagtatacagaggtttctaaaagacagaatg

SEQ ID NO: 1089 - DNA, 2066 bp, Homo sapiens
ccggtgaaaactgcgggctccgagctgggtgcagcaaccggaggcggcggcgcgtctggaggaggctgcagcagcggaagaccccagtccagatccaggactgagatcccagaaccatgaacctggccatcagcatcgctctcctgctaacagtcttgcaggtctcccgagggcagaaggtgaccagcctaacggcctgcctagtggaccagagccttcgtctggactgccgccatgagaataccagcagttcacccatccagtacgagttcagcctgacccgtgagacaaagaagcacgtgctctttggcactgtgggggtgcctgagcacacataccgctcccgaaccaacttcaccagcaaatacaacatgaaggtcctctacttatccgccttcactagcaaggacgagggcacctacacgtgtgcactccaccactctggccattccccacccatctcctcccagaacgtcacagtgctcagagacaaactggtcaagtgtgagggcatcagcctgctggctcagaacacctcgtggctgctgctgctcctgctctccctctccctcctccaggccacggatttcatgtccctgtgactggtggggcccatggaggagacaggaagcctcaagttccagtgcagagatcctacttctctgagtcagctgaccccctccccccaatccctcaaaccttgaggagaagtggggaccccacccctcatcaggagttccagtgctgcatgcgattatctacccacgtccacgcggccacctcaccctctccgcacacctctggctgtctttttgtactttttgttccagagctgcttctgtctggtttatttaggttttatccttccttttctttgagagttcgtgaagagggaagccaggattggggacctgatggagagtgagagcatgtgaggggtagtgggatggtggggtaccagccactggaggggtcatccttgcccatcgggaccagaaacctgggagagacttggatgaggagtggttgggctgtgcctgggcctagcacggacatggtctgtcctgacagcactcctcggcaggcatggctggtgcctgaagaccccagatgtgagggcaccaccaagaatttgtggcctaccttgtgagggagagaactgagcatctccagcattctcagccacaaccaaaaaaaaataaaaagggcagccctccttaccactgtggaagtccctcagaggccttggggcatgacccagtgaagatgcaggtttgaccaggaaagcagcgctagtggagggttggagaaggaggtaaaggatgagggttcatcatccctccctgcctaaggaagctaaaagcatggccctgctgcccctccctgcctccacccacagtggagagggctacaaaggaggacaagaccctctcaggctgtcccaagctcccaagagcttccagagctctgacccacagcctccaagtcaggtggggtggagtcccagagctgcacagggtttggcccaagtttctaagggaggcacttcctcccctcgcccatcagtgccagcccctgctggctggtgcctgagcccctcagacagccccctgccccgcaggcctgccttctcagggacttctgcggggcctgaggcaagccatggagtgagacccaggagccggacacttctcaggaaatggcttttcccaacccccagcccccacccggtggttcttcctgttctgtgactgtgtatagtgccaccacagcttatggcatctcattgaggacaaagaaaactgcacaataaaaccaagcctctggaatctgtcctcgtgtccacctggccttcgctcctccagcagtgcctgcctgcccccgcttcgctggggtctccacgggtgaggctggggaacgccacctcttcctcttccctgacttctccccaaccacttagtagcaacgctaccccaggggctaatgactgcacactgggcttcttttcagaatgaccctaacgagacacatttgcccaaataaacgaacatcccatgtctgctgac

SEQ ID NO: 1090 - protein, 159 aa, Homo sapiens
MNLAISIALLLTVLQVSRGQKVTSLTACLVDQSLRLDCRHENTSSSPIQYEFSLTRETKKHVLFGTVGVPEHYSRTNFTSKYNMKVLYLSAFTSKDEGTYTCALHHSGHSPPISSQNVTVLRDKLVKCEGISLLAQNTSWLLLLLLSLSLLQATDFMSL

SEQ ID NO: 1091 - DNA, 1527 bp, Homo sapiens
ccggtgaaaactgcgggctccgagctgggtgcagcaaccggaggcggcggcgcgtctggaggaggctgcagcagcggaagaccccagtccagatccaggactgagatcccagaaccatgaacctggccatcagcatcgctctcctgctaacagtcttgcaggtctcccgagggcagaaggtgaccagcctaacggcctgcctagtggaccagagccttcgtctggactgccgccatgagaataccagcagttcacccatccagtacgagttcagcctgacccgtgagacaaagaagcacgtgctctttggcactgtgggggtgcctgagcacacataccgctcccgaaccaacttcaccagcaaatacaacatgaaggtcctctacttatccgccttcactagcaaggacgagggcacctacacgtgtgcactccaccactctggccattccccacccatctcctcccagaacgtcacagtgctcagagacaaactggtcaagtgtgagggcatcagcctgctggctcagaacacctcgtggctgctgctgctcctgctctccctctccctcctccaggccacggatttcatgtccctgtgactggtggggcccatggaggagacaggaagcctcaagttccagtgcagagatcctacttctctgagtcagctgaccccctccccccaatccctcaaaccttgaggagaagtggggaccccacccctcatcaggagttccagtgctgcatgcgattatctacccacgtccacgcggccacctcaccctctccgcacacctctggctgtctttttgtactttttgttccagagctgcttctgtctggtttatttaggttttatccttccttttctttgagagttcgtgaagagggaagccaggattggggacctgatggagagtgagagcatgtgaggggtagtgggatggtggggtaccagccactggaggggtcatccttgcccatcgggaccagaaacctgggagagacttggatgaggagtggttgggctgtgcctgggcctagcacggacatggtctgtcctgacagcactcctcggcaggcatggctggtgcctgaagaccccagatgtgagggcaccaccaagaatttgtggcctaccttgtgagggagagaactgagcatctccagcattctcagccacaaccaaaaaaaaataaaaagggcagccctccttaccactgtggaagtccctcagaggccttggggcatgacccagtgaagatgcaggtttgaccaggaaagcagcgctagtggagggttggagaaggaggtaaaggatgagggttcatcatccctccctgcccccgcttcgctggggtctccacgggtgaggctggggaacgccacctcttcctcttccctgacttctccccaaccacttagtagcaacgctaccccaggggctaatgactgcacactgggcttcttttcagaatgaccctaacgagacacatttgcccaaataaacgaacatcccatgtc

SEQ ID NO: 1092 - protein, 159 aa, Homo sapiens; identical to SEQ ID NO: 1090

SEQ ID NO: 1093 - DNA, 1038 bp, Homo sapiens
ccggtgaaaactgcgggctccgagctgggtgcagcaaccggaggcggcggcgcgtctggaggaggctgcagcagcggaagaccccagtccagatccaggactgagatcccagaaccatgaacctggccatcagcatcgctctcctgctaacagtcttgcaggtctcccgagggcagaaggtgaccagcctaacggcctgcctagtggaccagagccttcgtctggactgccgccatgagaataccagcagttcacccatccagtacgagttcagcctgacccgtgagacaaagaagcacgtgctctttggcactgtgggggtgcctgagcacacataccgctcccgaaccaacttcaccagcaaatacaacatgaaggtcctctacttatccgccttcactagcaaggacgagggcacctacacgtgtgcactccaccactctggccattccccacccatctcctcccagaacgtcacagtgctcagagacaaactggtcaagtgtgagggcatcagcctgctggctcagaacacctcgtggctgctgctgctcctgctctccctctccctcctccaggccacggatttcatgtccctgtgactggtggggcccatggaggagacaggaagcctcaagttccagtgcagagatcccggacacttctcaggaaatggcttttcccaacccccagcccccacccggtggttcttcctgttctgtgactgtgtatagtgccaccacagcttatggcatctcattgaggacaaagaaaactgcacaataaaaccaagcctctggaatctgtcctcgtgtccacctggccttcgctcctccagcagtgcctgcctgcccccgcttcgctggggtctccacgggtgaggctggggaacgccacctcttcctcttccctgacttctccccaaccacttagtagcaacgctaccccaggggctaatgactgcacactgggcttcttttcagaatgaccctaacgagacacatttgcccaaataaacgaacatcccatgtctgctga

SEQ ID NO: 1094 - protein, 159 aa, Homo sapiens; identical to SEQ ID NO: 1090

SEQ ID NO: 1095 - DNA, 582589 bp, Mus musculus
  misc_feature (1)...(582589): n = A,T,C or G
ctgccagcacctgctggagaacttccagccatcctgtggtttcatctgtattatctcaaacaagtaagctgtgtgagccggttttgtttgctttgtgtcttttgagataaggatctcactacgtagcctaggctggcttcatctcaatccttctgctacccaaatgttcctgttccaggcatagacagcacagccaactaaagaaataagaatttaaagaaaaagtgcactataatatcattgtacacttaaaatattaatactcagtcatattatatgtctacctattttttaacgtctctaattttataaataacacatatgcatgcctcaatgcatacataaaattaaactggtttgaatcaggaaggtgttcacatatgcccagtatatgcttttcatctacaagccacatcctagtttgtctgtttatttgtcaaagaagcaattacttctttgaatctagcatcttgagaactgctgtcttaggttttcaataagagaggagctgggaaacttctagaagtcactgcacatggcagtttcagaaatctgaccatcatttatgggagaagtaccaggaagatccacagagcgcacattaagattgctaggtaagtggaaggtggttcactgattataggtggcaaaactcactttccagtgacatggttcaaattctggtgagataaaacacagtgaaagtgggccagctgagttaaaaacaaacaaacaatagatagacaaacaaaaacaaaaaaggaacaggtccaaaccagttagtggctggaagtcatctcctgtgtagagcagggcagcttaatgtggtgaaggtgactggatgtgtctgagcaaagcaagcatttgtctgacttacaagtcatgggtttaaagtggaggactctgggaaactgggtgatttcaaaaggaagagtaaggggagagcgggaactctgatccagcagccagctacttaccagtaaggaagacacatcagaagctggacagtagagacaaaagataaaagaaacctaaatttacagaggggtgggggaagttagatttgcgcttttgtttccacaatttaacagttacagccaggtatggtggttcatgcctgcaatctcagctcttgagagattctaccatgaattcaatgctagcctgggctatatatatagtgagtttcaggccagccagagctacgtagcaagactttgtctctcaagagtaaaaccaaacaaaaacaagaacctcatataattgagattaatgctttaagtactgaatatattgtttcaagtccatttaggctcactttaaagtgatgtagtttgagctacttatgcaaaaactcactgcaactggtgaggagcatcacttggaagtttaaaaagctccactggaatgaatggtccccttttgatatggatggagttaaggaaacttctcacccatctaggacttgatttagagcactgaacacagaggtcttagcggggtacagcgagagttctcatgagtacaggagctgctagatctggtgtggctggtttccaggtatggaccgcactgctggaattctgaaaatggtccccagtgtgcattgcttagcatcagtgtaagaaacagccttaggatttttctggtggccctatctccagtaccctatccccctgaagccccttcataagaaaaagcaaaggcaaaggcagcctttgtactttcacctttcggccccaccatagccccccactttcccataacttgtcacctacctcctagagcttactttgttctagcctattgtttgatttcaagtgtgtttaacagacaggagagggagatctgttgctattgctccagatgtgctcacagccccatctccatacctagttccctagtccttggaagagggcacttatgctaaatctcatttacatcactaagcactcactttgcattcctgtgatgcccctgcaaagcacttacacccagtacatttgcattccccttctgtcaaaggaacctccgtcactaattccatcgggatcaattactaaacttcaaaggatggagagtctgattcccttcactataacagtggtttagaccaactccttccaaagcacaaaggcttttaaaacaaataattgagaacccctttgttcctcttcccacattttcacaatggtccatgcaggacagaatgcttatctatacttgtgacctgtcagaagtggccttgactgcttcagcgtctgcctttgatcccttggaacaggaaccatctgaggggaccaaggcatcacctgattgaacaaccttttgacggaagtgagtttcctaagctttcaatcagaggttaatccttttcctctcctccctgggccaacggtgagcctatgattctaaggcatgatgggtagagccctaaagttctttctccttcctgtattgtctttgcaggagccccctttattattattttttaaaagagattttatttagctgttttatgtatatgagtacactatagctgtcttcagatagaccagaagaaggcatcggatctcattacagatggttgtgagacaccatgtggttgctgggaattgaactcaggacctctggaagagcagtcagtgctcttaaccactgatccatctctccagcacagaggcccacttttaaaataagctgagtatataaatgttactgacgtaaaatgacaaccatgcttcaaggaaatagaaaactagcttaagacttgcctgacataatatctcacatgctagcattccttcaaggctccgccccacagttacctagcaacaaccatgtatgcctggctcactataaaaggggctgtttgtcccctcttctctctcctaccctcttgctcgctcttatgctctctgtcccttctctccccattctcctcccccatctctctccatgtgttcctggactgcctctcctnnnnnnnnnnnnnnnnnnnnnnnnnnnnnnnnnnnnnnnnnnnnnnnnnnnnnnnnnnnnnnnnnnnnnnnnnnnnnnnnnnnnnnnnnnnnnnnnnnnnnnnnnnnnnnnnnnnnnnnnnnnnnnnnnnnnnnnnnnnnnnnnnnnnnnnnnnnnnnnnnnnnnnnctccctccttccctccctccctcccttcttccctccctttctccctctctccctcttcctctccccttgcctttcctactgtgtggctggtacctcagggggaagggatgccccagcataggcctgcagagggacaccttccacctcaccatacctcacttctaccaaacatcctggctctttctttctttttataaaacaaaacagcacaagtgtaatcctagcactcaggaagctgagacaggaggattatgatctagagacaagtctgggttatgtagtgaattccagactcatctgggctctgacctagagagaaatcctctctttctctcaaaaaataaaaacaaaacaaaataaaacagaagtaaaggaactggtttatactggtctagatgatataattgaccatggcttggggaccaggattcaattttccttgaaagacatgtcccaccacagaagagactgcatgagctgatatgatcacagaataaaaagaagtcacaaattcatgaacctaaaggatacacgtgtggatcactgagtgggtcaacatggtagtaagaacatggcagcaaggtaggataatgtcttggcatgtaattttaattttaaagttagtagagaatagagcttctttaaattaagtgataaaacccaacccaagagtttttatctgaaagtaaggatgttaagtcagaggctggctagaagagatgataatttataagaaagggctaaagatgggctggagagatggctcagtggttaagagcactgactgctcttccagaggccctgagttcaattcccagcaaccacatggtggctcacaaccatctgtaatggaatctaatgccctcttctggtatgtgcccgaagacagagacagtgtactcaatatatatatacatacatatacatatgtatatatatgtgtgtgtgtgtatataaataaattaaaaagaaagaaagaaagagagagaaaggaaagaaggaaggaaggaaggaaggaaggaaggaaggaaggaaggaaggaaggaaagaaggaaggaagagaggaagggagggctaaagagaacagaagatgattctagcagttgacttgcaatgttccatcgagtctcagtggtctccccagcccaaggcaggcagtctgtgggacccttcacagagacacatgtcccaaggggatctcagctcatggcgggtcctgctctgcaggtcaggctttcccacgggaggtgcatctcagagtgtctggtcctcaggctcctggtggagttgaagtgagacaaggagttctctgctctaggctacatcctgagagctcacagaaagtctgacatttcttcagctaagacaaagcaggtctgtttctcatatagagataaatccagctaaaagtctgggctctgggcattcagcattgtttgaaccttaaattgctgataatcatttggttctgctcttttgcaaattcaaaggttctcaaagcgatagcatcttcacaggcaaggttgaagtaatttcaaagtagagtttggaataaatgtttgctttcaaaggattccttatttaacattcttactttccagacttaagtttgacccatattactgaagaaaggctatttagattacattttaaaggacacaaagggtggacaaataatcatagctgtctatctttttagtgatgtgtagggttagggacccataagactttttctgacagttgctatgacggcagcgtatctcagcagcagtttttaattgagactttcaggtcctggttatggtctgacagacaattctttcgcgtacttagggtatagctgtctcaaaagtttgaactggaattgacttaggtgagacaaagaagtaactgtaacggtctgctttgatttcacttccttttcagacactgcccatacatccttatctggaactctatcttctcttctctccaggagagaaggcagcgctagactagagagaggtgaggagcctggtacagttctttgttagtttctacaaaagcagtcaacttccttccttcttttccttcttcctcctgcccccgcccgaccccttttctttccttattgaggcttttgttttgttttgttttgttttgttttgttttgtagagaggcctgtgtccatctgtagctcagaatggcctggaacttactacacagccttcaagttcacagcactcctcttcctaagtttaggactttaggccactactcccagccgtatgaggatttaattcagagaaatcatagggcattggcttttagggaagggggctggagtagtcgttggagaagacagagggtttaggcttggcagagagaggttaactgtatttgtcacgtggacaagggaaaggagaagagagaaagggaagtactcagggttctggctcctcggttaacctggttgggtaggctcttgtagtagatagaattcagtgtggcacctctgtctcctccctgtccctagctccagggttcttgctttgccccaacctggaagcctatattcagaggtggggggagttccaggtactggggccaccctataccctctctgtcttgcctgtggagaccaaaaaaaaaagtcagtaagtccattttcccttaggactggtctctcaacctgcaggttactgtttctaccgaaggtgacctccagacatttagccaaaagggaggtgactgcaggaaacaaggtgagaatggacaagatgtcaatcaaggggtacctgtaggggcctgaagtggaaacttaagggttctttggaaagtctattggatggtgttttttttctggggcaaatgcatgaaggaacgtttagctgaagcagacacaggtgaaagaatgttctgctaaagcaaacacatgaaaggacacgtgatgaaggattctttgttaacaactcacatgtattggtttgacttacattgtgtagttgaactccatctgtagggactccatagagagaactacacccaaaaacttctggtggtgtgctatagtttcttcctcagactctggctgttggcaaagtgatgttagctgagatagatgcacttgctaaggcgagacccatggagggtataaataggacttgagggacagtgatggaggctgagctaggcttgcttatagagttagctgtgtaactcttggtctctcgtcttcactgagctttgctttactgagagaggcatagcctagaacttctcctagtacctcctgctaactcctgccaaggctgaggcctggctgtttctgctaggtagtgccaccactgttgattcgtgcggtgctatatatacaccaactctaccgaactgaactgctggtgtatccatgaagtgttttcaagtggatggagctgctgctgctgctgacctgtgaactgaactgctgatttccagacaacacagatgggagttgctccaaagaaactttctatgcaggtccacttcccccgaattctacccactatctctggtgggtggtgggctagaagggaggttagaatgtttaaaaaccatcattaaaaatatgatttgaaaaaaattgaagttccaggggcccctccttattcctaaggacttgggtagaatgctgccgctccttggatggcttagggataacaaggctaaatggcaggcataatgccaggtttgcctggatccttcatagagcctgacatgaaatccctcagtgtctccacacctgggcagtttgcttccccagcctgtacctgcagcctcttctatcagcagtgactggagattctgtaacattgactgggtgacattccctcctacgggcaacatctgctccaccctaggttaccctgacagtacaggtccccctctttgactccttctcgccgttgggttttgtgggcaagctgaggcagggtatgctgatggtggtagtgagtcaggcagttctgtcctttctctttcctctctcacttgcatgtggcattgtagaacaggcgccttcaactcagttcacaacaggttttgagaaagggattggaaagcttcagtagtttctcttgggtccttgctttgcgttccacagttgtgctgcttagctttttttggttgtttttgttttgttttgttttctcaattggatactagctggggtcatctgggaaaagggatcttggttgacaaaatgcctgtgttagattgcctgtttggcaagtctgtgtgctattttctcaattagtgattgatgtgggatcacctagccctctgcagagtagcgttactcctgggcacatggtcctaagtgagcccatggggagggttcctctgtggcctctgcatcaattcttgtatccaggttcctgccccaacttccttttatgagagactatgatctggatgtacgagccaaataaactttcctcgccaagttgtttttgatcatcacaatccaaagctagttaagacaaccgctgtgttttgagttccaaaccaggttcctgtgagcttgtggcttgaagggttatcgtcatcaggtgccagcacagtgccgtcatttccagttgataatcgtccatctgtcagcatctatctccttaatatagacagcacagcacttagtaatgttgggaaccttggctattcctgtaattagttgttctagttttactaggacccagaactgttactgttggttagtgtctggggtcaggcagctctggttactaggtttcttatccaaagaactgaaaacacggttcacacagattcacaaaggaagcaaggtagctggatgggagcaaggccacagtgcagattgttgagggagacaccgtcaacactgacagctggcctcaggacagcactcattgaatcatgagaaggaccagaagaatgcttgcaagggttcgttctctccactgaacccacggacccagggaatcgaactcaagtcatcaggtttggcagcaagtacctttactcaaccgagccatctcgccagccctctcctttcttttaacaaatgaaaatttacggtcttcccagagacgccttggatgggattgtaaactgataatatgaaaaaacaaacaaacaaacaaaaaattagttacagagttgaatcagagagttagaaccagtcttttgcttgtaaatgatgttttgagagtcctagcttttacaactggaaaggtagagaggccatgtgtccttatgcctcaagaaaacagctttccattttaatgttcccagtgaagcgtctctatggacgagaaatactgtctttgttccaaatcgtcctagccaactgctgttgacagtgctgccattctccatgctccaggcagcaggcttgggccaggcttccaggtgaggccttcctttctctacccacaattccttcatcttcctacactgccttatttcaacagcaagcttaaagcttttgaaaagcttgtagagtcaggcaaacaatctcctgctccttctcacccacttcctgggtctcttcacaggaagagggaaagagatgtggtaagacaatcgaagagcaagtctgccttaaaagcagcaaaaccaggaagttctctcgtttttgaatttgcattatcttgtaaatctaacgactcacctgtgggtttttgaatacggaaggtgaggctgctggcaaatgcttgcaagcaatagctgacaggcttcaagacaactccagtattagtcatcacagagatgcgtgccaaaagggaccatgggtaaaaacatctgctgtgcacacagatgccccctgctgagccaagcacacagagaaaaccaactccagctcggagttgcataagcaaagaggctgaggcactggagtgcttgatgctctcccagagtgggaaattagctttccgatgggtagttaccttccagtgtctatgtagctcagggagaccttgaattcacagcgatcctcttgcctcagcttcctgaacgctagagttacaggtctgtaagaccataatattattatgtgtttgtctcaaagcctttagtgtcatatttttttcagggtgccttacaatacagaaatggaattctaattctatcagaatagaagccagacattaacactcgtccattttaccatgtggtgagatgtgggggtctccacagcagacctggctgcatggtgactgattggtaaagacaaggaaatcttgatgtttgcctaggaagcagaagaactggaggtaccagtcttaaacacctccctctcccttttctccctccctcccttcttccctccatcctccaccttctctatctctcttcctttttttcttcaacaaatttaaatagcaccgttaaaggactggggctagacttttctttttgattattttagttgaccggcaattataaaaagtcagagaatcgtgcactggatctgtgcctctcaacttcagaaatagtcctgtgaaatcatacctgtcaatcctcccctgggaggctgtggtgggaggggagaaacctgagtaggtgaagttaagggtctggacttgcccttttgaatctgaaaactattgatgtgccgggttgaactgtcttactatcaatgtacaatttgccagttgcatacagactaagaaatcatgctggaaacaggagggccacgagtctggacatcagcatcttgctggcagatttgaccagtgtggaagatctctttccagagtgaatcatttaaagacagaatcttttatgatgaaaccaccctctggagtttgaaaagagacggggctgctttaagagagaaacaggaagttgtaacgagaagccggtctgaatgctaagccatctgaattgcttgcgaagtagcaacaaagtagcagcgtttattctgaaattctgtgggcgccagtctatcctaggcaaccctcatctaagggctcatcccttgtccagggatttctctgagcatcacagtcggtcgagtggagaatggctgggcagcttcggtttacgtcagggaaggatgaagatcattttcaacaccagggagcagtggagctactcgcgtttaattttttgctcatccttaccattttaacaatctggttatttaaaaatcaccgattccgcttcttgcatgagactggaggggcgatggtgtatggtgagtgtgtaaatggtggggtagatgtgtaacttgttgcctgggcgtagtaattagagacttgtgctcagatggcaaagtgcagaaagtgaggggaacatgctgattgaagtgtcattagctcagcgagaggtgccgcagtgttagggatgctaacctctttccagaggagcggcagaaattccgcctgaccacagagcagctgtcacagtgacaggctctgaggcagcacagtatgtgagtctgttgacagctgcagtcctttgtcatgcggggagtcatggagcgctagtcatggtagtaggttgtggtggcaatgcagtcagtcagcgcagcctcttccacaggcagccagaggagccaggcaaagttaagggaatggcttcagactgcatggaggaaataccctttcaactattttcaagaagaaatactcgtagaaacagaccccacccttgtaatgggaataattgtgtccaaatcctttttcatcctgtgaacactattttagcttctgataataaaagtgttaaaccaagaatttcctatttaacattttccattgcttagcctgatttaatatggtcttgtttataatacttatttgtgttctcacaccacacacacacttctctctctctctctctctctctctctctctctctctctctctctctctctctctccctctccctctctctcctctctctctccctctctctctccctctctctccccctttctctctctctcattttagacaggtctcactctatagacaaggttggcctcagactcacagtgatcttcctgcttcaacctcctgggtgctggaataatatgtataagtaagaacacccaattctttaaactacagaggggaaaaaaggttttaatttaaggtttaacctcccaaagtgatgctctttctgtgcaagttaccatggcatccatcatttttgggaagtttaataaaatgtgattatggagtttgtacagactagcctggtttatctagtttattaagatgagctacaaggcactagcactgagctggtactgagacaaattgtctcactaccaactgacttcatgacccttatcctaccaagtaaaaggtaacagctttgaacataatgggaacagtcaagggctgccaaaacggatagcaaagaacatactttttgacttctccttctttttggaggaggcccttttatatgtctgggctccagggaaacaagatgagggcacctttcatgtgctaagcgtgtgatggactgatgttaacaaggaatggtcctgaagggaaagcatgagatagcctacccttgagccacttgagctgtaggacagaccgttaaggccatgtagtgcagcttgctttctcgaagccaattcagagctccactaagtttctttgtactgaaggtcctacagcacacagcaaaacttttcagggtgggagagacaggccaaaagagaagggcacagcgctttcagaggccgagccctagacgtgagtcattctccctttctccataatcgatttaccaggagctttctctatcttgggtaataaataatcaaaaagatgcagggtgtaatctgagaagccagaaacactgtcatcctaagcatcagatcaaagggctgtgcatattttagcgatacaacacatagttaagattaaacccttactggaagggaagatttctccatgtgcttgaattataacagtttttttttttttatcaattttcttctctgtggtagggatattgttttataaaagtagttaaactttgacttaaataattcttgattagatttagttaataatggttgtccctgcactgaacagtcaagcatggtggtcctccccaagctgaacagtcaagcatggtggtcctccccaagctgaagagtcaagcatggtagtcctccccaagctgaagagtcaagcatgttagtcctccccaagctgaagagtcaagcatggtggtcctccccaagctgaagagtcaagcatggtggtcctccccaagctgaagagtcaagcatggtagtcctccccaagctgaagagtcaagcatggtagtcctccccatgtgttttcatacatttcaagctgttaatgaggttcttgttcatttcaagggtaaactctgaaaataattcattaagatggcttccacagacttctaggataagcattttttcaaaatgctttactgaagtgcttagtgtagactttctgtcagggatgtaatgaaatagtcaaactaaaacccaggagaacgaggaactctaaggaacaacttttagtagtaagagggagagaattccaaaggtttagtctctgtaaatgaataagcagttcgtacagttgtaaggaatcttagagaatggaatcctcgttgtgcagaggaagtggggcttagatggaggtcatggtagtggctggtgctgagctggggtccagcacgtcttttaatcagagatgctgagacagtaataagtaacttccttcagggatattccagggagtgtgtgtatgtgtgtgtgtgagcaggggtgggaggatggtggagaaatgaggatgttccaaatatatgatcctgttgtaaacctttaaggcttggccatctagtttcttctccagggggtctgacaaagtaaaatttcagggtaaaccctttctccatctgaggaagcaagacattgtttctgcagtagtctggctaaaggcataatgaaaaccaatggagaagacgacaaacgtagactttttcttgttttctgaagacagacactttagagtagcctgggacagatctctccatcctgctgttaatcaatatgctgaccgttaatgtctgttctggcttttagtcccatttaagtgattattaccgctgcttattctttccagtcttgccatagagcacctcggatagtttgcctttccctttgggctcatcaaagaattaggtgaccagcccctacctctctggctgcggctcttgccttcatcaactgctcacacaaaccatttgcccttatactgagagcagtactttcttcaggcaccacagtacctgtattccctcagcccagtccccaacatgcctccctgagggcattctggtgacctgtgccaaatgtcccttagaagatgtaatagatgctgatacatttaatcagtgtacttaggaatccaattaaaaaaaaattctagggatcagaggcttagaaaatgagcagttacaggataaacaaggagcaaggtaaccaagcagaatgttcaactgttctttcataattattgttagaaacaattttcaagtcgttaaccttaaaatatcatatgcagggttgtagaggccaagaagtttcctctgtgatgattggaaataaaactgaagacccaaatacaagtaattgcttatacaaaaaataataaaataaaaagtcttctctcattattatgggtcatgggtgctttttataaattagcagtgtcattgtagaaatatttttgctctgccaggcacagtaaagcgtaattgtcgcgcatgacttcctatggctccagttatttcaaaatggaagaataagcaacagccataatcatttaaactggactaaaagccagaatgagcgttaatggtcaaaatattgattgacagcagctgggacacttagtgctgcttaatttggggcctagattcatctccgaggtactcattagaaagcacttgctccttggtccctgatagcatcaaggaatccattttaactccctaggggatgtcacatcttgtagaacatttgtaatggcatacctttgaggactgggatttaagattaaggacagaacaatttaaaaatcttagagttctacctttgattttttgtttgtttgtttgtttgttttaaccatcatctaatatagagactgtcctggattcatgcagaagttagttcatcatttagttgggaccaaagaaatcccaggcctctatagttagacttttgagcttatccaaagttctgtcactttcaaacgttttctggtcctttaagggtattcttccctaagcttaatagaacaatttaacttaatcaacagctagttctcccctcccaggtttaaagaaactatagttacaaaaacatctttccccaaatcctgtggaggtaccgatttcacctcagtctttctcagaggttcccagctgaaaatggattgcttgatatgatgtgtctccactttattggttcagttttgctctgtcgccaatcagcctgcatccctagctgacagccctataggggatgctcatcaccactgcccacccacatctgcctgagctgtccttccgcacattgtctgttgaaacctggcaaactctgtggagaaagcaggatgtcttgctctagtccatggtttaatttctgatctgagttttctcatctgtgaaatgggcaggcaataaactcccttacaccttcaacacttctccaaacttcaagccaagccagacttcagtcagacatcttggagctacttcccttaaacccagtagctttctcctgggaatcaaaccggcaacaatgaagtctaatagtttctcctgacatggttttccttaacaatggctcaccactcttagttcctctggacctgttttgattctaattgggtgctcagtaagtcttactgatcctgctggaacagtgagttgacaaagcaacttcatcagagtggctggggaaggctgtgtacatctatctctctaggatcctttctcaccaacccagagtgtctctgtcttaacctgaaggatctccaggaagagcagttaagttctagagtgcaacatagtcaatttgttctccattgtgctacgaaaagctttatttattcgctttggagatctgcccaagttttttcacactgtatagtgttgctaaattaaataagtagaattactgaatcaagggcacttcttcctacctgagatgttatgttggggcatgccaatacacacctgtaattctagctcttgggaggcagaggcaggaggatcaacacaaattcatttcacattaccctgacttacatagtaagttattggtcaatgaaggctatgcagtgcagctctattaaaaaaaacaaaacaaaacaaaacaaaacaaacaaacagacaaagaaacaaagaggggaaggattttttttttgtaaaatcacctttctatgctaaataagcctgtgtattgtgctggggttctaaacctttagacttgtgcagctttggcctggctgccccagtccctcttcattgctcctctctgaatggtctgaagggttactgatggcacacactaagagaaggggtttgtcactcaagctatttatgagttattatctagaatataattgaattaaattcatatgggtagtgatagggaatattaacatttgttatctcaaaaagtagatatataattttaaaaactagctaatgcagataactcatctaatgcaaaattagactttacacatattgaccagtttaatccttacagcagtcatttctcagatgaggaaaattgaacaacagagattcaagtaactttcctaatgtcacacaaagactagagtccaggttcgggagtcaaagcttgccagtttggttctatgtagtttcttggtaatgtaagtgtgtgcatgtgtatgtgtgtttctgtatgtgtgtgcacaagtgaataaagaaggattattgctttcatgctacagataaggaatctaatactcagagacacaaagtaactggtaacagttgggaacggggtgctggggggggggctatgtttcagactcaggacgcctgtgttattccaccagccataagcattcactctagaacatctgctattgttagcaaaggtttattctgttcccggcaatggtacctgtgctggatagttttatgccaagttgacacaagctaaagtcttctgagaggaaggaacctcaacttaagatcaggctgcaggcaagcctgcaaggtatcaccttaattagtgtctgatggggagggctcagcccaatgtgatggtgccatccctgggctgattggccattggttctataagaaagcaggctgagcaagccatggttagaaagccagtaagcagccctgctgtaagccctctgtgtcagcatctgcctccaagtgcctgccctgttcaagttcctgtcctggcttccttcaacaatgaacaacaatatggaagtgtaagccaaataaaccccaaatccccaagttactttgatcatggtctttcatcacagcaataaaaaccctaattaagacactacctttggaagtttacaaaataaatacaaagaggggattagaaaatgtataagctgctgcacagagttggtgggaacatgtttcaaagcttatcagagtgtcccaattaagttagttggggattgctgttggcaggggcagtttggttcctttcttacctgaagatccagaaatggtagtatctggacaaaaaagcccaatgtaacccagtggaagcaatactgtgacttcccattcatgctatgtagctggacctacagtatcccagggcaggtggcaaggctgcctggaaacagccacccacatcccggagaaactaccttgccagttgcctcatttgggttgtaaacacccatggatgtcagaatgtgtgtagcagatgctttatagagcttgagaaaagagatcggacttatgtaaatcatagaaagaaggagtcagggctttcttcaaatgtgagcttgactaagtttaattgttggaatagtctgaaggatggtaacttttatctctggggcctcagaaccctgaaagcatcctggtgagtctgacactgttgatcttgatggagttggaaggctgtagttctaatcctattggctactggagggaactactgtctatatactgttttatgtatagtgcttttagcagcctgaatagcatcatcagctaaagaccaatgatcagaagagacaagtggctaggatcaaaaccactgacaaaaccagctgtgtatctacagccttctagtgcttcacagagggaaggaattcaacagacaggtgctagttttatgtcctaccatcttccccaccccattagggtggaaaccatctcccttctggggagccactttcactatctacattatgctactactggggaaatgatagattgctttgtgtagaactataaagtaagaacccgttgtttagccaatatatatctagttagaccctcttgtctacagttctgctgatggcctgtaaggatgatgacaagctattagctgtaaaaaagctggtgcctgaagtagtttccagagaaaaaataatctataatacatgctagaaatctgagaacccaagctgcgtagtggtggtgcatgcctttaattctatcactcgagaggcagaggcaggcggatctctgagaatttggtgcaagcctggtatacaaagtgagttccaggatatccagggttacaaaaagagactctgtctcacaccccccaaaagaaaaaaaatcccagagatgtgagtgttgtgttgtaggcatgtatgtgtatatatatatgtgcatgggatattgagtgttacctaatgtgtaccaaggatggatggtagacatgtggtagcttacactggagacaatatgatagctggacttctgatattttccatgagtctttcacacaatgataaatattttggagttgtccccaggtgggaagcttcatggatgtcttctatctgggcgtatgtcaggggcctctctgactggtaggcgtctcactctagttatgactccattataagactgtttctccaccagggcaagtccacagtgaacagtgtgaggtgatacactgtgtcccttttagaaacacccacactctgcactctgctttcaaatttagaaggttggtaggagggcagggaaagaaacaaaagccttaaataacagaaagcatcacacacacacacacacacacacacacacacacacacacacacacacatttccttttggtatctgaataatctcagggctaaaactaaattactaagccagaacttgttgggaaatgcattcagacatcgatatccaaatctttgtcatctctttaaaccacagaatgctgataagtcaaaaaaaaaacctatcagataagaagttaaaagtatcagagatgcagttcagctccagtgcttgtaaatgcttccactgtcacactcaaacctgcactattgacctcacacgtcacccctgctgcctgattgtccaatccttgctgtgctgcctctgcatgcacacactgttgtgtgtctcctgacctcttgcacatccttaaacatctccgagaagctccctccagtgccctgaggacagggctagtggtgtttcctttagattccctgggtcttgtttttagggctgggaatgcaggtcagtatcagtgcttgcctggtacgtacaaaacctgggctctagtcaacaagtgatggaaaccttgacccctgaacatcacccccccccccatactcacacagatgcttctctgtgttcctgtctcttattttatgaagctccctctcaaggattccttcacgtgtcattggctgagctaaggtaacataatattccagagccaattgtcagcaaggggaagaaagaaggtgcctggagctaaggatgaagtcagtttacctggagcacatggccaaaataggcatagaaataggcagccaacaaccataacaaagtaccaaacccccaaaccccccaaaccagggcattttctatgtggggtgtgtgtgtgtgtgtgtgtgtgcgtgcaatatcagctcctagtgaggtgctagcaagaggaccatgagtttgagaccctgtcacaaaagaaacaaatagaactttgttaagtgaagggacagagagagagagagagataacaaagatagttttaggggacatatcacaggtagagatgctcagggattcacctacttggtttagagaaggggcagtgtcctcgctcaacacacagaggctcagctccagcacccagctgtcctgcagtctccatgtaggtgtgtgtggcttccaagtccttgcaaactccatgtggcacttgagtggatgctgtacagtattccatacaggacataaagtatgtagtctataaatctcacacccacagctgggcaggctatgcccctcatctccagggagccaccattcctacaaaagagagtcacaagggagctggagttgtgctttgtcctattgtggggcactatgggtgactacaaaagctcagaagagactgggatagctctgtattttaaaaaaccacttgctgtctgctgccatttatgattttgtctaaatattaaagccttgtccatatttctctaaccaaagccctgatagagtaacatttctgtaccatattgaatatcagtaagactcaagacacttggctgtgaaatgaggtttatagtgagacagctatagtacctgattctgagaggatgttagcatgctagcattccaagggaggaaaaggccagtcggctgctggcacagtctaacgtttctcgggataagaacgttttatactcatttctttctggctcacacacgctgcagaacatcttatacatcagtggcaggcaaatagaaaagagtgcctaatgagataagagggaatccaaatgtcagggctggtgtttctgaacgatccttggcgggagcaccccagaagctccttgctcttcctgtcctctctcctctctttgtcatagagtctcatgtagcctagtcttaccttgaactcttcatcatctctcaaagcctccatccttcaagggctgggattacacatcactacctctctgctctttcatgctctgacatggtgtagctgcctgccagacatctgctggatgacagttgtgtagaaagcccgcaaggacaggaacatcacagcatttgttgaggtcccccttctctaggacactttaaaatccctgtgatgggtgaactacatagcagacccctttcctcctgacttcaaaggagtttgcgcttagttggaaataatccaactacaagtctgcctaaagtgtttgtcttttctggaggaaaggagacgaatcatagcacagagcctctgccttaaacggttcattgtgtatccaaggtctgaaggatgcgggctgtcataggactggctcctgataccgcgcggctcacactatgtgagctgcactcaggtgagagagatctgtgtacacgggctccgggctccgatagagcgtatgtttgccaaggcgagacccaaggacctttttcaggtactgggcgctctgagagtaaatctctgtcctgggcttgtgtagagctgagggaagtcaagattcttctccccactccaggggttcagacactcaggcttgacaaagctctcatgtttcttaattgccgattgtctgagaaggaaatgccaactcctctcaaagaagtgggtggggtctcagagaccacctctgagtgagtgctgtgagagaccaaggtcacggctgtgggctgtgagcgcatgctctgggaggcggtccccttactgagtcaagatagctcctttgcttccgattttcttatttttcaatgggagtggtgttctgctgccacggtgtccagtcttctatctatctgtgatagggtgatgggcactttccttgtccagtatcttagtgtggatatgaaagcaatcccttctgctcagagttctcttcctcttgcagtaggcctgtacctctcatccactcccatgcagtcttgccagcacagcgtgtgtgagagctcgccacaccatctttgtgtcagcatccgcccagctcactgagtttgcctgcgaaaaactgtgggaggctgcgtgggagcgcctggcctctgaccagcaaggactggccagctgctgctcctgcagcctgggcgtgctagccatgatggctctgcaaaccgccaacacttgatcccttccaacacttggggtttggagcaaactagggccagaacctcttggctcatatgttaagttggatcctataaaaaggaagtgctggaagagattaactatagaaaataatttactacaggaagcttctttgagagaaaatggggagggggatgagaacttcaaaataagtgtctgtctttgatgttggaccaacatttatggagaaacaaaaggaagtgaggttgtacagggggccgttagcatacattacaatcccaagaaaggtttggaaaagttcaagggagactttacccatgattggcttcagagtggtccccagccttagtaaacccactgggcacagacattggctggatctagaatgcctctgcatgaatgtgctgatagatcatggggtgcaggagctatggccatgccaactgccctcttctcagagctgtgtattcatagctaatgtatctggtttgttgttgttgttgttgttttgtttttttctgtctgcaaatgtatcctccattcacagtgtttcttattcaagtctgagacccaagctggtacaggaccaggcaggacccctcagtttttgagaccttatgtgaccttaaccacaccaaggaacatgcatttgctgttaaggcaagaacttggctttccatacttaagaattggctatgggcagacacttcttgttcgtttcttcttgcctctttgacagcatttttcaaatctaagtagctaacctactgggagttgggaatgacattaatttaggttctatccatttagatccctgcagggtctgtcttgtgcttcttttaattttgtgtcccactagagtaaagaaaacaataatagtaccgtagttcacagcaccagttgatcagttttaggaaatgagtggacagagtgatgtccttctgtgcctcagagcatgaggtgtgagtgagctaccatctgtactatcctgggtggtttcattataagcactcagcactatgccactgttctgtggcaggtcatatactcaacaaagatcagtgtgcccatacatccggccttttatgactgtgctgacatagctgagaatacacaaaggattgatttgggttttagagacttcagcctatggctgcttggtctcctctctgtggtttgaggtgctaaagatcatggctgtataggcctacttcctagagctgcttacattgaagcagaaacagagaaccaggaaggagctgggacactggcatagttttagggaatgctcccctcccccagtgactttgatctaatcatgcctcaatgattgaacccagtagctgaggacaaactttcaatgtggacttgtttgggatacctttatgtataaaacataacacctaagtgtctcttcttgttcatgaagattgaatgcaattttttacttattgtggaagagtagattaaactgaagcatgtgtgagatttcaaagaaaattctcaaagaaatttgctaattcgattttcccctatttctcagtctaatcagttctctacaagtgatagttcttacacaaaaaaaatctcatgattttaccttctcgtctacaagctttcattcgttctcatcaccactgaactgaaagatcccaagtttcttagcacttcagagctgtccttccatccacctccctctttctctcccctttttcttccctccctctccccactctctctccttcatttctaccctccattctttccctcttcctctcctctacttcatatattctttctataccactattagatctcctaagttcctttgtattgatacattgtcctaaggaggcttttactaaagattgtgaccacagaaatatcaacatatttgcaacagaagttgtcacatatagcagcccaatacaggtgctcctgactgccagatgtccccctactcctggtttctagggacccaggctctgtctgaccagtctatctttggggcctttaatttcttcccattcagcccataaaggagagaaagaagaaagagaattcactagattattttctacccccaacctcaaagtgaaacacttcacttttgcttacatgctattgaagtggtctggccagtgacaaggcagcagagagatagtccggctgagcagccacctcctaccaatggtgtagaatagagagagcttagatccagatacactatccactgactgtgattcccactgctacccagatgtgcagcccagatcctgctcattatctcagcgctcatcaagataaggactgctgtgagccttcagctttccctccagcttcacaccatagagagcttgtctctctaaccgtgtgcttcccagacacccttgcacatgcctactgggttagagttctctgaacatggatcttcaacttaaactcaagctcatccagtcctgaaactatgtatatgtatatgtatatgtacacattcttagatctatagatatgtggaataaaatatttaatgcaaaatatctcacacaaaaaaatgaaatgctgggtaaggtggttcaccctgtaatctcagcacttaagagacagaggcaggagggtcaggaattctaggccacccgtgggctacatagtgaggctgaggccagcctggacttcatgtgactctgtttcaaaaactaaaaaattaaacaacatagacaaaaagaaaagaagagaaatgttcctagattataaaatccacaagcaaggggtaaaacctccgaaaatagaggttcaaagagtaaaatcggattatttctcccaaaacacatatgtgaacccacgttttgaatcaagggctgtttcgggtctctaaataaagctcttttcttctctgtcattaataaattcatattaaaaaggtttatagtgctcttacacccatgattgtcctagtagactttagaaacttagaagtcaaatattgatcccttatacaaagggactctgtgtcaggaaaatacatacaactacaggcaagtaaaactttaactggtaattgtgttaagaaaatgtacctgggtgcctggcaacaagtatagaatttggtagctggagaggaagctgcttgatccagtgacttcttgacattactagggagctaaagttcatctttaccttgaacctgcacccttggaccaaattcccttctggttggtccccaatactggccatgaaaatcagagaagctattgctgtgtcataccctcaggaagagagcaaagccacctttctccttgggtctgaaatataaatgaattctgtcagtgtgaaggggcgtccctgcagagccctctcctggatagcagtctattctatgttggccacagaacaaaggttctcttgaatactttgaatagaaaggggaggtggataagggagaaggaaaaaaaaacattaaaatatgttccaagtatttagtcagtaatgtccgtgacttattccaacgacacatcccaatgagtaagtatctgtgagtaaacaactctcaaaccaagaaatggccctgtgttttctcatgtcacttctataggttccaagtcaaacgtgtgcttcagtcaactatgggagacgtaggatgctttcttccagtacaatcatgtgttctttattttaggcctcataatgggactaattttgcgatatgccacagcgccgactgatattgatagtggaactgtctacaactgtgggaacttgttcttcagcccatcaactctactagtcaacatcaccgaccaagtttatgagtataagtaccagagagagatcaaccagcacaatatcagcccccaccaaggcaacgccatactggagaaggtaagggccctgtcagcccaggcagcttcatcttccctgagcaatggcatcatttagaagcctctttacataggtatacgcctaaacaccagttgctttcacattgtcacactggggcacttagttgactatataaacccagctgtcaatatttttcataacatttgggcaaagattttaatataattttccagcaagccagggctgtatttgcgttgtattaaagataaaaatctttcatcatttttcctttcttgagatgtaccccagtgtgcatatgggtgcctttagtgttgctgtacctgctacctgttggttatttgattcaaatctccttaagccaaggaggaaacagaggaaagagagctttcccatgctctaggatgggttctggatgccaatacaaggcactgccttctggctgtttataaacacaataacctacagttcannnnnnnnnnnnnnnnnnnnnnnnnnnnnnnnnnnnnnnnnnnnnnnnnnnnnnnnnnnnnnnnnnnnnnnnnnnnnnnnnnnnnnnnnnnnnnnnnnnnnnnnnnnnnnnnnnnnnnnnnnnnnnnnnnnnnnnnnnnnnnnnnnnnnnnnnnnnnnnnnnnnnnnnnnnnnnnnnnnnnnnnnnnnnnnnnnnnnnnnnnnnnnnnnnnnnnnnnnnnnnnnnnnnnnnnnnnnnnnnnnnnnnnnnnnnnnnnnnnnnnnnnnnnnnnnnnnnnnnnnnnnnnnnnnnnnnnnnnnnnnnnnnnnnnnnnnnnnnnnnnnnnnnnnnnnnnnnnnnnnnnnnnnnnnnnnnnnnnnnnnnnnnnnnnnnnnnnnnnnnnnnnnnnnnnnnnnnnnnnnnnnnnnnnnnnnnnnnnnnnnnnnnnnnnnnnnnnnnnnnnnnnnnnnnnnnnnnnnnnnnnnnnnnnnnnnnnnnnnnnnnnnnnnnnnnnnnnnnnnnnnnnnnnnnnnnnnnnnnnnnnnnnnnnnnnnnnnnnnnnnnnnnnnnnnnnnnnnnnnnnnnnnnnnnnnnnnnnnnnnnnnnnnnnnnnnnnnnnnnnnnnnnnnnnnnnnnnnnnnnnnnnnnnnnnnnnnnnnnnnnnnnnnnnnnnnnnnnnnnnnnnnnnnnnnnnnnnnnnnnnnnnnnnnnnnnnnnnnnnnnnnnnnnnnnnnnnnnnnnnnnnnnnnnnnnnnnnnnnnnnnnnnnnnnnnnnnnnnnnnnnnnnnnnnnnnnnnnnnnnnnnnnnnnnnnnnnnnnnnnnnnnnnnnnnnnnnnnnnnnnnnnnnnnnnnnnnnnnnnnnnnnnnnnnnnnnnnnnnnnnnnnnnnnnnnnnnnnnnnnnnnnnnnnnnnnnnnnnnnnnnnnnnnnnnnnnnnnnnnnnnnnnnnnnnnnnnnnnnnnnnnnnnnnnnnnnnnnnnnnnnnnnnnnnnnnnnnnnnnnnnnnnnnnnnnnnnnnnnnnnnnnnnnnnnnnnnnnnnnnnnnnnnnnnnnnnnnnnnnnnnnnnnnnnnnnnnnnnnnnnnnnnnnnnnnnnnnnnnnnnnnnnnnnnnnnnnnnnnnnnnnnnnnnnnnnnnnnnnnnnnnnnnnnnnnnnnnnnnnnnnnnnnnnnnnnnnnnnnnnnnnnnnnnnnnnnnnnnnnnnnnnnnnnnnnnnnnnnnnnnnnnnnnnnnnnnnnnnnnnnnnnnnnnnnnnnnnnnnnnnnnnnnnnnnnnnnnnnnnnnnnnnnnnnnnnnnnnnnnnnnnnnnnnnnnnnnnnnnnnnnnnnnnnnnnnnnnnnnnnnnnnnnnnnnnnnnnnnnnnnnnnnnnnnnnnnnnnnnnnnnnnnnnnnnnnnnnnnnnnnnnnnnnnnnnnnnnnnnnnnnnnnnnnnnnnnnnnnnnnnnnnnnnnnnnnnnnnnnnnnnnnnnnnnnnnnnnnnnnnnnnnnnnnnnnnnnnnnnnnnnnnnnnnnnnnnnnnnnnnnnnnnnnnnnnnnnnnnnnnnnnnnnnnnnnnnnnnnnnnnnnnnnnnnnnnnnnnnnnnnnnnnnnnnnnnnnnnnnnnnnnnnnnnnnnnnnnnnnnnnnnnnnnnnnnnnnnnnnnnnnnnnnnnnnnnnnnnnnnnnnnnnnnnnnnnnnnnnnnnnnnnnnnnnnnnnnnnnnnnnnnnnnnnnnnnnnnnnnnnnnnnnnnnnnnnnnnnnnnnnnnnnnnnnnnnnnnnnnnnnnnnnnnnnnnnnnnnnnnnnnnnnnnnnnnnnnnnnnnnnnnnnnnnnnnnnnnnnnnnnnnnnnnnnnnnnnnnnnnnnnnnnnnnnnnnnnnnnnnnnnnnnnnnnnnnnnnnnnnnnnnnnnnnnnnnnnnnnnnnnnnnnnnnnnnnnnnnnnnnnnnnnnnnnnnnnnnnnnnnnnnnnnnnnnnnnnnnnnnnnnnnnnnnnnnnnnnnnnnnnnnnnnnnnnnnnnnnnnnnnnnnnnnnnnnnnnnnnnnnnnnnnnnnnnnnnnnnnnnnnnnnnnnnnnnnnnnnnnnnnnnnnnnnnnnnnnnnnnnnnnnnnnnnnnnnnnnnnnnnnnnnnnnnnnnnnnnnnnnnnnnnnnnnnnnnnnnnnnnnnnnnnnnnnnnnnnnnnnnnnnnnnnnnnnnnnnnnnnnnnnnnnnnnnnnnnnnnnnnnnnnnnnnnnnnnnnnnnnnnnnnnnnnnnnnnnnnnnnnnnnnnnnnnnnnnnnnnnnnnnnnnnnnnnnnnnnnnnnnnnnnnnnnnnnnnnnnnnnnnnnnnnnnnnnnnnnnnnnnnnnnnnnnnnnnnnnnnnnnnnnnnnnnnnnnnnnnnnnnnnnnnnnnnnnnnnnnnnnnnnnnnnnnnnnnnnnnnnnnnnnnnnnnnnnnnnnnnnnnnnnnnnnnnnnnnnnnnnnnnnnnnnnnnnnnnnnnnnnnnnnnnnnnnnnnnnnnnnnnnnnnnnnnnnnnnnnnnnnnnnnnnnnnnnnnnnnnnnnnnnnnnnnnnnnnnnnnnnnnnnnnnnnnnnnnnnnnnnnnnnnnnnnnnnnnnnnnnnnnnnnnnnnnnnnnnnnnnnnnnnnnnnnnnnnnnnnnnnnnnnnnnnnnnnnnnnnnnnnnnnnnnnnnnnnnnnnnnnnnnnnnnnnnnnnnnnnnnnnnnnnnnnnnnnnnnnnnnnnnnnnnnnnnnnnnnnnnnnnnnnnnnnnnnnnnnnnnnnnnnnnnnnnnnnnnnnnnnnnnnnnnnnnnnnnnnnnnnnnnnnnnnnnnnnnnnnnnnnnnnnnnnnnnnnnnnnnnnnnnnnnnnnnnnnnnnnnnnnnnnnnnnnnnnnnnnnnnnnnnnnnnnnnnnnnnnnnnnnnnnnnnnnnnnnnnnnnnnnnnnnnnnnnnnnnnnnnnnnnnnnnnnnnnnnnnnnnnnnnnnnnnnnnnnnnnnnnnnnnnnnnnnnnnnnnnnnnnnnnnnnnnnnnnnnnnnnnnnnnnnnnnnnnnnnnnnnnnnnnnnnnnnnnnnnnnnnnnnnnnnnnnnnnnnnnnnnnnnnnnnnnnnnnnnnnnnnnnnnnnnnnnnnnnnnnnnnnnnnnnnnnnnnnnnnnnnnnnnnnnnnnnnnnnnnnnnnnnnnnnnnnnnnnnnnnnnnnnnnnnnnnnnnnnnnnnnnnnnnnnnnnnnnnnnnnnnnnnnnnnnnnnnnnnnnnnnnnnnnnnnnnnnnnnnnnnnnnnnnnnnnnnnnnnnnnnnnnnnnnnnnnnnnnnnnnnnnnnnnnnnnnnnnnnnnnnnnnnnnnnnnnnnnnnnnnnnnnnnnnnnnnnnnnnnnnnnnnnnnnnnnnnnnnnnnnnnnnnnnnnnnnnnnnnnnnnnnnnnnnnnnnnnnnnnnnnnnnnnnnnnnnnnnnnnnnnnnnnnnnnnnnnnnnnnnnnnnnnnnnnnnnnnnnnnnnnnnnnnnnnnnnnnnnnnnnnnnnnnnnnnnnnnnnnnnnnnnnnnnnnnnnnnnnnnnnnnnnnnnnnnnnnnnnnnnnnnnnnnnnnnnnnnnnnnnnnnnnnnnnnnnnnnnnnnnnnnnnnnnnnnnnnnnnnnnnnnnnnnnnnnnnnnnnnnnnnnnnnnnnnnnnnnnnnnnnnnnnnnnnnnnnnnnnnnnnnnnnnnnnnnnnnnnnnnnnnnnnnnnnnnnnnnnnnnnnnnnnnnnnnnnnnnnnnnnnnnnnnnnnnnnnnnnnnnnnnnnnnnnnnnnnnnnnnnnnnnnnnnnnnnnnnnnnnnnnnnnnnnnnnnnnnnnnnnnnnnnnnnnnnnnnnnnnnnnnnnnnnnnnnnnnnnnnnnnnnnnnnnnnnnnnnnnnnnnnnnnnnnnnnnnnnnnnnnnnnnnnnnnnnnnnnnnnnnnnnnnnnnnnnnnnnnnnnnnnnnnnnnnnnnnnnnnnnnnnnnnnnnnnnnnnnnnnnnnnnnnnnnnnnnnnnnnnnnnnnnnnnnnnnnnnnnnnnnnnnnnnnnnnnnnnnnnnnnnnnnnnnnnnnnnnnnnnnnnnnnnnnnnnnnnnnnnnnnnnnnnnnnnnnnnnnnnnnnnnnnnnnnnnnnnnnnnnnnnnnnnnnnnnnnnnnnnnnnnnnnnnnnnnnnnnnnnnnnnnnnnnnnnnnnnnnnnnnnnnnnnnnnnnnnnnnnnnnnnnnnnnnnnnnnnnnnnnnnnnnnnnnnnnnnnnnnnnnnnnnnnnnnnnnnnnnnnnnnnnnnnnnnnnnnnnnnnnnnnnnnnnnnnnnnnnnnnnnnnnnnnnnnnnnnnnnnnnnnnnnnnnnnnnnnnnnnnnnnnnnnnnnnnnnnnnnnnnnnnnnnnnnnnnnnnnnnnnnnnnnnnnnnnnnnnnnnnnnnnnnnnnnnnnnnnnnnnnnnnnnnnnnnnnnnnnnnnnnnnnnnnnnnnnnnnnnnnnnnnnnnnnnnnnnnnnnnnnnnnnnnnnnnnnnnnnnnnnnnnnnnnnnnnnnnnnnnnnnnnnnnnnnnnnnnnnnnnnnnnnnnnnnnnnnnnnnnnnnnnnnnnnnnnnnnnnnnnnnnnnnnnnnnnnnnnnnnnnnnnnnnnnnnnnnnnnnnnnnnnnnnnnnnnnnnnnnnnnnnnnnnnnnnnnnnnnnnnnnnnnnnnnnnnnnnnnnnnnnnnnnnnnnnnnnnnnnnnnnnnnnnnnnnnnnnnnnnnnnnnnnnnnnnnnnnnnnnnnnnnnnnnnnnnnnnnnnnnnnnnnnnnnnnnnnnnnnnnnnnnnnnnnnnnnnnnnnnnnnnnnnnnnnnnnnnnnnnnnnnnnnnnnnnnnnnnnnnnnnnnnnnnnnnnnnnnnnnnnnnnnnnnnnnnnnnnnnnnnnnnnnnnnnnnnnnnnnnnnnnnnnnnnnnnnnnnnnnnnnnnnnnnnnnnnnnnnnnnnnnnnnnnnnnnnnnnnnnnnnnnnnnnnnnnnnnnnnnnnnnnnnnnnnnnnnnnnnnnnnnnnnnnnnnnnnnnnnnnnnnnnnnnnnnnnnnnnnnnnnnnnnnnnnnnnnnnnnnnnnnnnnnnnnnnnnnnnnnnnnnnnnnnnnnnnnnnnnnnnnnnnnnnnnnnnnnnnnnnnnnnnnnnnnnnnnnnnnnnnnnnnnnnnnnnnnnnnnnnnnnnnnnnnnnnnnnnnnnnnnnnnnnnnnnnnnnnnnnnnnnnnnnnnnnnnnnnnnnnnnnnnnnnnnnnnnnnnnnnnnnnnnnnnnnnnnnnnnnnnnnnnnnnnnnnnnnnnnnnnnnnnnnnnnnnnnnnnnnnnnnnnnnnnnnnnnnnnnnnnnnnnnnnnnnnnnnnnnnnnnnnnnnnnnnnnnnnnnnnnnnnnnnnnnnnnnnnnnnnnnnnnnnnnnnnnnnnnnnnnnnnnnnnnnnnnnnnnnnnnnnnnnnnnnnnnnnnnnnnnnnnnnnnnnnnnnnnnnnnnnnnnnnnnnnnnnnnnnnnnnnnnnnnnnnnnnnnnnnnnnnnnnnnnnnnnnnnnnnnnnnnnnnnnnnnnnnnnnnnnnnnnnnnnnnnnnnnnnnnnnnnnnnnnnnnnnnnnnnnnnnnnnnnnnnnnnnnnnnnnnnnnnnnnnnnnnnnnnnnnnnnnnnnnnnnnnnnnnnnnnnnnnnnnnnnnnnnnnnnnnnnnnnnnnnnnnnnnnnnnnnnnnnnnnnnnnnnnnnnnnnnnnnnnnnnnnnnnnnnnnnnnnnnnnnnnnnnnnnnnnnnnnnnnnnnnnnnnnnnnnnnnnnnnnnnnnnnnnnnnnnnnnnnnnnnnnnnnnnnnnnnnnnnnnnnnnnnnnnnnnnnnnnnnnnnnnnnnnnnnnnnnnnnnnnnnnnnnnnnnnnnnnnnnnnnnnnnnnnnnnnnnnnnnnnnnnnnnnnnnnnnnnnnnnnnnnnnnnnnnnnnnnnnnnnnnnnnnnnnnnnnnnnnnnnnnnnnnnnnnnnnnnnnnnnnnnnnnnnnnnnnnnnnnnnnnnnnnnnnnnnnnnnnnnnnnnnnnnnnnnnnnnnnnnnnnnnnnnnnnnnnnnnnnnnnnnnnnnnnnnnnnnnnnnnnnnnnnnnnnnnnnnnnnnnnnnnnnnnnnnnnnnnnnnnnnnnnnnnnnnnnnnnnnnnnnnnnnnnnnnnnnnnnnnnnnnnnnnnnnnnnnnnnnnnnnnnnnnnnnnnnnnnnnnnnnnnnnnnnnnnnnnnnnnnnnnnnnnnnnnnnnnnnnnnnnnnncaggcttttaccgtgtgacattcttgcacagaggccagggccagagctcttctggcaataggaacagtttgatcaggcaaagtcaggagataaatatgtgcagttaacagtggggcactcttgggaaggatacaggaaggctggggggatgatctcctcctgtaaagcttttctagacacgctgggagggagagccccagggtgattaatcgccataagggcttggagacgctttggcaggctactcacggtgcagtaggttttatccatccttcacattctacagaaacaagctgcggtgattcctgtctctctatcttgaccagtcttggcataagaggaccccagtgcggctcaagcttgcagagaggaccctgaggctgcctggacactaagctgctttcatttaacccttagtgaagagaacacttgttataaagaaggaagtttatttacaaaatttataacttgtaaattgtaataaagaagcagtcccactgggttggtctgaggtgagggcagcagatggtatcacttcacagtggcacaacgttcaggaaaagatggtcacatctcaaacaggagtagaggggtggtgggcgtgcatttgaccaggttttcttcttcctgtaacagacatttctaaagaacttgagggggttgcatgagcagcaccccagaacctagaatccactgttccactttccacaggatccacattctgtggaagtgaccctggggagcaaccttctctcacaatgtgaccatacccaagccatagcagtaaacacaaactcagtaaaatgccccatgcacctacattaatcctatttgtttacaaattccatgcattataacacatgtacatacatacattataacacatatataaaagtaaaaactttcaaggattagccaaaagcaaaatatgaaatctcttctgctttctactactctgtagaacatgggacacctcactttaaggatcagcaatgccacttattttatgagaactgttgttactttaaccagttctgtcttggtccattccaggccttggcaatggaacataagcagataaccagataagataacttataaatggaggtaaacttaactcatcgttaagttaaggttggaaaccaaagctcaaggcacccacctagtgcaagctcctcctacagtgtcagcataaaagccatcaggaggtagaagcaggaggaagggataagggaccacaactcatccatcttcctggaacacacttgttagggtttgaatctagaacggtccctcagagggtcacctttggaatatatagtccctaactcctgtctttatcctgaaggctgaggagactttatgagggcagggcctggcgtgtggaaatggtccaattccagactgctttttaactgcatcttcatgtgcacacactctgctacatcccatccatgccttccactccatgatggggtgaaacctcttagcagccacagtggaaccttcttctcttagtaggctattgtaacatagatatagaaaacaaccagtgcaacgctctatactaatccactcctgagaacaaagccaatccattcttcaggccgagccctcatggcccaaggtctcttaaaggccccacctagccatgcagttgtattgggaattaaatttctaactcaaaactctggctgacatgggtgacatatgaaaaccagagcaacttttttagaagttcttttgaaatatatggtatgatgtggagacagagtcaggggatcttggcctggtatggnnnnnnnnnnnnnnnnnnnnatcaaccagcacaatatcagcccccaccaaggcaacgccatactggagaaggtaagggccctgtcagcccaggcagcttcatcttccctgagcaatggcatcatttagaagcctctttacataggtatacgcctaaacaccagttgctttcacattgtcacactggggcacttagttgactatataaacccagctgtcaatatttttcataacatttgggcaaagattttaatataattttccagcaagccagggctgtatttgcgttgtattaaagataaaaatctttcatcatttttcctttcttgagatgtaccccagtgtgcatatgggtgcctttagtgttgctgtacctgctacctgttggttatttgattcaaatctccttaagccaaggaggaaacagaggaaggagagctttcccatgctctaggatgggttctggatgccaataaaaggcactgccttctggctgtttataaacacaataacctacagttcacccgagagatcttcaccatggtggcttggctaaggaatttaagttaaattttgcaaatgattcatattttaaaaactaacttcagacttggatgtagttcagtgatagaacacttgtctggggtgtgtgaagctctgggcccaattcccagtcacatacacacacacacacacacacacacacacacacacacacccctctttaagagatgagcatgtttttcccagttttcagaggttaaaaagaggtaggggatggatttggttttctatttctctttttcaatatgactgatttacagtcttttttcttcattgtcttctgctagtatatttctagattaattatgtgaaaggacttcttagggctcagcaaagtcaagttataatattaagccagatcgcacttagctaggagaatagctttgtgcacacagcaaggaagctaaataatacccttctgtaataaatggagcaacttccaggtcttatgtttcaaatgatctcagtcatgtgattctctttatccatggggataaatagaaaattatttatcaaaaataattttacatactgtgttaacaatacagtatattaattttaaaacacatttcagttttatttgcttacttattttgagccaaggtctccccctgcaccctaatgttccaagatttctctatgtagcctaggataccttgaactcacaatccaccctagcctcccgaggactagtaggctcactagcatatagcagcacacctgggcagttttacacttggcatttccgggatataaattacttctctcctgttcccacccaattttgtctgtatttctacacagcagtactctagacagcttgattctccaaggatgccagaattatttctgttgccatagcaattttgttctctaacaatgactgcctgtaaatacctgcccaggaattttggtagtgtgctctgatatagtaatttctttatcagcagccacaaccaagtgtttgctgttgaaaacttggagcaacagatgaaaatattttttccagtggtcagattaaggtggttttaaatattgcatagctcaaacatcttctacataaacttcttagtcatgaacccttgagtcagggtcagtatttggcatttctagagcctagggtttgtagtcggtgactctgtgcccagggcaaatattctcctctctgctggtggagaacaggacatctgccagagtccttactttaagagatgactttaaggggacgggagcttgctcttaaataattgggagtataacttactttatgtttgttgctcatgtgacaatatgagcagaccctattgggtatgtagaaatgtagagctgttggcttcgcttccatttgggttctctactgcatgcatatgtttatatcgatcggttactttgttagatgaaaagagacccccataaaaggatccattcatagaaggcttatacagaagttacatgggtcacatgctttgtcatttctcctaggtctacttaaattgctatagtccccagttttctttttaaaaaaatattctagaggcatatctattttattttctgagttttgctttcatatatgtatgtgcactacatgaatgcctagtgttgcagagatcagaagagggggggggtaatattctctggaactggagttactgatagttgtaagcttccatagaggagcaacagctgcccttaactgcagataaatccccttagatcattacagtttgttttttaaatgctacataaaaacagaaaattgcactatcagtggggtaccatgtgatgttttcatatacatgtacattgcataatacacttaaataatgctaaatattcccatcatctcaaacattttctatatcttcatgacagaaataaccacaaccctgtttctagctgattaaactgtgcagtaggtatgttactgctatctgtaactatcccatagaaggagccaaagcacaacagacattcttttaaaaaacctaactatgtggatagggatgcagatggggatatgtttgtgtatgtgagcataagtgcccttgaaagttaaaggtcacaggagctagatgcccctaaagctggagttacggctgtgagccacctgacatgggtgctaagaaccaaactcaggtcttccaaaagaccagtaatgctcttaaccactgagtcaccgcccccccaaaccccccaccccaagaaattcttaatcctgtcttacctgtggtgatcagtgttcattgtcagcttcacagaatttggaatcacctaggatatgagcctctaggccagtagttctcaacttgtgggttccaacctcattggcaaacttctatctcaaaaaatatttataccatgattctaacagcagcagaattgcaattctgaagtagcagcatgaaatgctgatcaaagtgattttaggactggtgggtgggggttgccataacatgaggaactgtattaaggggtcacatataacctgcatataaccactgctttatgcacaccctgagggatgatttcatccttgggtatgactctgaggggttgatgacattaattgaggagggaagatctattcttcctggtcttgggtcccagaccatacaaaaggagaaaaaggcaactgagcatccatgctgtctgtttcttgactgtggacacaatgtaaccagttgttcctgctgccatgacctccccactgtgatggactgtcactttgaactgtagccagaatacatcacctttaagctactctcattagcatattctatcatagtgacaggaagagaaactaagtagctctcactgatcaacctccccctgttgctttctatccctctactctccgaagtttttggtagggcctgttctatcctcacctctatgaggtcaactcttacttttaagtggagagactgagacatgtctgtaggattgttttattttaaatgagatttttataccgaaagcaccagctaatactgcttccactgttcccagtgctctcactgctattgacaaggcagggccacactgccaacatctctgccatgcttacttcctccaacaacagtgctacaccggtactgaaacatctggatgcttagtacgtgtcagggttagtaaaccatgaggctgttttattgatacattcaacatcccttgggagagatataatacccaaagttagcaagctttgcagtcacagcaatgatagagaccatgcctctattgcccagtgtatccttaaagcctgccatggtgctcatgctaaataaatacctagtgatcaagtaaagaaatgaataattgaataaatccaaatatttaccaatatgtacatatctgaagaaaaattgcaatgtttgaaagttatcatcctggatttgatagagttgtggtttcttggatactaaatgttttaaaactgtttttattggttattttatttatttatatttgaaatgttatcccaccttcgcagtttgcccttcacaaatcccctatcccatccccctctccctgcttctatgagggggctcccccacccacccacccacccattcctgcctcaccaccctaatattcccctacactggggcattgagccttcacaggaccaaggacttttttttccattgatgccagataaggcaatcctctgctacatatgtggctggagccatgggtctccccatgtgtattttttgattggtggtttagtccctgggagttttagaggatctggttggttgatattgtttttcttcctatggggttgcaaaccccttcagctccttcattccttcccctaactcctccattggggactccgtactcagtctgatggttggctgtgagcatcctcatctgtattggtcaggctctggcagaccttctcaggggacagctataccaggcttctgtcagcatgcacttcttggcatcagcaatagcgtctgggtttggtgtctgcatataggatgaatccccaggtagggcagtctctggttggcctttccttcagaaccccttgtgttgtacatatgaagatataaaaataattcgtacccacagatattatacaatgggccagactctggtgctggtgggaagaagctacaccaggactcagcccttgatcctgagtcctgaccacttataccacacactggccaggctctccaaagggctcataaagaaggggctgaggcccaaggaattttagcttctcaggcagcaggaggtgggcagttctgggaagagttcaggagaagtcccacagagtcgggcactgaagccatcacagagctcctctggatcgccttccttcttggcgtgtgctgagtgagtattcagccttggtttgtacacattaggacttgatagtcaggtttactctgagaagaattgagttgaagcctagatggaatcccaaggatttggggagtctggaaggaattcccatgtagtgccaccacctcttagaaggttttcaaaaagcaggtgcatttctggggtggttagaccttggtggtacttggaaacagagcacagctctgtcccttcatgaactccttccaataggaaaggataaagctggaaaattgagaactactggcatttagagcagcagcggtatactgtgtgcttcttctgaaggtagacttcaggaagtaccatatgctaagcccgttctcttcatgcacaacacaggtaaaatgtaggatagaaaatggttatctgccaagtgaaaccagtgctgcctatgtcatgagaaaggcgcactcaaagcagctggctgctgctgtcctgtcctgcactgtaatgtttgattctcaacaccatttgctaaagttcttctgtggatccaaagtatctttaattttaacctttggagccaatattattatgttatgttatgttatgttatgttatgttatgttatattatattatattatggcttcacaaatgtgaatttgttccagatatttaggactaaacaaacattcttcactttcatataaataggaagtttaaattttttcttttgaagaggaaatggaaatttgaaaagtaaaaacaaataaacaaccagtaaaaacaacaaacaaacaacctaaacatcaggggtggggatgtagtttggtgatgaagagcttgcccatcatgtgaaagccccagatctgacccaagcaaccagcaacaacccttgtctattgctaatgtttctttcatttattctctgtcttcaatggactgagtctccacaattacacttccgaaatagacataatttctaggagggtacttactagtaagccggaggaaaatagtaccagaataacaccgtaatgctaaagtgcaggtgccaaaggtttgtacagacccccaggcactcagaagtgctgctgtcctgtggtggcagggctgtcagggaggcttacaaagaagcatcctgatggactctagatgcaactgtgggagaggatggggtgagggtgggaagacatcccagtcagagggagggccacggtatacaagtgagaaaagcaataaatatcccaggaaacgaagcatcttctattttttggatgtatggaagaccagaaaactgagggcagattcgactatgggagccactgaacaccaggttggccttgttcacgctagtcagcagagaagggggatgttaacaaaggcaaaggcttagtttggctgcagcaggcaggaaataaagcaaaagcagagacagcacttgggtggaaacccaggggcaggtggagaggaaggacaggtgggggtcggaaggaggggaggagctacttggtattcccctgtgagttcataggaaaggggatgggaaaaatggagaaggagttggattataggggaaactcacagttttaacacatctcatcatgaatatgttcatgtgtgttctagcacgttatatatttacactgctgagctgcaagggcgggtagtgcattgaactgggatgtcgggtggatcgagtcccgtttcaaaagttgtcagcactgttaaatttatcacttctaccccccataaatcagatgactgcagtgaaccgacaaaggaagctcctccgtgaaaattctgctaagtctccacttcctgtttgaaaagtgacactgtcagttgcttaagggaagtggtttggggttctgtatactgctgagtaaaaaatgtgctattgtttcaaaaaaagggaatctgatcccctcccagtaggtcacagagctactatgtgactaagacttgtaagaatgttaaaaacaaacaagcaaacaagacttacagacacagctaactatatgcctttaattgggctcttccctttaagggaatcagttaattaagtctgcttttctcactgtccatatttcccttttgattcttacatgtttatctatctttgagccttccaggcttttaccgtgtgacattcttgcacagaggccagggccagagctcttctggcaataggaacagtttgatcaggcaaagtcaggagataaatatgtgcagttaacagtggggcactcttgggaaggatacaggaaggctggggggacgatctcctcctgtaaagcttttctagacacgctgggagggagagccccagggtgattaatcgccataagggcttggagacgctttggcaggctactcacggtgtagtaggttttatccatccttcacattctacagaaacaagctgcggtgattcctgtctctctatcttgaccagtcttggcataagaggaccccagtgcagctcaagcttgcagagaggaccctgaggctgcctggacactaaggggctttcatttaacccttagttaagagaacacttgttataaagaaggaagtttacttacaaaatttataacttgtaaattgtaataaagaagcagtcccactgggttggtctgaggtgagggcagcagatggtatcacttcacagtggcacaacgttcaggaaaagatggtcacatctcaaacaggagcagaggggtggtgggcattcatttgaccaggctttcctcttcccgtaacagacatttctaaagaacttgagggggttgcatgagcagcaccccagaacctagaatccactgttccactttccacaggatccacattctgtggaagtgaccctggggagcaaccttctctcacaatgtgaccatacccaagccatagcagtaaacacaaactcagtaaaatgccccatgcacctacttcaatcctatttgtttacaaattccatgcaaacaatgccatacattataacacatatataaaagtaaaaaatttcaaggattagccgaaagcaaaatatgaaatctcttctcctttctactactctgtagagcatgggacacctcactttaaggatcagcaatgccacttattttatgagaactgttgttaccttaaccagttctgtcttggtccattccaggccttggcaatggaacataagcagataaccatatacgataacataaatggaggtaaacttaactcatcgttctgaaggttggaaaccaaagctcaaggcacccacctagtgtgagctcctcctacagtgtcagcatgaaagccatcaagaggtagaagcaggaggaagggataagggaccacaactcatccatcttcctggaacacacttgttagggtttgaatctagaacggtccctcagagggtcacctttggagtatatagtccctaactcctgtctatcctgaaggctgaggagactttatgaagccagggcctggcgtgtggaaatggtccaatcctnnnnnnnnnnnnnnnnnnnnaaacaaccagtgcaacgctctatagtaatccactcctgagaacaaagccaatccattcttcaggccaagccctcatggtccaaggtctcttaaaggccccacctagccatgcagttgtattgggaattaaatttctaactcaaaactctggctgacatgggtgacatatgaaaaccagagcaactttttcagaagttcttttgaaatctatggtatggtgtggagacagagtcgggggatcttggcctggtatgggatgttcttaggagcagataaacctttggggaatacaaaatcaagttcttttgtgtcacaagcacacagtctcaggcccactgttcattctccccttatatttagtagtcttataagttttaatctgtgatgctttggttaatgtccctcatctccaaacttgcaaagcctccaggaagtcagggcctaggtctgctttctgtcacaccatgctcccagtgtctgtcacacggtggatactctgtagatcttgctttctgtcactccatgctcccagtggctgtcacatggtggatactctgtagatcttgctttctgtcacaccatgctcccagtgtctgtcacacggtggatactctgtagatcttgctttctgtcacaccatgctcccagtgtctgtcacatggtggatactctgtagatcttggcccatgaatagatggtgcaggaaggtatctgtcagtttctgtctgagtggttatctgtcgctgccacagtgtgctgtcttaactgctgactatttttgtaatgaaagtgtgacataggtttatcctcggggtaaaacacacaagctccgaaaggggttttgctactcaaaggattggacaagtctctcctctgaacattctgacaggtaaatgggaggcagagaggttgatgagaaggtggagaatagggtagaccctgaaggagcaggggaggaaggaggctacccattacaggctgagcccccgtagatgaagttgaaaatggatctttcacccaccaactctgcttttggtttgctccttcaaaagcacaaaactgacagagctgcactgtcaccatggccggtccccagggagcacttacataaagctctgtcccatggcactcaccactgtcctccacaggccacctgcgagctcctcagcagctggggtagcagacacagagccggccgaactgaaggacgctggtcaggcagctggctcgtcttaagctgggacagaagggacactctactgctccttgcatataattttcttttctgggaaaattattatgattctgattattattactactattggtattgggatagcacccagaggctcattcatgctaagcaagtgttctgcccctgagctccatcctggtgcctctcaggtcatttcttatcacaaggcccactaggccctgatggatgcagttctgcctcaggctgagcttgataccacaagtcaggttaatcttgccttcctttctgcctgttgttattgagctcccagagaagcagaggcccaagcagaggcaacaattggtgatcagggcatcagtgcctcgggattgcacttctgatggctgagagtagaagggtgtgagaggggaaacaggctgaggatttggtttgtctgctttggaagctgtgattctgcagtgagcagggactcagagccagcctcatctcaaccatgcagccccaccccaaaggaccaaactgttgtggaaaatacttaatcccagtcaggagctgctaccacctttgattatccaatttaaccccaaactattacttagtatgtttcatctgagctgctctcaactccaactggccagcccacgtggtcatgctttcttgactcctaacccatccttccttctcaccttcctctctcccacctcattgtctcctccaatcaaacccaagtccaggaacccaagactctgactatctctattctgcccagctattggctgcaggtatctttattcaccaatcagagatgacttgggtacatagcatcacttgggtctaactgtggactctctctcatctctggggcaaccaggcctcggggagcccacagttagtattacaatacatagcaacagaccaaacctcaacaccaaaccttattctgtgtctggataggagatgttctggatagggtgtgaccctgggagaagtggctctgtcgccttggcagccattgaatagacttatcacatccctggcagcaggaacagcaaggtcttcaccagagagatctctaatctagatgacacttcacagtgtcagattttatgtccctaaaccacacctgtcagttactgcagagtgggactccggggtctcagtgggaaagcatccgtctcccagctccggtgagctgattggtcagtacatttttcggatctggtgagccaactgttaaatttgacagcatgaaatgggccacaagagaaatatttatgccatatatattagaaaatgttttaaaccaagcttataagattgtattccctcaggagagacgatttgccaacagagaagatttgcttaagcaaatgtatttttaggataattggaagtatccaaacatctcagtttttatctccctgaaatgcccgtctctcacaatggctgccgtagagaccctccagtaggtagagcttcacatcctctaatatgacaagggaaagtgcattatgccttccagtgagacccaggactgaacctcattttgcccctcccaggagcaggactttaagcttcatttctccgagcaaaattttccttatctgtaatgtaggggttagtaatagctatggcggaggtttgcttttcaaagcaaatacgaaaatacatgtctcgtatcagacatattgtaaatattagtctgctttcattccctaacactgtgacatttgcccttgccggcacttgcttgccctagactgagaggtctgaggtgggccgatggaggaagttaggtgctccttgtttcctgcacgatgttgaaggcaaacacaccatgtaaatatgtattgcctcattttcatcatactttctgctgatgtcagcgtgcactccttcccctcccgccccctccagcctgcctgctctgaccctgccttttgctgactcagtccctcccagttcagcttccccaggccagttgctccctggtgagatcttatgatagggaagctgtatacacaattcatagctgagcctgctaaggataaggcaaactcaaaacagttgccaggcttacagagaaactgtggggctgagattcccctgtgtctggagtaatagaagcacagtgtcattggcctgaggcatcaaggttggccaagagtaagatcaactccagactcgagaaaacgcagtcactcttgttgggagactgtgttgggtgcataggtcctgaggaatgtcactttggagagatggaagagtaggtccttctcttgtccagcggctctttactctattgtccatcctgtggcagtcttagagttgatttgtcctgtcaccccaaaaccacagactgtgaggcatggccggccaccaccccatgaagagatcagaagcagtctgaccagcataaagttggttaaaaggtgagaagtcttggcatctggggtcaggtggaagcagctgctgcatttgcctcacagggtggaacctgagagtgaagggagaggctacattcgattaggggagggcaagaggtattatgtgtagccaggccatccaggtctccttagtaaagagtcatataggtgtgtgagaccaagaaacttaagcaaaaaacgggagcctgtccaggcaacaggtttggtactacaatgatgatgtggcacacctgctgcatggcaggagatgagagacacatgtagcagctgactgggtgacctcagtctacctcggtgtgcagaagagacaccgtgactgagaggccattccctgagctctatagcttggttcaaatgttactttacatctatatgactttaggaattctaggtaacctccttaagtccaatcttcccatttaaaaaaatccagatatttctcattacagtgcagggccatcatgttgcaaataagaaaacacgtgcaaaggacttaaaataacatttgggcctttgtaggagctctctgtgttgacctatttattcttctaccaaagtcacttttgctgtcaataaactagttaagagctgtagctggagtctagaccatgttgcttaccaggcatgtgactttgggtaaatcccataccagggcttttgttcacatctatacaaacaaggcatttcacaatatttaactgcaaaggttgttgggaagtatcttatctctatatttacaatttgtcagtgcatcataataattaagaatatgacaaattatatttccatgatgttatttagcttttagacttcctttacatgtagcaactcagttttttcccccctgtggtatgttgaatagatttattgcctataaagggaaacatttaattgtggaaggcttacagtttcagaggtttagtctattatcatcatcataacaggaagcatggtagcatgcaggcagatgtggtgctggagccgagagtcctatatcttgatccaaaggcagctgaatgagactagattgcacactgggcagagctcagacatttatgaaacctcaaagccccatccccacagtgacataccatgacagtggcaatttactggaggtggagcaacatactgcaggaggaaaaactgagtttctacatgtaaaggaagttcgaaaataaaaaaataacatcttagccaggtgtggtggcgcacgcctttaatcctagcactcgggaggcagaagcaggtggatttctgagttcgaggccagcttgatctacaaagtgagttccaggacagccagggctatacagagaaaccctgtctcaaaaacaacaacaacaaaaatcttggaaacataatttgtcatatttgctaattattatgatgaactgatatctatctatctatctatctatctaacctcttctttgctgttctagtttgattgtaatgtgtataatttttattatttatttgtgatacaaattttattacatttttgctaaaacttcctgataatatcataaaatgtccattttggatagactgaaaaattttgaaaggaaaaaatccaaataattctacaattataaaccaccatggaaatgtctagatatctggactatattactatatgtatatttatagggagtttaggcagactctaaaactttgcaccttcctatttttacttaatcttacaccttttctcagatatttaaaaactccagtgtagtggaagagacttgtgtttgatatttgtgttccttttaaactgtcactcatatgagggacattttagtgaagagcatctctttaaaactttccctacattctgaagcactaagtgggccatctttctgatagcaggcataaaatatttattgaaataaatgcctcctgtatctttggaaaagcattaggcagtagccacaaagccaacagtaatcattgggggaaaggatgaactacttaaaaccaggtccttccctgggacaattgcagaaagaaaatgagtgagtacctatttcatatcaataacatacatatttcatatgaatcaaagtactaattgtacaataaaaatacaaaaacggtgaaattgaggagaaaatatagttgcaatatggaaaaaataaaacaatcactataactcaaataatataaaaaatgcacaaatttcacattatagttatgagactgtcaacaatgttaaaaacacaaaccattgaaggggataatagaactagaagaatgtatttgaaatataagatacaaaacagaattgtaacctgattctgggaattaacaagtcaataaggaaaactaaactggatgaccaggaatgtcccgtaaaagatatgatcaaaggccagcaagcaaaataaatatacttatttcattagtaataggaaacaaagctaatgatgcgatgtttagtatcaatcagattgccaacaaattaggaaattatcaatacaaagtgttggctagaatataagaaaataatctaagaatcccctgtgtaagtataagtgggtgtggccatagcagcatctgtagagatagtctgtgtcatttactgtttagcagtccacttctagaaaggcttttaagactgcacaaaggcttaagcacaaggatttctacctcagtattttgtgttggtggaagatagaaatcaacccaactatcagagaacaaaattcccagatcctgatccagtcatccaataggatgttccaagacagtttcaacactagccaagatccacatgctcattaatatggataattgatgtcaaaattgatttcaaaagtagacactgggattcaaatggatctttactgaattcctacaatgtagaaaatgcacgctactgataattgtttactaaaacatatttcaaaatgaaagaatgtgtccgagaaggggaggacactgactgtcctgtctgacttgcttcctggttgagatgaagatggacttcaaccaaacacacatcacttacattttccagatgtaagctgggtgggttacatgcctgccagcacttagtagtttgacataggtggattgctacaaatttgagatcaacctggcttacatagcaaataccaaattccccaggactgcatagccctatctaaaagatcaccatccccataaaaagaatcctgaagaagaattaagaccagaaataaaataaagaatggttgtagcttaggattttccagccctgtgctgcccccaagtgatcaggacttgacatgtatgccttggctgccccaggttttacactcaataaaagcctaagacagccttacagagtgtagtacatgtgaaggcaagctgctcaggcaggaagggaagctgatctagggtaggaagggaagctgaaccctggcaggagatgagcaggcacagggtaaactcccactcccattgcctcccataaaatgatgtagctcctctaaaaatgcctgcctctgaccgttctgtatgtaaagcacctccttactctgacaagtgaccaatacatttaagatttaagggctctgcataaaaatctgaagaaacgtaagagtgttttctgcatgaataatcatcccttagtgtggccaagccacagtcgagatgtcccgattgaaaggcagtcgttatcactgacgtgctccaatgcctggaccacttaattttctcctgaagctctgtcaatctcttaactttgcttcactcccctgttcagcctccatttttctccctctttcctgcttgccatctttgtccctttattttcctccccttcacccctcctttatatctagtccctacttgccaggtccctaaagacacccactcccaggagagaggggcctggagcccactgtgcctgctttctcagcacatacttcttctataacccctgtccccacttctccactgaaggcaaacgaaaaggatcagcagtgcctccaaaccatggctgctgctccaggaaccagcatctgggtagggtggggcaggttggtcccttcccagcccatctcgggagatctcgagagatcagtcataagcaaaacacagctcattttggaggtttgcattcttgtccctgtctgaagtgattgaatttcacatagacggtgactaactgggaaaaatgtgtcccagatgtggtgctcagaaattattctgagaacaaggttatgtacacaaagctccagcctccctgtgcatctgtcactgatgctggcacctgcatccagcagcagcaacgttctgtaattctttattgggctcttctgcagctgagctctttgtctgcctctcagtcatctctgtctctgtgtttctgtgtctgtctgtctctccctctagctatctttccttcggcctgtatctctgtctctgtgtttcagtcagtctttttctctgactgtccctctatgtttccttctgtctctctcttctctgtctctgtcagtctctgactgtctctgttcatctctccctgtctgtctgtctctctctcattctgtctctgtatttctgtcagtctctgtctctctctctcttaccgtctcctgtcccctactaacccctatcccagccttgtcctctacctgtttcctccctctgtctgtcagtctctgtctctctctcctctcactgtctccccccacccccatagcccccgccttaagccccatcccagccttgtcctctacccgtttttcccatgacacttactccccagagaccctgctgcacggatgattctggagtgtttctccttggctctgacctttccatcaagtacacaactccaagtgttgcagacagccgggctcagtgagccagggcccaggaggcctgaggggtcctgaccttcccacccccaccgagtcagccgcttcacagccacactggctgtcactcaaccaggtgtaaaaacataggtctcttctttttttctttcatttttacctctctatttcaaccttaagccccactaatcctctctgccatctgcccagtttattttaagcaaatccttgttgagtgaagtgctgtctgtctcattctgtcagagccacctcctttagcaccaaccgtcccttgagctggctttagtaactgcaacccgacaatgttttccttttacacagctcaacttcgatgtctctgcaaactaatctcaagggacttacctttttaaaaggggggggggtgatggtggggagaataaaacactgtattatttgagtaagtgagacagccatatgactcggcatttaaaagattcaaagtatatgttgggctgttgatgcttttattcagtgacttttctgttggcctcgttttgcagctatagagaagcagatgggagttcagcagtgtggagatggaaagcaaggtgggtagggaggttacaatgtagggactaggggagaaagggaaaagagaggttagcaaagatgtaggagccacatggaaggagtaggtatcacttctacctggattcagctggaattcagacctagatcccacctgaaaacagttgacatgtctggacaaatagggatggcatgtgtgagtccttcgcagtttcagtctcatatgccaggcgtgcagctctgcccttcatcctttggagctgatgaatggttaaaagcaactttatccatttataggctgtttctttagctttcccaatcgtcacttcaagtgtcagctgtgcaatatgtcaccatgtactaaccaggccatggtctatcccaccatcttctattgctctgtgggagccacatgcatacaagcctacttggaaaaaacaaattctcagattagatctgccaaatcaagtgtgtatagacaatatttgcacagtcattatcaaattataccacttggagatcatccaaatttctattcccagtagccatttgatgtttggtcctgtttataaaagtatcttgactttcttcatcttcgagtgaagagagttcaaaatcattaccagtggatttgagagtgttttacgtatgggtctccaacccctggtccacaagcattttctttcatttagattcggatccatagcagtcagaaatctccaaattcattactcctctgaagccactagctggtagacacagagtgcaaatggggaaatgaaatgagactctgtctgggaagctggaaacgaagaccaaactcactcacttgattagtgccgtggcatagtctcattaagtattctcagttttcccttcctcttacttctggggttcacaccaaagctaagcatgctagaagaaagataagcatatccatgaaccatcacagttgtgtcctgtggctgtgtgcacaaggtcatccgagtctcctttaaaatcgaaaggtattgaaaatgcatgcgggtcctgagttctgctttttaacatatcttcactcattttggtatttaaaattattttaagttacttgctaccagatgttattgaattcatgaaagtgtcttgcttcccttgtggcttggaacgccctggcccatggggcctatatctggtgactgagcaggtctctgcatggaggggtccagggattggttctcatttatcctgcgaattccaactcgtctgatgctttgatatcaagagttcccataggccagccatctcagagtggtatctctgtcctggagaactccaaattacagcttgcctcagagccttgagccccacttgtgctgttcgttgcctttctctgtttatagcctttatataccaatctgttacatgatgtatcttcggattctttgtaccaagaggcctgctaagttatcaatgactaaaacattgaagatgactgaacctgccattttgctggctgtttttactcgtccaatggaatcaactattccccaaattaacaaaaacctagttcttagttccatatcttcctttattatatgaacttagttcccttgggaattatgcatttagttggcccatatctacacattcaattcccagtgatatccctgtcatgttgactgacactgggcatgccattaatttcctctcctgtctctggaaaatagggataattgcatttgccagctaccactttggaatgttgtcagatgtgatgaaatactgtttttaaaagatgtctttggaaggtctaggccatatctatcacagtctttcaccagtgtggttactttagtgcttatttacctagtaggtcagtggaacattggcatgtcttgtccgacaagcatggagactcgttgcattctcaggcccaagcacagttttgcatctgtaaccttctgaagccttggggactaagctcagaatattctttctgttcttggaaattttctagttgtctttggaaacatatgtgtgggtcattttagtcaaatactgtttcctatgcaaaatagcattccaaatatattgcaccattgtgaacagactaatagtctgctggccccatgtagtctttaagatttaatgtaggttgcttaaaaaaatctgttctcttaaagcataggtaatgcttgcgtctcagagtcctaggcctgttgttttaaatcaggctcgtgttgaacagtgaaatagaatgtttgcaaactaaataatgagactgtggagtctcgctgactgtgcaaatattaatatgctacccaatttccactagccaccagtgttagaggtaagaatccagtcatccagttcaaaagcccagcatgccacgtggctagtggccacatggctagtggccatgttccagtttcacggtcatgttctgatgggcagggtctgaaggtccaatctgtaatttgtgtcttgaaagccatgcaaatccttgactgtggcattttgcctctctgctcttctccttcatccattgcttaggacccagtattttaattaaaaaaaaaaaaaaaagatggatagttcactaccagggccatgaccagagaacaagtctgagggaaatggcatgtggaatttccaatggaggctgccacagcagcaaatccagccatttctgagaaatcgtctggattggagtcactcccagaactctgatttatctgcaagtaagcctagagctaggctgaaaggaacacaaatctgtttgtatacacaaataaatcctcccatgctgcgggccactctctgcctgccagcctcatctcactgctccagaaactataatacggtggtgaggtagttaacccagatgcagtgagtggaatattctgattattgaaaagttctgccttggcggcagttagcccgattgctgcaggaaagcagcagaggctagggttttcctgtgaggaggtcttgccactgagagttccctcttccagatggtcagggctgtatgctcatccctccagcttgagcaatgctcctctctgcttggaacactcgcagctgtcctgcagatctagagcaatgtcagtgtagtggggccatctcaggaagcgttgacctagagggaatgttaaaatctctacccacactttaaacaggtcaggagatcctgaaaatggaagagttttggttttggttgttgatgtctgtttgtttgtgttttagtatagaaatagtcttccccaaggaagaacatacccgattatttgatatgaaataatcatcccagaacacatgtgtgcaagatatacagactcagcaggttatatgtaggaatgtatatatatatatatatatatatatatatatatatatgcaataacaatgaaaaaagagaccatggatttgaaagcaagtgggaaagcagtatttgggagggcttggggggagaaaaaggaagaaatgttgtaattattataatcttgaaaataaaaaaaaatacccttgtgctgtgggaaaacaacttttgtttggaaaatgccataaggaaacctaatgctttgtatgttaacaaaataaatgaatgcattttaaaagcatattttgagtaagattttattacatttatttggattttttactgtatataagtgtataaagatgtcacagcacacaagtagagaccaagggccaactgtggaagtcagttctcttctgatacaatgtgcgtcccaaatattgaacacaggctttgccccaaacatctttaatcactgtgccacatcgttttatgtagactcagcataagctaaagtcatctgagaggacaaaacctcaattaagaaaatgcctccataatcaggctgctggagcattttcttaattaatgattgacgtgggagggcacagcccattgtgggtagtgccatccctggcctggtggtcctagattctataagaaagcaggttgagccagtctgggggagcaagccaataagcagcacacttctatggcccttgcatcagttcctccctccaagttcctgccctgcttgtgtttctgttctgttttccttcagtgatgaacaatgatgtggaagcataagccaaataaatttctccttccccaagttgcttttggtcatggtgttttatcacagccaccgaaaccctaagaaactcactgagtcctcttgcaggcccattacttaaaaatccttagtcctagatctttattttattaacagtgaacatctgagaactgctaactaggaaccaggaaatgttgaagggctttacggatatcatcacttagtctttctaacgaccttatctgtatacaaagtatcaagtatcgttgtgtttattgtacaatgaagacatcaaggcagtagaagagtaaacagccatagactaagaaaatgggatttggacccagccagcatgtcttttagacccacactctttttcttttctttcttcctttcttcccttcttcctttcttcctttcttcctttcttcctttcttcctttcttcctttccttccttccttccttccttccttccttccttccttcctttctttctttctttctttctttctttttctttctttcttttttttatcttttaaatgattttattgatctgattgaatctttatacatgttaccttgatggagaagcctcactctcttcctcagggcttggcggtcagctgttgtagatcatgaatttccctcagtgagcctctgctcctctaccgtttttccattaatttatgtattcaccttacatcctgattgcagaccccctccttccaggctccccttcactcattcccttccccactgctctctcttcttcatttctgagaagggtgaggtcccccctgagtattcaaccaccctggcatctcaagtcactgtagttttgggcacagcctcttccactgaggccagctaagttagcccagttagggggtcaggatccacagacaggcaacagagtcagggtaagccccattccagttgttgggagatctgcatgaagactaagctgtatgtctgctggatatatagtggaggaactaagtccagtccatgtatgctctccttggttggttatacagacccacactcttaaaactttcctagatactctatgtaatgaggatcctagatcataagggatttgggggttagactcaagaatagagtctaaagcacaaaccttgctagaattaggctaacttttttgagagtagtgggtacacatttgttgaacattaccaattttatgttctgtggagattgctgccttcagagggacattttttgagcaaggcagtacacaaaacaaaataatgagttcaactctgttcatatnnnnnnnnnnnnnnnnnnnnnnnnnnnnnnnnnnnnnnnnnnnnnnnnnnnnnnnnnnnnnnnnnnnnnnnnnnnnnnnnnnnnnnnnnnnnnnnnnnnnnnnnnntctctctctctcattctctctctctctctctctctctctctctctctctctctctctctctctctcagtctctctctctgtgtgtgtgtttagagaagcaaacatgagcctaaggcttcctttgctcctgaagtgcaaagccctagaagaagctcttcctttcctttcttcctcactgcctgtttgtcagctgtccatactgtctcctagcaacaccagaagatccccttttttccccagcaccaagcctggacactgcagttgtcacccactgtttccctgcaagcaacagttctcaacctgtggctagaactcttcttggggtcaaatgaccttttcacagggatcttatatctgatattcacattacaattgataacagttatcgaaattacggttataaagtagcaatggattattttgtggttgagggtcacctcagcatgaggaactgtgttaaaggatcacagctttaggaaggttgagcaccactgtcttaaagcattaagtcagatccacctcatctgcgctccaggttttcccttggactttgtcgactcaggagcccccacggggcctggtgcacatcatagtctggatcattttcttcacaaaactcactgtcccttggaaagcttgttggtttgattcacagggaattggccagttagttttgtctaccttccaaccatcagagagacactagatgaatggttatcaaccttcctgaagggttgtgactcacaggctgagaaccactgctctaaagtctatatcttagccacactgtctagtacaggagtacacaaagagagcctttaagacacatgcagacaaatgagtcttcctattagacaggagccactcattcaacaacagtcacactgaggagaactttccgaagttccgcagtcagtcaacagaaccttttggcagtgtctcctcagatgatattgatcagagtaaatctaactaatttatgatatcggcaggtaaggttttttagcatgcagtgtgtggaggaatgttagaaacaaaaaggccttgaagatagaaacctacatctagaattccagctgcctgacctagataaggtaagacatctcagaatagctcagcctccatgttctcatttctgaaatgggtttgaaatttcgtctctagaacctagtacatctttcagaatgagtgatgtagtcatgagtcacagcaatgcaagattggcatctcagttttcctgtaggtgctcaatgaaatgttacccagagtacaccaccatgtctctggcaatgaatagcaaaggccaaggagacatctcctccattctatcacaacaataacagccccaattagaaatgatgtaccatagggctttggtgaacgttgtgggcatagagaggggaccaggctcagttagtatcttctactgcatccaccttctctcctgaagtattaactagctgagtagagttgaaattgggaatgtagaagggaaaatagaaggtctgacattggcctcactgtcccatcgtgaaagctgagtcctagagaggctcttctgaatgatccttcacctgtgatgaggccaagcatagttcactccattttaacaggtttgattcccagaagtaaatttctcttcttttcagttgagtaaaatatatactgagccacagtctatacacagggagggacagaggtgaggcagactgatgaggcatctgtgtaaccctggaaaagatcctagtttaatggggaaagcagagcaagccaatcaccactcagagtatgccagaaaccatgctaccaggagaggccaaaggctgtgaacacacagagaagaggctttctggatggagaggtcagatagacccacagcagagccacttctgagatccacttcagagaggagagaggggaatggtacatggatcttagggatgaaatgagtagtagtggtgtgtgtatgtgtttgtgtgtgtgtgtttgtgagtgtttgtgtttgtgtttgtgagtgtttgtgtatgtgtgtgtgtatgtgtgttagagagagagggagagagagagagacagagacagagacagagacacggagagagagacatgcacaaagtggataggattaggattactgtaggatgattttagaaaccaagtgagttctttgcaaattgtcaagtgtacagaagatactggattcaagaattctcacatttcatttcatcatacttcacataagttcatactcttttttttttggctaagtttattttaacacaagtataaagtgatggataaatgctagaaaaatgcattttcattttcaactctgtttttccacagttttggaagtatattttaaactttggagtggaataaaatagagaaaattaagaccaagtctctacatgtattttatttgggaaactctttaaatctttgtcaacagctaaaaacgtgagcattacagctttccaactaagaaaaaagtgaaacataattaaaaacacctgagccatgaaaaaggagctatgcatggtggtacatacctataatcccagtgctggggaagctgaggctggaggattgtgaattcaaggtcattctggactagacagttaaaaactagaataataaaataaaattaggaatgactaatcaagtaaaaagaaaaagttttctttcccagagaaacttcatttagagttttgttttctgttattgttagcgtaaatgttcttctatgtgataccatatttacaaatttctaagtttatattttctttttgcttttgctgttgttgttttctttgtttgagacagggtttcactgtgtagccctggttgtactgtaagtcactctggagcccaagatggcctctaactcagagatctacttgcctctgcctcctgagtgctggagtcaaaggtgtctaccaccactggctggatttattttttcctctttcttattttctctttgctaatttgatagtatggctatatagccttcatacaatcttcacaaaagtgctattcctgttgggtaaacacatctgacttgacttttgtcttctttggcagatgacgtttgacccagaaatcttcttcaacgttttgctgcctcccatcatatttcatgcaggatacagtctgaagaaggtaaagctaaggaacgttcccttctcttatcattcagtagaaaacttggccaacactaacaaaaagtagttatattttatgggatttcctacatggtaagaacagcattgaatagattacgcaataaatgttcaaccctgacatccttggaattcttttaaatctattagacctgtacccagggcttagtggcacacagctaatgaactctgtggcttgtctcaagtgagatgcactgtaaatctaagatgtacactagatattaaagtctaattattttaaaaacagtatgcaaatcatctcaataatgtcttatactgacctcataaacgatagaatcgataatatactatgtcaagcaaagcattaacaaactccacatcaccttttaaagtttatttattgtggctctctaggaggtctgtaaatgtccaatgtgatgtgtgttacctgacccttgaacagtgttgtcctagataactgtgtgccaagagctaccattactagttcacagaggcagactgtagtccttcacaccaagagccacagttttcagccactgagctagttccagcagtgctcaggcacaggctgactgtccgtgtcacaggtcagtaactcacttaggtaggtagtactgtgccacagagtgaggcagagggaacacgctactcttctgctgcccaggtactaccttggagactgccaatgtgcacctctgattccctttggctcatagaagccaggcagcttcctcattacagacctggaggctttagttgttgctgttttggtttttttgttgttgttttgcttttttttttggttttgatttgttttgtggactccaggctccctcttgctgtcagtggtggctgctcagctctccctaaaactctggaagggagtaattcctaacgaagaagcatttgaaaggatttagaaggttcgattcctgcaggtcatcctttctcatagcctacctaagtactactcatcatttcatgtttcatgcataaagaatttatttatttcagggttttaatctttgattgcatcgcattcagaagatgcatgaagaagaaaactcaggatactccatgaaagccagatgccagttaaatttcttagaataacatttgaaaagttaaaggtgttatgtttgcaaaacccatcatgacaactgtgtcttgattagtcccagagccccagatacttgttgaccatccggttccctctagctgcatctgtgggttatctctcccttgcctgtcatcttctagagtttttcattgctttttcttcctcctcttttctttggggagaaatcacttactaagcttcatgcccatgtacaccaaatcccaggcatgacccccaaagaagatttgctaaataatgagagaaaggaaggctctgagcagcttggcttattcagatgtactctatgaaatattttctgtttctctccagagacacttttttcaaaacttgggatccattttaacgtatgccttcttgggaacagccatctcctgtgtggtcatagggtaagtgacatttggaacctgggctataggtggctggagcgcagcaatcagagatgggatctcagacttctcgatgcttactctttggaccaagtatgtgtctgtgagtgtgcgttattcctagtacgtcatgtttaggtttgttttgcttgatttgtggtatagccattttgttgtattaccaacatctaacatgttgggcaagccttctgccattgagcaccatccccagaccaggtacatcacatttttatacatttttccagccctggttcaacatttctgtatcctacgacaaacataaggtacagacgacctgctccagcctttaggggaatggtgagtagaacacagcatcagacgaaggtcaaagactgatgatccctggcctcatactattattatttgtgctttaataagcgctggtttcttcctctgtaactctcttactactttgtactaataagcaatggtttcctttctcctcaaagacccaaggccaggggagaggcttagagctcattaactcttcatgaaccagatagaaaagaaaggtcatgccaataactcaactcatttgtgagccaaagagaaaagatcttttacacagccaatatgtatagactcactcacacaaatttacacacacacacatacacacacacacacacacacacacacacacacacacacacattggtctggcctgaccacctgtctcatcaactccacaagtgttcatgcatactcacacacacacaccacacacacacacacacacacacatatatacaaacacatatacacatatgcacatacatataaatatagatacatatacatatacacatttaaatttggtggtttgggcagaaccccctaagccacatatacatacatttgatggatggatggggtagagccccagatgccacactttattccttctctctggccttcttgtaccttcttgggtaaaagttctttagaaaattacctcatagataaaatgttacacaaaggggagttacagaaggatgtcgatagtaagttcaaagcagtgtttcattccataagctcattataagctcaaagcaaccgtttcacgtggccttgctttatcacagtgcacacctgtgacctcattcttggacctgacttagaatgaatgtttttccttgatcacaggtctgtcctaagcccatttatctttttagtgtagttgtgaaagctcatggtactccttattatgcagtcatactgttctatgaggagtgggcacatcttatttttgattctaactttattatatctttctggcaaaaaattaaaatcattccataaaactttttttcctaaaattatttgactcaaatcaggagttgtataaagtcattgtcaggagttatggagctatctatcaacttctctatacaacattactacatgatggtacatctttgttgatctgaagaaaatcttcccaatagggtgggctgatgcccaggaatcattagattactgacaggaaaaggcatatctgctgcaagaaacaatcctgagatgaagtttcttaagaccttgcctctcagaactcacccatcaaaggccatgcaataaaaagtgggctacctcccaaaaaagtcacccactagccttagcctctcctacatggctcccaacaatagggcttcatcaaagcaaactgccactgggtggctagatttttctctgtgagtttgagtttctgatttagggtgtgtggactacttggcctgagttatgagaagcatatcacattcttatttagcctgcataatgtatatggcctcaatgtatttttccatcatctttgtagagctctaactatatttgacaaaaatataatatagctatatggtgaggggtttcttctaaaagaaagtttgtaagtggagagtttgaaacagagagtttcaaatatcagtgggattgtatatggcttgggtggctttgtagctgatgaattgtagaatgtgaggcgtttttccccctcaatatatttattggttatgctgctggaccaaagatgaactgcagagactctggcatgaagctcaccataaagcaaaatgaggtccaatatggcaaaaattgttctatctactacggtgtgacagtcacactgcagaaagatgcagctgctgtggctatcgtgacgcatctgtcttaaactgtgcgtcacagccggctctacttgtgataattctttaactgcctcagctatcgtcactcccaccaaggaagtggcactaagcatgcacagcagtcatgcctccagcccatctcttctgtgcagttcagtgtgtgccagtcaaagctgaggtgatatctgggctctatacaaacctgaaggcaagtagatttctacatcaaacacttgtttagttgaggttaaaaataactgagctagacaagtcccttccgctcgactcgagactcgagccccgggctaccttgccagcagagtcttgcccaacacccgcaagggcccacacgggactccccacgggaccctaagacctctggtgagtggaccacagtgcctgccccaatccaatcgcgcggaacttgagactgcggtacatagggaagcaggctacccgggcctgatctggggcacaagtcccttccgctcgactcgagactcgagccccgggctaccttgccagcagagtcttgcccaacacccgcaagggtccacacgggactccccacgggaccctaagacctctggtgagtggaacacagcgcctaccccaatccaatcgcatggaacttgagactgcggtacatagggaagcaggatacccgggcttgatctggggcacaaacccccttccactccactcgagccccggctaccttgccagctgagtcgcctgacacccgcaagggcccacacaggattccacacgtgatcctaagacctctagtgagtggaacacaacatctgccaggagtctggttcgaacaccagatatctgggtacctgccttgcaagaagagagcttgcctgcagagaatactctgcccactgaaactaaggagagtgctaccctccaggtctgctcatagaggctaacagagtcacctgaagaacaagctcttaacagtgacaactaaaacagnnnnnnnnnnnnnnnnnnnnatgtggtgtgtgcagccataggaactactttcaattctgggaggcagcaagaagacagtataatgcctgtattgtttgtggagcgtctcttggactcccttgaccaataactcaaaagaaagtttctcatgtcacacacacacacacacacacacacacacacacacacacaccacattgtcctaagtactcattagtatccctatgtttgttttgtatgtgtgtgtgtgtgtgtgtgtgtgtgtgtgtgtgtgtactctcttgtaccatggtactcatgtggactttagaggacaatatatgattagccaattctttttaccacaaatcttctaccacacgaccttcaggaattgaactgaagtagttagcttgatggcaaacatttttattcactgagtcatcttgctggcccactggagcaggctagatactttacttttttaatattcttggacccctgataattcacccaggaaaatctgtatttataaatatggtattgtttacactactcatgccaacattgctaaggaatgacttccccagaggaattcttagtacacacagaatattaagacgctcggcagccttgtcgatgatgcacaacaatcctgagagggggcttcttgggtgcttgttactgccctctgagtggacatgtctgctccccgggggactgttatatgtagtgatatggtgagttcaagaagccctccccaatactgactccttaaccctaaaaagaggcatattgttaatttagaagccaaatgtggttggcagctcagaggtggacactgagagttattcatctctttaaactctaaccttaggaacagagtaaaattgagatgagctctcaacttgggaaacagagactctgaggtcatgctcaaagacttcagggaggaatgaagctctttaagttagtcgtgaatttttataggcgagagcctgcacagatttcaccatttcatcagaccctctggggagctacaatctgtaagaaagaaagaaagaaagaaactggaatttttttaaagccttggcaaaacccatcgctgtgacagtaagggtttcatgtatccctgtatttagtaggactgaaggctccgttagaatgcactgagagcagttataaagtctggagctatgtgtacttgtcattttagattgtgctgtaagggagcaacaataaagtagttattatgcattttgttccaggacttgatggccatctgtcctatccactgcagagtgcaagtgctgagctgtatgtaaatcaaaaatggtcactcaggtttttgcaaaataacaccaaaattgtttttccaatgtaacattaccagctttatttttgtttttgttcccccccccttaatgtttagcaattggtaggtacaacatgaaaatgcatctctatttgtgtcttcctgattattgaattggctgtacttttacaatccccctttctatctgaggtgtttggtcctcttttcacaaacttttagagttcttttaatgttgcacgtatctatccatattcacttagcaatgtagtttgtaagtgcatcttacaaatttacaaatcttgggttgcatagtatcttgttatggggttaacagttttgtactcatttaataaatccttttgtcctagaaccccccaaagtactttctcctcaactgctttaaacttttgctatttgtagtgactctgttttagagaccagttttgggtttggtggacagtagatttccagttaaatttttcatctcaaataccatttattgctagctttgcatttcttcagaaatttcctctgggtattgtggtttctatttcttggctctctggtctcttggaatgatctataatttatgcctatgatgacacacctaactactgattagtcttcgttgctacagcttcttaagttttaatgttttatacagaaagactcaggatttattattctttaggagtcattagttttttatttgttcatagaaatttactacaatatatccatgaatacaaaatattttatgtttgtaaaaatcatattttgtactgttttataattgtatacctatacttatgatttccctaggggtccccttggacacgaacaggagggagcatacaaaaggagatttgttgcttcagtagtcaccacagtggaaactttgacataacctagagcccaacaataggaaaataggcaagcaaatttacacaatacaaaattccccagcagggaagagcaagagcatcatctataacagtgcagataagtctcagaaatattacataaaatgaacatatccattatactatcattgttcagaatggacccacactgaacactattaagacacatgcgtgtggaccgtgaagtcaagtgcaagtgtgtaataagtaaggggactgagaacacagactttggtgccatgactggtgtttagaggaagaaggaaaagagcaatacaggaagaatcacaggagagatgcattacagataatgtattggctcataggctgggcgtttttatattttccttggaaagaatttccttaggaggtatatatttagtatattatcatgacatataacttgtatatatcttctatatagcctcttgcgtatatcaattacattacaaagaacgcaagaagggcaagtagaaggagcaatttgacagctttatggaattctgttttgttatcctgcggttcattttcgatcctgaagaaatggtctttcattgtttttctctgtgtgttttaatgagaacagtttgagtttacaggcagcagtagaggaacacagtgccaagggagggtctgccagtagccccagccattcttgtaagtcctcaacccccgatgttttccttttctcttctatccacacttctatccattttcccttctccaagaccctttcttcccacccatcttcttttccatcttttgagaccagttgggctgttctgagtctctctccttctggaatttcaaaagctatagctcaaggacacctgttgggccaggctggaaggcccaggccttctgtctgtctgcattcatttactctgggttctgagctggctagagtagctatcactagtatatatgtagggctcaactgggtaggttttagttctcacgaagttattgctgtgacctcgaccctctgaacactttaattagggggctgacttaaaatggactctggcccatgtctggtgattaattatgacctggttgtcactcagagcatgagtgttggtctgggtaggacttcaaaaaacacgtaggggataagactgctgacctgagatcttaaactattccacagagagccaaacagagacccagaggtggagctcctctcagacaagatgatagagcagaggccaccagcgagtaagggctttcatgctgactgttgttcaaagaggccagaggacgccataagcagttaaagataaagatggcagggaggcactactagcccaggtcttgaaacctgcattctggagtttcaatgtgactctgtggggtagcaacacttttaaggagccactttttctcctttaggcagaaatgtgaagataataagaaagccaaaaagaacagacaggaaatagagttttgataatggaagctgtgtagtagtgcttgcctagactctatgcaggtgatgaagtggatagggcatgttgatgtttggatgaagggaaatccaatttcccactgcttcaactttgcattcactgtgggtttgactgtcagatgcatcccagtctgaacctctcacactagtcctcttcatccttacctcaagcttcctgctaggctgaccttagttgctgagtttcttgcttttcatgagtcaatcactaaattgcctagtgagagcacaagtggttgaaataggcgagctatgcatcccttgttgtcaaacaggataagaaacagaagtgaccccagctagctttgtgtggaccttccgagtatttagctttaactcaactgctttgtatttgttgtctcattttaagctcactgtaatcaggacagagagatgtttctattcttagctccctttttaaagacaggtacctaaggctcaaattgtttagtgacttttatgaaatgtcactggttccagagtatgccaagcccacactggcaactgaaatgacatccttggactgccaacacatcagaagcatcagcagttggttatgtatgcccagtctcaggttgtgctgcagacctcttgaactcatagctccatcttaaccagagccctagataactcccactggtactaaaatggtccgcattcccaagttagcagagagatttaataattttttttctaggatttaccaaacacagactctaggcatggaaataatttcaaccaatatttaatctatattatttagaactcaactaattttatgatttacagtcacaagcattatatgacaaatgaatacaccaaatactgtatgtttattatacagaagataattggtagaacaccgttagcttgccatggagaagtgtcacagtgaaaaaccttcagtgttctggtccagggattttagcacttcaggtgtgggaagtgctcaacctgatttagcaattacattccgatgtcattaaattaaaatggtcccaataaaaggactaggagtcaatcttaactacagctctgagaggttttactggcctatttcactcttgcctgctaatcctcactgcatgagaggcaggtagaaagctcattttccatgggcaccccacgtgatcaacagaataatgacaactgatgtcattgctcagcattgatgagcaagtgccctcttggaggtcattgctacgtgacaggtatctcaggcctgtgtttccaaatgattcttagaccctttgctttttggttgcatattctgcctttaaaatgtaaggatgattttgttctctttgcaagttctggtactttgtgaaactattaatcaatttggttttgttggtatactaaggataccatgtcatttattttctcccaagaaaattctgtaacataaagagatattaagtatagagctgggtgtggtagcctgtaatctagaacttatgaagagtggaagaccaggagctcaaggtcatcttcagttacacatggagtcaaaggccagcatggccacttgagaccttgtctcaaaaaacaaaacaaaatccaaacaaacaaaaaagagttacgaagtacagcaataactgttgcttgcagcattaagcatgtcatgtgtgccaatcactgtctttagtagggaaggatcaacttgcctgatccttccagatgtccattaaaataaaactgcatgtattgacttcaataaaatgtcccaaatttgctgtatcaaaccagttttctaatttttgttataatagcaagaaacttaaaacgtattttgagaaatcttctaattcgttgtatagacttgtaacaaacattttgttaaattataatagaaactttaggaatctcaagaaggaataaccacatagagtctataaagcagatcctaatatcaactatgagcttcagtcagcaataatgtatcagtgtcaggttagaagctataacaagtggaccagacagcacaagaagtgagactagactaagggcatgtgatcatacttagaatacttcttgctctactcttctataaatctgaaaaaaagtctgttaatttagaatagaatttccacattataagtattttatatgatcccagtggtaatagactgtaacagatattttccatggcacctcctgtcatgtcctggttgaacattggcccccttttaggttcataaactccccaaagacattaggcttgttgtagccaaaacagttgtctaatggtcttttcctacttcttctgtatcttggcacttggccttctgagatgagcactagaagtggggctctaaggctgctgggaaagtcttgatctgattagcctcacatctgtaatggtcctcttctcggtctcttagaatgtctcttatgagtacaatgcttgcaccatagcccacacctaactttagttcctctatgttaataaggaatgggtattagctctcttgaggcttttgcttcttcttaactatccaaactgtcagaggcaagagatgcctgagacttatcctattatattgctgacctttcattaactgtgattcaggccatgtttttacaggtcatatcttaattacattttttttgtgccatataacatgacaacagtcccttccttctacacctcctgttggtattgcttctgagtctcgctgccagttctccttccaagcttacttgttcctattgatttcttataacttagcattccatcaccaaacactcttcttcctaggcaaacctctggcttcctccacaacaagataaattgcttacatgattgtgaagatgttgctgttaatttgcagcaaaacagtagccattgtaggctgcagatttaaggcctccacagaaaccaatgacctgattatttcacactgcactgcacagagctaaatacaattactcccttatcccagtggagaggaattaggagtgcagaaagaggggaaacattatcctaggagagaggaatgtacggagaaactcatttggaagagtgtgagtatttactgtgcatggttcaggctttagggagtaatttcacttctcagttctctgtgtctaaggaaaggcaattccattaaaggttagaaatgcggtaaaaggtactgttttcataacctcctgcccacagtgtttctatgtagttcattatgttttcattttatagtgataaggagactgtcgcagcagcatccatctaccatactgatacaaacaccgaggctcgattacttccccaaatgtgaatatttgtcggaggataactatttgctcagatttctggatctctgaaaatgtttttcaaaagtggttaagggtctaccccactctgatttgttcttcaaatcagtcaatcgaaacaacaccaccaccaccacaaattgagacatatgagacatgtgataaataacataatcacacatgtagtatatgcacccatgtcacatatgcagtatatgcacccatgtacagctttattcacccagctctttcaacctcaatgagattttaacctattcttttcatttgcttatcatgcaagctatgatttaaatttctcctcaaagatgtctgtctataaatgataaagttgttcagagcctggaggtaaaacttcatgttactaaatgtctagcaccagtaatggcaccgtgttctcaaatatttcaaaaaccgagtttaggtcccctagaggaaatacatacacagagcatgcaggttggctagcatgaacttgctcaattacagcccacactacatgtttcaggagctgtgtctctaagttcttcttagactcagatgatctgctgcttccactgacctgtagtttagcttggctctttccattgaatttgtagggagcgagaaattgatattcctgttggaaaaaatacaactcacccaaatgtttttctcctattccttctaaatttaactatttttccatctatcatattaggaaaatacaactacttttaaagtatctgcttctaaggttgccaaataatttccacccacgtccctcttcctccctctaggcttccagtagaatcagttacaagaaatatgcttagctaacacactatccttccaaaacatatgctttgattccattctttccacgttgaaaatttcctatattctggaagaattgaaacattatttttgttttaaatttccataaaattaaagagacatagtctaacgttgagttgctcatagttatttaaacatgttgaagaatttttgaatagtgttaatattcttcatgcgatgtaattatggccatgtatgcgatgtaacttgtcaaagccatgttagaatcatactggaagaggatgtgttaggatcatactggaaggagactggctcttggctcagtgtcatctgcctggtgggtgagatgagagctctcatacacagaggagacagactcgctgtaaaactgaacaccagcatcaaggaatattcatgaggacttggaaagaatactcctttgtctgttaagtctgacaaaaattggatcattttacttaatacaaaaatgttaactatagacctaaacctatagtcatataaatgtgtgaatcggaggcaggagaatcactacgagtttaaggccatctgggctacatagtgagtttaagatcagctttgtaacataacaaaaccctcaaaaacaccccctagccaaacgccctctattcagcaatagtttatagataaattagtgcaataatttatagataatattagctgaattaactagttaatcctccctctcagagcttgaaaagggcacaagagggttgactcaacgctcctctttgtgaggtcattcaagaagaaaaaaaatacagaaacattttttagataatagtttagaaaatagcttttggttttaagctgaataattgttaagagatctgataattaatttctcaagataaattttaacttcatcaaacatcatcaaaaagcacctaaaatatatatattttttaaaaatggtatttttcaaaataatttttaaaattattttattttgtgtaatagtattttccctatgtgtatgtctgtgcaccacttgcatgccttgtagccacggagaccagaagagggcactggatcccctagaactggtgttctattcagccatgagccatagtgtaggtactgggagttgaaccctggtcctttgtgagagcagcaaacatttagccatagagttgcctttgtagctctagctttttttttttttcctaaaacagactcttgggtaagtttttttgattccaattttcttttactggactgagaaagagagaggcctttggatacttagctgattttctccataacttgatttttttcccccagttgattgtgtgcttaaggcagctaaatttcaagaaactcttgattgtttgtgttgaaatgaaaaggttattctccagaaaaagccagaagggctctgacctcagttttgtgtatttttcaccctgactatggtgagttctttgactctatgagaataaattccacactaagaaaagtgccctgaagtgagtttgcagagttcttatggtgagaagtcttaagttgtacaacctctctcaaatcagaaacatctgttgggatatgttctcctccatcgaaacaatgttcttagcttagttatacaaaacctggatagaacactgctcgtgatacgttataggctaaaaatattcttatctagaaaagaaatacccttttataaattccgattttttgacatcaaatactatttgagtcttctattttgatttatagtttaatcttttttctctaataagacagcttcaaaaaaccacgagcttgtaaagaagtttattgagaaaagtagcttttagactaaggtttgactgtataatgctttagaatttgccctccctttcatttagatttaatgatttttgtacagtggtcacttcattgtataagtccactaaatcagaatcaagaaaacatactagagataaatgttttacacacaatttattttgaggaggtgggtaatgattttacccaaggatggagagttatgttagcaattttccttctgcagatgtaaatggcagagtattagaaatcctgtccctaacttaagccaacacacatttgtagaaagtgataggaaatcggtccggtgcccccagacttcagatttgaagaacagatatttaaattttgagggtaatgtattttgtttggaatatagaagagtgttacattctctcagcattccaaggatttgcatacagactagattcagagcgcaacacaacctggtaaatctagaatatacttttatgtccccaaacctgctcagagtcagagctgattttgaatgtgcttagagacatcgtcatgtgttattccaaattcagatctcaaaatcgttttaaggttctcattgctttgcctgctgaggcgaagaggaagaggtggctcttttaaaagcctgttttaacaagcaggtgtgagatgtcattttggtaaaattacttgtggatttcagagtcagccaaaccctaaacatgaaggatagagtttgggttatattaaaatggacgctgacgatggatgggacgactgtcaccatgaagaaagctgctgattttcctctctaaaacatacaaaatgagacaactgtgcaaggtaaatggcccgacctccagggctgagcagccatcagcttttgcatcctgccctctggtgggaaactttataaatagcaacctctatagctccacatttatttgataaaactttctgtataatcaagcttcggcttttggcaaaatacatggcaagaatcaattaatccaaacaccaaattttatctgcaaatgataaatgactcagtgagcttgaaagaatttaattattcattatcaagttctccagcgtttccgggaaggtattaattattgactacctactaagtgctaatactacaaaagcatcatttcattaaattccatcaactatgagtttagactgagacatttctccttcattatccctgtagctttagcatcttcccaggcgagctgaaatccatctacacacagcagacagttgcattcatagtcactaagtacatcttttcttatccttccttaaagagggacctgtgaggagcagtgtcagcagggttgggcccctccttgttagaacatggtcctgcaatccgggattcatctcaaagttagccctgagaatggaggcaggactgtgaggagaatagtcacaatgtttctgtagtcaggcagcagagagtgggcttcaaactacatggactacctgtagtgacccactcctctaaataaggctttaccctcttcctcctcctccttctactcctcctcctcctcttcttcttcttcttcttcttcttcttcttcttcttcttcttcttcttcttcttcttcttcttcttcttcttcttcttcttcttccttcttcttccttcttcttcttcttcttcttcttcttcttcttcttcttcttcttcttcttcttcttcttcttcttcttccttgttattaattattttatttattttcatttcaaacattgcacccccaatcttggtaccccatcacagaattcttcccccaacccctccctttcacctctgagagggtacctcctctgtatctccatacccttgagcatcaagtctctacaggattaggcacatcctctcccactaagaccagacaaggcagccctctgttacatatttaccaggggcctcagactagcctatgtatgctctttagttggcagctcagtctctggagtccccaggggtccactttagctaacactgttgacagatgcagatagtcacagccaagcattggatacagaatgaggacccttatggaagggttaggataaggattaaaggaactgaaggggatggcaaacccataggaggctctaccttctatagcagttctcaacctgtggatcatgactcccacaaagggtcacatatcaactattgtgcatatcaaatatttacattaggattcataacagcagcagaattatagttatgaagtagcaataaaataattttatggttggggggtcatcacaacatgaggaactgtgttaaagggctctaacattaggaaggctgaaaaccactgttctaaaggatctatgacctttccaaatagagcagctgaagacccagtgttcaaacacatgggtcccaacaagttgctataccagtgaggcacttgaaaagctggggaggaagctgagaagtcttagaagggcaggaagcacactggaacattttaaccaagtttctgggatactgtcagatcaatccaaaaggctcagcttgggcatcccgaatagaatatgtatatgtatatgtatatgtatatgtatatgtatatgtatacacacacatatatatacatatgtatatatatgtatatgtgtatgtatgtatatagtctctacaattacagttgaacttctggccttgctttttgaagaaatattacctttttccttgttttaatatatgtaacatgatgtacctagtcagagaagaacaagtacatgtcaacaattattatatatgtgatatagcctatcatacttcacatatatgaacccatacagtcctcacacacacaaaatagataataccttgctctcaatttacaatgacaagacagaaactcagaaagaagagagaccttgctgaaggtcacatggcaattgtgaagagctgggatctattctattaacaggcttagcaccgtgtgtgctcaaaactcagacacaatgcaacttgcaagtccctggctcaactacaaaaacaaacccaccacgagtaccagtgaagactccccccaaatggctgttcgatgattcctgtaagcatagtcacaatcctggacagctcaacaactgggccacagagcgttgctgggtcttaccaagttaaattcagacttcttgtctcagtcagggtttctatcatcgagaagagatgcaatggccacagcataccttataaaggtaaacattcagtttcagaggtttagcctgctattgtcaatggtggtaagcatagcactgtgtagggagagttggtgctagagaggagccggaagttgtaaatctggtcagcaggcactgagagcctgggccgagcttctgagacctcaaatccatccctttgtgacttacttcctccaacgaagacatatctattccaccaaggccacacctcctaatagtgccatgccctatggaccaaacactcaaacacatgaatctatgggagccattccttttcaaaccaccactgtactgcactgactgacttatattgtgaccatcctagaagaaatgaagatacattcaaaagatatgtgttcccatgcttttcctaacagacgatagaaacaatggatcctgagaactggagctatctcatcataaagggaaaaactgggccctggcaccagccagatggggtgcttgcctcccaataaggatttcacacagttctgactcaccagccacgctgcaggaaagaccgtggtgggtgggaccatgtcttgatagagcatctcagctaagcatgccgtgcttcttgccttctattttaactcaaacatcacatcgggaccctaggacgatagacgtgagaaccactgagcaattcatttgacactcctcccgttgtggacacattgaataaatcttcctttgcttttcaccattacttctccatttcattgactgatcagaacaggtgcctgagccacgctcatgagggaaagggggtgggggaggtccaggctctgaccctgacaactcctttaacaatgtggagatgacattacagagcacaagaagaacagaaagtctactagttgattagtaattcattgaggcccaacccccccccccaggagtgttgcctgtgtgccttttcttttacatattggctgtacccaacattaaggtttaaagagacgtgtttgcatatccagtcagcatggtgtgcgcttgtgttgtgttgtgacagctttcgttgtcaacttggctggattgagatgcacactcaggctttagtaaaacacactgctgggtgtatctgtgtttccagggagaattagccaagggggaagacccttgatagtaggatctacatagaccagtgaacctcacccttcctaattcatgaccctttaatacagttcctcatattgtgatgaccaccaaccataaactattttcactgctccttcataactgtaattttgcttctgttatgaatcagattataaaattctgtgggttttgatggtcttaagcaaccacagtgacagggtcatttgtccccttaaaggggttgagacccataggttgagaactgctggggtagactcatcaggaacacattcacttgtttttgtttcctggcctccctgaagtgaacttcactgctctgctctgacatcttccctgccatgatagactgggagctcccacgccgtaagccccaaagtatcatccgtatgttgtttgctttagatgtttgtcacagtggtgaacactgactgctattcttcctcatggaaaatacccaggagtgtctatcatcatccaggaggcatggatttaaggctaggaccagctgagaggactgacagctaatgtctcaggcataaaagcactgtaaagatgggctaacaagcatctcctcagagttctaagcttagaggtatcccatgtttagcttgaaattgggaattctgtaagtatttattccatggaaatcaataaaatgctacaaacccaggcttttcctcccaagccactagttgttgaacattaccatcacagcacagccacagtgatagttcatagcaccctctagcagcctgaaaatatttttctaatagagccagtgatttgaacaatacacttgattttattttattttattttattttattttattttattttattttattttgaagacagaaaggaaagctgggcggtcaataaatcccactgtggttcttagcaatgataatttaaaatatcacttaaccgttgataggaattaaaatcaacccaatttccatatcccccaagaagtcaacagcccttggaatttgcacatagaagtacagctgatgctcttgaaactggctgcagctgccaggaccacctggggcaggggcagtttctagtcagtgatggatctttcagagactggacttcaagccctctctgctggctaagcagcagctcgtggtaaaagtccccagttgcttcccttccgatgaaaaggcctctgcagtgtttagccggtcctttgccagtgacaacagtgggcaccagcttccagggctggttctcacttcagacaacgctgaagcggacagattgctcagaaacccaggcagtaagggcttatagcataagcacacatgacttaacctggaatttcaggccattctggctggaactttccttctctgatatcagtatttgaacacattttaattcagactgttgtgtgtgtcatcaatagatttttttttaaacatctagttgccagaggcttcagtgtgctagggcatgagggatgggggcgcctccagtccaggttgttatctgggcaggctggatggcatagactgctctttagggcattcggcacacccctccccgctgcaccgtccttgttctggcaacagagccacattggttgccagcagtcggggtcatgttgatgccattctgcatctcatgggagccagtctgctgctgtctgttccctagtgtatatgtgtaacacacacacacacacacacacacacacacacacacacacacacacagctctgagtctttattggtcctcctgcctagacaagccctagctgtatttaatgttatgacagtaattacacgtccttccaggaccagccagttatgcctctgaccatcatccaggcatttcctctagcttccgctgcccagcatgggtggtctggagaggaaacaacttctctctctatattacctcaggaacaggatgcggtcagtcttccagcccctgagaagtgaggagagcaagagaagtcctctctcccagggactgaaggagaggctccagcgctcccatagcaaggaacatagcagtgagcagaagcagccgggaagaatggagtctttttgacgagttctattctaaaggtcaatgaaatctcattatactttaggagtttcttgaagcctaaattatgttaggcaggaagggaatgattcggtataagtaataaactcctattcaaaaatttttttagctgcctctgagcttgagattctagccttcctccgacggcatgtatttcaagagattaacgctacagaataagttgatgaaggattatattatctgtgaggttaaattctatgggtcaagaaatttgaataagaaatcatcaatgagaatgagtttacttgttggatatttgtaatgaatgtcaagatatctgtgagcagtcatgcctattatattgacagcctatttctgtaatgggggcttcagtgactgtcagtttcctccacctcccaccttagcccatcttatctctgtgcagaggagagtgtgttctacatgtggacagtgaccacccttccagcgccctgggaggtgtgggagatggtgctgcacaatgctcttgtttatccagcatagggcgctatgcttcactggccttttcccagagtgctttgcctatcagcgttccctaactttcgtcttatatattattatgtttgtagggaggtttcaatgcattacatcacatggaattgcaagttagttttggagctctggggccacagggctgccactctcagacagagcagaagaaggaatttgtaacagagtaggaaggaaacaggccccgtgttttcatatattttctgctgattttcgtttcatttcagaggaatgccttagggacagaaaaataaaacattaaatgagctggactggtatccacaacagaattcaatatgagcttgtttgcactaatgctaacataggtaaggattgcatgaactgatctagaggaataaacaggagcagaggaataaacagaagcaggtctcacgtagggagaagctggtacagagagggttaggtgtgaggaagccattcatttatcctcaagattataaagtggaatttgatcttgacttaccttgttagcatattatttcaccctaactactagtaatatcatttactactcaaaatgtgtagaatattaaaggttctatgatgtctgtcttcatcaaatccagatcacactataatgtggtttcttcttactcaacagtagaggaagtgagcttagaagtgttagttaactcagtggacggtaaatgggaaacttgagaagggaactggactctgagccacagagccatgtagagtctctcatgatagactaaaaggtcttaaaaagcattttcatacattaatttagtgtctgtgtgtctgtctatctgtctctctgtgtctttctgtgtgtacatatgtctgtctgtctgtgagtctatgtgtttctgcttgtgtctgtctgtgactctctctgtgtatatatgtgtttatgagtctgtattatatttgtgcacacacgtctgtgtgtatttatttgtgactctgtgtactctctgtatgtgtttggggtgtgtgtgtgtgtgtgtgtgtgtgtgtgtgtgtgtacacgatgctataggtccgaagacaacttatctgagttaatcttttcctttcacttgtggatcccaggggttgaactcagaacctctgtcttggcagcaagtacctttgcccacagagccatcaggctggccctaaaagatcttattctttttagctctgtatcttactataaagtattccatcaaaatgacaaaatgcttagcgtctaatcttgtctaaacaatacagcatcagaatttgaaatcttcctaagaaattccattttcttcactggttcccatattctggtgaatgaaggcagcagacataaagtagctcactgacatcagtcactgtacataactcgccaggcagttcctgtgtgcacaggtctacaggtctcagtagccattccatccagcacccccaaagctggttgtatgcataattaggaactcctttaacctaaagaaagcctcccaggattctaaaagcagtttctgcaatgcttagatggcatacattccagtgtcttctaataaatattccattactgctgccatgttctcccagaattgcctttcattcccttaaaatataaaacaaccagctaggtgggtggcactcagctttgacccaagcacttcgcagatagagtgtgctttaggacagcaagggtatatagactctgtctaaaaaacaaaacaaaacaacaaaacaccagtttatcttgaacttttaagccagacctaaaacatggtacaggttattgtcaatattaagcaaatgaactctgttaaatgacagttttaaaacaagcccagataccctggtaagtgttcttgtctgactgctcattataatcaccatgattgtggttagggagtggtgtttcgtgggtgttctccctgtccaagaatcatggagagtgaggagcctctgggagcactctggaggtcagcaagtggatggggcacgtagccgagaggacacactcatgctgaacaaggacgggaagtctagcgagctggtcacatttctgtggctgggatgaaaatagcaaaggaagcaattgaaatgggagaaagttggatggggtactgtacacttaggtggataatcatgatgggggaacatgtgtaataaagaagatttttacatacagtgggcaggcgaggggaaggggccagggaggaaccagggacaaccttccaatgcatacatccagtgacacatttccttagctacccccattcttcagaagaacacagttgtctgagaagcagccttcaacccatgagcccatgggggacataaaatattcaaaccatgacaacaagaaagatgggaaagcctagctggtagaaaggaaagggatgcggctgtcatatttctttaccttcaatttcctggtccaaaatttacagcatgcagatcagcattagaattcacagcatcctgcttcaataaaacatattttgatcctaaaacaaatcccgaaggagcgggaactagagggatgtaattactgtctgtattgttaattctaaatcattaggctcccctgcataatcaccagcttataagatggaaggctgtcagaaagacacacaaaatgttacagactttttggagcatgacatccacacaaccatttgcgtgaggaagtgggctgttgtttttccacacacacggcatttgaaaaatccatgctgtaacgaatagaggaagagttgcatgtacagttgaagaaattctatttcttttcacatccatagaaacaagtctatactaaatgttctttacagcaaagaacaggaacaaagcacatggctgcagaaagcctacagtatttcttccagcagcctggaatgctctgagggagagagagagagagagagagagagagagagagagagagcatgagcattcctaaggtgcagctactcacaaaactatcctccttccaaatgtgaggaacagttaatgtcatcctttgacttcctttcttccacccccctccccacaccccaaaccattcacaggccaatgctctctcttctgcctgtatgccagggaatgggataacacgtgggaaattgacaggaagtggttctccttgtcttccaagctctggctgctcagcactacccaaagataccttggcatcaatgacaggaggaagccaagtctcagttctttaatgtgctccctgtagaactgggagatgctggaaaggggaggggtgtgcgttctgtaaaccctaagcatagtcctctgcagctcaggtacgcacacctcaagctgctctcagtgctatgcctcctgcttccccgtgacttgcagccattatgcacagacccgtcacagctgctaaaatcattttgcaaaggaataaatcagtataccgaaattatagaattccaggacacactgaaggctttagaactcctcctgtccatacccttcctttgcagcagaggaattaagacccagctagacaagtacccgcatttacaagtcaatcagcaactttgaacctgtggtgagagtggtcaccacccagtggcaatcctctctcactggaatggaatttcattcctttacacattcagcaacccagggtttgattcattctggcttgttgtctgactgtttcatttccaattttctatcgtaaaatgtcaacttatcctcaacgtggtcattttcccacttctgtgtcctctggctttctttgttctgggtctaaactacagcgtcatgcttgtaccttagtgcagctgccaatcagaacttctgcttaaccactgggccattgtaaaacagtgtgcatcctctgtcagtcacacattgcttcaccaaaatgacaagaaaaccatggcaaattgttcaaaggtcagtactaccgcatatgtctgtctgctgagagaaggggagagggtagggaccatcacttgcctacggcagtaagaactcagagaccgtgcaggccaaggcttaaagctgtactctatcagctgtctagcttctgtcactagctctcttatatgtgatatgtggctggtgtgtaacaagctgtgacacttgtgtctgttgtttagtagatttacctggacctgtttttatggcgctgactggggcctttcaggaaataggaatgggcaagaatgctttgaaatctttgctctggcctctcctagacaacctattggccaaaataagccatgtgatttaggccatatcccaaattgagaggacactgtgaagttacacagcaatgcgagagagaagtggagccattaataaaatcttctcattatatgtccagagtaaaaactcaactaaagtcttattgaatctggctaccagagcccaggttgacttggaggtaatgggttacaatcgtgatttatatcaatgaccagtaatttctgtttatcaagatgatcagtcgtcttcaccaaatgtcaagagcaaatgacgactgctgcttcttcctgttgtgaagaacagctaacagctgaatctatttaatttagtttagtaaccaagtctttactaactgcgaggtggtagtcagggctgagcagcatcaatacaataagaattcagtaggactccaaatgcctgcatcttttctaggcagcctgctgacagtctcatacatccatggggttggagtcccataaagctggccttatggctccttgttttaactggaatggactcggggtcctgaaagaaaacactaggaaataatgaaaaagagtatggaaaatccagaaaaggaatgctcagcctttctatatcactgaggtggccaccagagggaagtgactgtccacctaacaattttccacacgggcttaaagctgaagaggaaagatcacaactgtcctgggacaatgtttcaaaagggagcactgaaggatcagagatcttagtatatcttagcagagaagacaatagataataattttggagataaatgtacctgttgtcttatcacacactttatatggaaaagagataattcctctgacttgatgcctcattccatgttttctgtattctgggttttcaatactccttacctctagatttccactaggtggcgctcctgagccatagtctatggtttatggcgcacatgaagacatgtgaaatgcatttttttcttcccttcaattttcaagactatttttttccagtttgaaagattgcagagaggaattatttatcagttggtgtattaaagaaaatcctgcatgtccaaacaagcacttcaaaggattttttagtaacacctatcacagaaggctgaattgatatgaagaagtgggagggtacatcccgtgctgatattttattatcaaagagagatggaaggggttgtgtttgtctctgcgaagccacagtgaccaaaccacacatcaactgttgggactgatttgtttatgaagatattttaaatcagatgtctggattcttgcaacttaaaaatctctttgttcagagtctagcaagtaaacatcaatggaaaaaaagagaaagatgcgcactctaagacgtgtgcactaaatacttcttgctttggtggccaatgtgcatctctgaatgccactgtgagttgtaccttgtgaatttccacattgtcacactggttaggtctgttgccacccaaaacccagtggtaatatcttatatcaggcatttaaggacatcttggtcaaatatgtaaaaaaaaaaaaaaaaaagcctgagacctactaagtaattctcttttgtttgtgggaaaggatagatccaggaccaactgcttccatctgggcttctgattctgccggtagcttctgtctgttcccttacttgagttctggtatcagaactccacagcctacagtcaggaccctgaaaactcagccttctcaggtaaaatgctaattgcctttaccagaaaccactgactcacacttcagtgccaacctgctcctgagctgtgtagcttcctttagacctaagcattttttatttgtaaaagagggaaggtcgcaggaccttcataaacacactcttgaatcactccaggaagctcaggccaacctgggggagataatcacagaagtagggttcatatggcgaagtcgctttgatgatcaccttacaattaatagaagatattgccaagttttgttttgaaatataaaaattgtgcttctatccgattctgctgtttattaaggatttcgtgtcatttgctttcaattaaattgaagcaactcaaattcaatgaaagtattctatgaagacaaacagtgtttgtgctattaggtatgacagtagtagttactattttaactgtctctataaagccagggtttcctgtcttttccatgttggcagcatgtagctcgtctggacatgttgtctaaagaaggctgtttggggaaattcaggaagcacatggtgagattaaggctctgagtctgtctattttctcagcccgtctgcagtgttccccaacgctcacaatgcagtgtgtgagctctgcactcggggatctgacctgcagtgactttggctgggtagttttgttgccagtctttccaatagaaaacagacatgtgcttcttcccgatgctcttagagctctctaacactgaatcctgcccagacttaaggaaggatgataccttaccagaaagaagacagaaatgcataaggtgcattaaacagggacaaggagggaccacacagaccctttgtggggtttgagtcaggatggtgacctgactgacagtaaggaatatggagcagcttggatagcttagctttcatcaaatctgctgccagaaaaggagactgggtctcaagaaagtcctggatgtaggtgctagacagcaattgctcactttgtatctctgtgcatctctttgtgtctgctcatgggctctctctctctctctctctctctctctgtgtgtgtgtgtgtgtgtccagtaaaaaggaaagcaactgttaaagagattgtactgtttctcagcagaaaaaaagaccaatcataaaaatgtcatttcaatcctagtgcttagtatccaggaggagagttgagtgggtggttgggccatatgcccattttgatttgacaagtctgacctctggtgtggggaactctctggggacgacattggcagtcctcagataatctgtcatctactgactggcatgacatgtttgatgtggaaagttatagtgttgccaaatagttatagacagcgattatgaccagaaagatttctccaatccttccttttccttacacaaaattggcagcttatttaactttatcgtggtgtcttcagctgggaaataagagaacccacaatgttggtaagataaaaaagagtgaatacttgtaaagctgagaacgggatgcccgccatgtaactaataaatattagtttgagatagttgagataattattaaatggcacagatttcatcttaaggtctggatttgcttggctctgactctgctgtaggttggaggtctgaaattgtctgctagtaattctgttatcatcccaccaccccacctcggctcaggttctcagccaacaatcttgtctccaagcagctacaagtctgcctgtgttagtaacgtttctgttgctggaaccaaaatacaccctcaaaactaacttcatggagagaaggctcttttggctcccaattccagggatatatagtctattgcggtggggaaggcagggtagtgatcagggaagacatggggcaggctgttcactttatgccagcatctannnnnnnnnnnnnnnnnnnnnnnnnnnnnnnnnnnnnnnnnnnnnnnnnnnnnnnnnnnnnnnnnnnnnnnnnnnnnnnnnnnnnnnnnnnnnnnnnnnnnnnnnnnnnnnnnnnnnnnnnnnnnnnnnnnnnnnnnnnnnnnnnnnnnnnnnnnnnnnnnnnnnnnnnnnnnnnnnnnnnnnnnntcagcaaggttccaccttctaaaggttctacaacctttccaaacatcacccactaagtatggaccaagggttgaaatatctgcgcctatgtggggctatgtacatttaaattacttctgccgctcacaggcccatggccaagtcttgatgcaaaacatatcccacccaactttgcaagttccttctggtctttaatagtctcaacaatattaaaaaaaaaaatccaaagtctaaagtctttttagaaacttgaggcaatctcctaattgtgactctctataaataaacatttttaaagtatatgcttctgacatacaagggtgcagcgtatacactcatatttgaaaaaaggagaaatggagcataataaagaatgagtgatctgaagaaagatggcacccagaatggaggaaaaagaccctgtacctccatgcctggcatttgggactcatggtggaatcatctcagtccaaatagcttaggtagctttgctaccagctctgctctgtagcacgcataacctctctcataggataggttcactctgagtgcagtttttgtctatggacatcctgctggctctgggctggaagattgggtgttcaaggcctgcttcaacgttatagtgagatcttccagtttctcaagtggcctcagtttcttatggtagcatctttgcaggtactttgaccctgtcacatatttcttgaccttagtagctctctatatccttggtacaatgtaagaagacccaaagaccccttcaatcttgtatctttcatgtctgttgacttgagggcattgggagtctgaagtgatcagggaaatgttagattccaaataaatggaatgtttgttagatttcatgacaaagggacaactccttgcccttcccctgactctgaacctacatgtttaggtcaacagcataagactgggaacatgaattaggactgggctataaaggctcaagatctaccccctatttctacttcctgcagtaaggttccacttcctaaatgttctacaaccttcccaaacagtgccactaactggggaccaggtgttcaaacacataaccccataccagacatttaatattcaagttgtaatattttctgggatactattttaatctcctcaaaactgcaacggtaactcgccagcaaggactttttctaggaccattgggtcttcgacgtggcaaaggttctctactcagaagaagcaaacaaatgcaagacaatactctgagaaccgacaccagattcattgagaacatcacagcatgatctttcaaaagtagcttctagccagggatggctgacatgcctgtaatccaagagactggaagattgggtgttcaaagcccgcttcaacgttatagtgaaatcctatctcaaaaatccaaacaaacaaatccaaaagtcctttctatttttcaacagaacactatttaatagatatataaaccaggattgccttaaataaatcataacttgatacttagatgaatttttcatttaaggaggctaattgtatacactgcagcactgtgggtgagggctgttgaccgtgagttggcaatgacctcattatgtagaactgggcattataaatggtagtcattaagacaggattctacttttagttaagggcaagacacaaaatgcagagtttcttaaattgggcagtctgggaaaggtccaggctgatggaagaggatgaaagggagaaggcttgaaaatccctgcagttggtggccagagaggactggctctgccttcctgtttgcatacttttcctgctgttacctctgcctagtgactgccttgcctttgatcattnnnnnnnnnnnnnnnnnnnnnnnnnnnnnnnnnnnnnnnnnnnnnnnnnnnnnnnnnnnnnnnnnnnnnnnnnnnnnnnnnnnnnnnnnnnnnnnnnnnnnnnnnnnnnnnnnnnnnnnnnnnnnnnnnnnnnnnnnnnnnnnnnnnnnnnnnnnnnnnnnnnnnnnnnnnnnnnnnnnnnnnnnnnnnnnnnnnnnnnnnnnnnnnnnnnnnnnnnnnnnnnnnnnnnnnnnnnnnnnnnnnnnnnnnnnnnnnnnnnnnnnnnnnnnnnnnnnnnnnnnnnnnnnnnnnnnnnnnnnnnnnnnnnnnnnnnnnnnnnnnnnnnnnnnnnnnnnnnnnnnnnnnnnnnnnnnnnnnnnnnnnnnnnnnnnnnnnnnnnnnnnnnnnnnnnnnnnnnnnnnnnnnnnnnnnnnnnnnnnnnnnnnnnnnnnnnnnnnnnnnnnnnnnnnnnnnnnnnnnnnnnnnnnnnnnnnnnnnnnnnnnnnnnnnnnnnnnnnnnnnnnnnnnnnnnnnnnnnnnnnnnnnnnnnnnnnnnnnnnnnnnnnnnnnnnnnnnnnnnnnnnnnnntttgaatgcaaaatgctatgatggagaggatcaccttcagtcataccatccttaaaccagaaaatcacagcagacttgtatgcagacgaaggaaacatagaatgtgaagtttgaaaatgtcaagacaagatatgaaataagttagcttcgggtggaaagagatatgtttggagttctgaaagagggagcattgtagttgtctgaaagatgtccactggcttacagcatgcagggaattctagagtgagaaatgtctgtacatgagaaactttagtgggagggaggactgtcctgtatgttaaaaatggatctcagaaaacacacattaaccaagactgtgacccttagctgtatcgtgtttgccctgaagtaaacattataaaatttccgtatgtgtttggtgggaaccattatccctcgtttcccagaaggcctggctcccttttggtttttactgagtcactcgtttgttctacttacctagaactcaaaggcatttgcctctgtctcatgattttgtgtcacttaggtgtcacagatcctatattattggagagtgatgcaagctctaactttttactgaccttactctgattttcttcctgctcgcatttctgaactgcttggccccgcctccagcactgtttaccacttagaatccctgggtcaatcaaagaagcctgaaacctgttcctttggcagtggactgcagtcaacagagaggtcaaacaactagtcatagtgctgagcataaaaggaacatcagtggtcaatccccaccccaccccacccccatctccccaccaaggctcagggaacacctctgaaggggaggggcaaccaatgtcagggcaggagaatgggaaggagtacagcgaagtggaccttcttctagactggacttggctatggtgctcgtgaacttacagacacaggagtgacctgcacaagatcaagacggtccaaactacagcacagattgggtagaaatcgatcaccagaccccatcccttcccgaggagctttgacacttggtagttgctaggggaagggagaatcattcattgtggagatttcccatgctccagtggactagctggactagcgcttatctaacaagaaaaaaaggcatgaagttgggaggggctgtgaagaacatggatttgcagggggaggtggggagtagattcaatcatatttcattatataagttatgtaacatttttatattctataataaatatgtataatataaataataattatataagtatgaaattatcaggataaaaatctgtaaagagaataaaagaaaattaataataaagaaaaaataacatttaaaaataaggcttaaggggctggttaagacttaagactgctcttcctgaggactggggttcaaatcccagcactcacatggcagctcacacctgtctgtaattccaagacctgacaccctcacacagagataatatgcacatgcaagacaccaatgcactacaaatacaaacattaataaatgactttcaaaatataaaccttaattctccatcttctcttgtgcttggatatgaatattttggttcttcctacagctctcctaagctactacagaaagcactttcagtttctacatttgttggttcatgacttttggcctgttctaaaaagacttgaggcagcttggagtagtaacaagacaaaaacaggatcagagccattaaaaaattaattctaaggatgagaattactggggttaatttgttacttcagtcagacatttaacttaatcgagtgtctcctcagatgagtaaaaaaaaaaaaaaaaagaaatgggttataaaattttcattgttcaaatgagaagaaccattcagatttagggacacagatctcatatgcggacattgactgaaaaagtatttcattacatggattcacataactattcctgtaaacattttcagtctgtatgtatgtacaaaagtggattatctgtcgaataaactgtgctgtcctcaagtgttctgggttctgatgggcaaagttatcaaggaccagtaagtgcacttgaaaatacattatcccttatgatatatatatatatctgtgacagattggcctcaaggccctcacatattccagcattaaggaagctcaattctcccacataaagttaccaacgttttgtatgtcactcccatagaccctcatgtctttaaatcatgtctagattcctggcaatacttactgtaattaaagcaggatataagtggttgttatgttttgttctttaaggggaaatgaacagaaaaactgaaaaaaagtctagatgtgtttagagcaggtggaaaaaaaataccttcaaatactttggatttgtgatttgttaaatccatggaaataaagcccagaagattagactgcatacagttttgaaaaacctttggctgttgatgtctgcatgtgtagtacatcagataaaagttgcaaggtagatagatgtttagaacaaaggaagcacgcaaagataaggcagtggaactggtggttggaaatgtaccaccagtctgtgttttccacgctgaagcccttgcctggccaccccaaagctttagctcctgtatttcaatggctcacctagcccgactgccattcccagagaagagtctccctcctctgaatcttggatctattgcaggattatagttcaaaaggcctccaggtattttctccatatgaaggatggcattccatccgtatgaaggatgagatgccatttctgcgactgctctgccggtgagaagcaagatctggtgggcacgaagtggtgatttacctggcatggtcttccggagactttccccctcaagccaccactgcatcacacagacatgccactaaacacgtttctcagtgaacttggtcttcaagcgttatgaggaatccatcatcccccctttctttcctaagagacaagggggaagtcagagatagtttttctcgacttactttactggggaagggcattgagaaaggctcacattgtaggccaagctaaacttgaactcctggcaatcctcctgccttagcctcccaatgagagggattttacttcttgattcttaatgcaatgttcttttattctccttccaggtacatttgaaaagtcacatacatagcaatttgcatatataattgcagaatgtacttgggtttaaatatattatagcattatattctaagtgacttcaaattccttctgaaagttaggggcataatataaatgaattaagtaaataaaaagccattactttagttccctctgtgtgtagcatgtgtgtgtcgtgtgtgcatgcacatgtggtgtatgtgtgtgtgtgtgtgtgtgtgtgtgtgtgtgtgtgtgtgtgtcagccaaagctcataatgtttggagtttttctcaggtgctacgcacgttattttggggacttggtctctccatgaacttggagttgcccagagtgattagattggctgaacaacaagggagtgaagtgtccccacctctgctgctctaggtcactgatgtgtccctctctttatgtgggtactggatacccaaactcagaacctcatgcttgcacagaaagcactttaccaactgaaccttctcctcagcctctttagctcctttagcaatcatttctagtttcctttcttgcacgtggctttttagcaggaaagttaattctatgtgaccagaatagtttcacaagtgtttttcagatggtgtgagagcccctttgtttctaacagggctttaactcattttgaaactggagatctttcaataaatttcaatatcaaatggccaggaccagagttatataatgatctaaggcagtggttctcaaccttcctgctgctgtaacccttcagttacagcagttaacagttctcatgctgtggtgacccccgaccataaaactatttttgttaccacttcaaaactgtaattttgttactgttatgaatcattaagtatccacttatgtatatagctgtctcctgtgaggctatgccagtgcctggcaaatacagaagtggatgcttacaatcatctataggatggaacacagggctcccagtagaggagctagagaaagtacccaaggaactgaaggtgtctgcaaccctaaaggtggaacaacaatatgaactaaccagtacccccagagctcgtgtctctagctgtgtatgtagcagaagatggcctagtcggccatcattgggaagagaggccccttgttattgtaaactttatatgccccagtacaggggtatgccagggccaagaagtgggagtgggtgggtaggggagcagggcagagggagagtatagggaactttcgggatagcatttgaaatgtatataaagaaaatatctaataaagttataataataataaaaatgaatcattaagtaaatatctgtgctttccggtggtcttaggcaacccctgtaaaaggaccttttgacccccaaaggatcaccacccacaggccgagcaccactgatctaagtgttcttctttctttgtgtctatggatgcactgtataaaattctctgttctgagatggtatgaacagatgaaacatgcgagagaacgtgcctgcagccacataagtgttttagggaagatatcaccaaatcttttatttatatatactagggggatctaatgtgttcaacttggtaactcattgagacaccactgtcttcagtgttgtttggggatggtttggtggcagctggagatagcctgcctgacagttctccgtgctctctgagaaggttgaggctcctaaatcacccattgtgcaaacatctattccctagtaagttgtggctgtaagattatacatccatagcaagagtttgatggtgctgtaaaccactcaagcccagctcttataatttattgaaacatcagctcccctcaagggaattatagacagataattaccacttgtccagtgccataaagcaagtcaagtgcctctggatttctctatgtcgaaacaaaacccaacactggggagggagcaggaagaattcccaaatgagactaaacagcttagcagaaaggaatcatatcacaaagatgggacccttttgataccgatggttctcgatctctcctcattggccaccctggttaaatcactgcaaatccctctcttggaaaggcttctgtagtaattggcattctttcccagcatctctaaaagcctttgtttctatcacaggctttgtctcttgaattctggcttcatttccacccttctgttccccaccccccaccccaccccttgtccttttcctctcgtggtgtctgtctctgacagactcatccttttcagccacgaagccctttcagcagcttgctcacatggggaaaagtctattccacataggaccctctgaggctgctacatcaataaagcaaattgacagcaggcttaacacctttcccaatcattgtctgtggatgtttttcagagcaagcaatcctgggatcccttcttttatacaagaatacaccctcctggcagagagatcttgttgggagcttcaaaaggaaaaagcagaacaaatgaagaatagaagataccctgtggtggccttccaggcacacacatccctcccttgtagaggaataggaacagggagtatctttgggacattgggggataactctccctgaacgagacaggggacagagcacctctgctttatcaccgcagtggctactctgctgtctttgcacaccgcctttttttagctctctactgttctgattcaacagcttagacaagatggcattccttcctctgtgtctttctcttgggagtctttcacaatgatctctgtcaaaattctggaggatgggtcagcctcatacctttctcctgtcttctgaaagtagaaagagctatcacaataccccagacatggtagattgttcatctcaaggttgttctgaaatgtgctgacagacagtcttagtgagttactgctgtgatggactctttctttctttctttctttctttctttctttctttctttctttctttctttctttctttccttctttctttctttctttctttctttcttccttccttccttcctttctttctttctttctttcttaaaagtccattctcctgtgtcttcctccccttctttacacaaaatattaggaaaaatttaaaaatattattatcacatgtccttctgggcagagctggttatattgagtgaccccagtgagaccagggatgggacagaaacccatgtcctctgtcttgtaggaaatgccccaccttgttcctccaacctcccatagccacgagtagagcttggaaagccctgtacattaacagagggaggagggaaggtgcaggtccctcagcgtctcgagcatctgagggatgcagctcctccaagttctctaccatgcaggcacctgagagcagagtgatgcatccacgccttactccatataaggcgaatcttaatttggcagaaaatccttccagaggaggcaaagcatgggaaggcatagctacagcctgcaggcagatgtgcgccttcgaaaagccgagcaaaatttccagtgctactctgctccaagggaatggaaagagagaaggagccaaggtctggacttcaaagaaatgtaactaaaaatgccttccactctgattttaatcttctcattggccctttctgcgaggggggaccttgagtgagtggatttgccttctccttcagtaaatcaaagcttttcagagagggttcatcggcagggactccttaccccaggaaactgtaattggaggtaaatattaattccagaggaaggcctttaagcgcaaggagcgcggcgacaatgtgcctccaaggaaccacttcttttattttctgtatccgttggaagcagattgtgggagcaaagcttatctcccatttttatccgttttttaacaatgccctgcctactgctagttaaactgagctgccttaagctcagcacaaaaagctcttttcagagcatctagtagataacttttttttttttttttaaagaaaagaaatcttttcacatagctctcctggtgccctttcatgagttgggactctgtgcaggcagctgagcctgagatggcttttggggacaaagccaccatcaagtattaagtccacatacattctgtaaagccaccgccatatttggaaactcctaccttccgcctcctgtgcactgtgctctcattgagtccagtgtatgtgcatcagtaaagcacagtaagactgtccaagccaaatacacgtcccaccctcactgggtgatgatgtccaatgtggatgtcctcccctggagcctggctggattgcgtgtgccgaaagtgatgaaaaagggagttcagagcccacagaacggtggccagattccgtgagaagcctgaatagctgggttcgtatcagcagccctagtgctcgactgctgctttctctgataatgagagaaatttctggaatctcattttccttcaacaataagggcaggggtggtgcccactcagctgcagccgccgatgagatttctgaggactctgtagtctattttcaaacctctgagccacgctttgaagtaaggctgctttgaagcaactctgaacgggatcctgacgaacttgatgcgcatctgagaggtgattaaaaggttccgggtggaagagctgaccccgtcctctcaaccttggctgttcggactgctctaacctgcctgcagtgctcacgagtcaggcccactgcgggtgcccggaccctggcccacaagtagacctagatttaagggaaaataatggcctcgtgcaggcttatcaatgatatctgcatctccctcacgccgcgtttgctttccttagcttccctgcaatttgcctgctgaggctgtatccacctcattaacccgagtacccaacctcacagggcagagggctgtgggatcagatagcctgttagtgttatcctacactggtacaggctgtctgatcccacggtcctctgtctttagacttttttttttttttttttatagcattgggtgcccgtgtgaagaattaactcttgggaaaggtggctttcttcgaccaatgtaaggcctgtggtgactgacagctacaggttgtcttttcactagcaggggtgataagtcagatgttctgaaaggagaagaaatctgtgtgacatcacccaccaccatcccctagttataccagaaatatttcttctgctggcagcgtcctgttcttgatttgaagatgaaatttttagtgaaatggatgactcttaagagtgtgccacttcccatgtgccaagaaccaagttgatagcagtaagcccagtccttgctatgcttgactcaatgaaatgccaaaccaaggccagctgagaatgccccgagatctcagagaagcaccatttaaggcctgtcctctttagcagacttgagaatggggcctaccatctggagaagacagcgccagttctcagatgcctcaggaaacttggatttcaacaaaagaaaaatacataaatatttatctaatcacataattagagaaaaacctactggcctctacagttgcaatctaaatagcccacttcattaaaatgcagaagttcttgtgaaacactttaaactattttctcctctgaatggttttatttgttaagatgaggaagaaacatttgccttaaatatataacattaaaatttaaatatatttacatatgcttatgttacatataaagacacttatgacttaaatatagcatcatacacatatatagactacctgcactggctttactctgtgccttctttccatttcatttggattgtcagtggttattggtactgatagaaggccttatggaacagcagtggcctcagctgcagcaacaatggcgtctccttctatgttaccaggacaggacaggacagcaggcagatttgtctacacaggtgagggaagtggagaactgaattattcaagggatttgattaatgtttatgtcagagcaggaactaatgtatcagtaatggggaagttcaattagtactttaattaattaggctcccatttttagtcatattgtgcaggataattatttgttagctttgcttaggacctgagttaaggccttgattacaggtatttaaaaaaaatataatacaaggaggctggggctctctggagtaactaaaagctcccaagattagaaaatgtcagagaaaatgcaaacccttgctatttcctaaagttgttaaggactgtgaaaagctagaacatcgttcaaaacaaactgttgggattgatgatagcatcggagtgggcagggcctctgagacattgattcttctctttgctttttcatctgggccagttttcactgtgctgtcatgtgcaagtgcctactaggcaagctgactctggtgtcgtcttctctctctctctgcttctgctaggagcttccttgactaagaacaacaataaactcactaagaaatattccagttcgggaggcttaatcttacagccagaacagaatggagcaatgctttcaggggagcctgtactgttttgatttcaccccaactcacagccagcttttgatggtgtctgaaaggcgagggacttgatgtgtgcacacctgtctgtagacagacttgccttttgtttgtgttcttagtgagccagctgtctcagactttagcatgcacaaggattatcacacagaaatacactctggaacccaggatagccatatcctacgggccagttaaggaatttctacggagggtttaggtgatgagagttagagtataaatcagatcaattgttgaactcctaggttaggaaatcaatctactattctcatcaactctggctttccagtatgataaaaacatgctgctaaaactactacaagtacagctgattatgcctctttgaatgagttagacagtatccagtattcattctataaagtggggtacttgctctagagagcttactgtgttgttctcagtgggaaaaaaataaaattcccaggccggctctttgattctcagcctttcgttgtccatcgtgacttctttaaatgtctgtggtgtttgtggagtgtgatttcctcctaacattagctgtggacacatttttgtctagaaggaagactgccttagttgtgtgtgagaaagtttaataccacagttctttgttttgtaaactacaacagtcccagtgcacagaactggatagagatgtatacagtttccaagagtactattgttaaaatagcatgataaaacataagattatatctccacctcaccatatctaaaacaaaatgccttaaactttctttagtttctatctgtgccgtactaatacccatgaagttacactgctgtgcttcactgtcagcttttgaaaactgatgcccatattcatacgtttatttatcatggtgatagagtctataattttagcttgaacctgtcttcagttaattctagccttctatatagcgttctatataatatctcttaccctgccttttagtgatttgtatgtagttggcatgagtctttcatgactttaaggcatctgtgaaggaaattcttctttttatgaaggaaacatctataagtaaggatgtcagaggaggaggatgggagcgaaccagcaaatgaaaaagtattcttacaaacaggcaagcacacatggccctgtgccttgagtgtgaggctgtacctagtcaatgagtgtcatcaggaggaaggcttggtagggattgtacattcaggacatatgcagtgaacataaatatttaatgtgtttcttactttctggcaaaaagaaaatgattgacaatgcatagcctctgctttcatggtaaaggaagattatagatctatggtctgctttgtgtgataagttcgaaaattgcatgggtttaggcctctagaaagaataagacctcgtgacagagatgccctctgtcatcatgcaagcaaactgaaaggtggccagagtgtggtaaacagggcttcactaaccccgctatggacgaatggagaagtgctgtctacccatcagagcttgaacattcctgaagcaagaggcaaagaggcctgagggtcatgcaccacccatattgtcaaacggtggggtcatgaccttcaccatttgtgaagcgtctcacctgagagtcacaaccaacctttacaactgctggagcagcctgaagtaggagctcattcagaaacacacctttgctggactcaggggtggggggagggggaacagcaagaagctagtcagtaagatcctagcccacaagacaacctccaccaggaaagatgctcagaaagaaagcaatggcccccaaattgtgcttgatgagatcgtgcttgcctgccagagagacttcaggaatgaatgggcaagctgggatgtccctggaaggaggagaggtaacagctccattgagctcctgagatataaatggactcagcatatctaaggagcaaatctgaggagggaggggttggacacagatgaaccagaagggagcaataggaagaataagaaatcagagggacacatgctccactatgttcatagcagccttatttataatagccagaagctggaaagaacccagatgcccctcaacagaggaatggatacagaaaatgtggtacatttacacaatggagtactactcagctattaaaaagaatgaatttatgaaattcctaggcaaatggatggacctggagggcattatcctgagtgaggtaacccaatcacaaaagaactcaaatgataggtactcattgataagtggatattagcccagaaacgtaggatacccaagatataagatacaatttgctaaacacatgaaactcaagaaaaacaaagaccaaagtgtggacactttgccccttcttagaattgggaacaaaacacccatggaaggagttacagagacagtttggagctgtgtcaaaaggatggaccatctagagcctgccatatccagggttctatcccataatcagcttccaaacgctgacaccattgcatatactagcaagattttgctgaaaggacccagatatagctgtctcttctgagactatgccggggcctagcaaacacataagtggatcctcacagtcagctattggatggatcacagggcccccaatggaggagctagagaaagtacccaaggagctaaagggatctgcaaccctataggtagaacaacattatgaactaaccagtaccccggagctcttgactctagttgcatatgtatcaaaagatggcctagtcagccatcactggaaagagtggcccattggacttgcaaactgtatatgccccagtacaggggaacgccagggccaaaaagtgggagtgggtgggtaggggagtgggtgggagggtatgggggatagcattggaaatgtaaatgaggaaaatacctaataaaaagtatatataaaagaaatcagaggagagcccacctacagagtatggtggaaagagtggcttttgttctaagtacctcaggttatgctgagagagtttccatgggggaggaataccaaagagagccctttgtgtacatggtggctttataaataaagatgggtttcaatcagggactgttgcaggatgggaaaccttcttctagaactttcttatagaactcgggtccaggcataataaggacgaatgtggacatgggaggtcagatggcaaccttgacagttttcttgctgagagtaagccaggatgaagaatttgtgaagaattagcaagatgcctgctcttgaagagacaccccaaggtcaagacctcaaggctcctgaatggagtttgttcagtccctcctggaagaattctaggaaacaccagaggccttcttcattcctctggatatgaatcctctcgttttttgtcttttgttcctgtgggtcagctaggctgattgctagcagaaggacctgctgtattatatgaatagccaggtgtttaataaggagatttctatgaaaacagaaagccaggttctgaatccaaacatggtcagtagagaagactctgaggtctcatgcttaaagaaggtttgcttgctagattgaggccagcgttgctaaagggacagactctcagttttcacgtggcatgtgttttggtgataactggttctgtcagctttgctgagtcctgatccagtccctgacttctaacatttgtggatcacaggataggagcccactggtattcccaaaacacatctctggatatttaatgctacaaatcaagttaccagactgctagataaacccgtgccatagttctgccttcagtacttcaatactgacctccaagtctgacttgctttagagtgcttgacacacaaagttctactcagtcctgccccttgtttcacttcagctccattctaggcttagaaataagacccatggtgaggtagaaacaggctggaggccaggagggcaaggaaccctcaggtctcagacacacaaagcatgacttagctaggggatttgtaagcctacacattaaccaatttgtggagagcatctataacagagcctacaaaaacagattctgaaatggtgtgtgtttgttgcttttgttgtcagttatgtgtgtgtgtgtgtgtgtgtgtgtgtgtgtgtgtgtgtgtgtgtgagagagagagagagagagagagagagagagagagagataagatacacagaaagcagacgatgtctcagagaattctagaacagtgtttgaagtggatggagcatgcctgcacagctttcctctggtgtggggaatcattatttcatcttcccgtttccagtggctgctgctattccttggtatacagctccatcactccagtctttctgtttctggtgggtaccgctaatccttggtaaactgttccatcattccatccttcgaggatggtcttaggcttctttctgcttagtgctcatatctcctcttgtgtgtgaggtcaatctttctctgcctctcaggcattgggaatcttgtgattctctttagggtctatatgaataatctgagatatgtccatgtcaatatttgtagtttaataacatattcaaagcccctgtttccatttaaggtcacatttacatattctgggtgctaaggtctgttttcttagtgggactgttattgtttcaatcaactcatgtgttccaatttgaatgatagcatttggtgaggaaaaaataatgaattcaaaaagtatcagttttgatggagaaagcacataaagttgttagaaagtttaatatagaaagataaatatttcaatgttgggtgttatagagacctttatcagtgatgataacattttttaaaaaaatgtatgactttatttcatgattaggaagtaaaaactatagcatgtacctgaaaaacataagcctttccagccaactgtgtttccaagtttgttattaatttgttattttttatttgtgatgagcaggcagcaaatcataccatgtagagaataaactgtttgagtgatttcaaaaaaataaaaggtgaacatacccacactggcagtcttggtgacaagctctttttctgagaattggagatagcagccttgaattcaattcaacttttcaattaaactcaaaatgcatttattgagaggccagtaactgccaggcactgggctccgttttgcaaatagaaagataaattatatcccatgcatgtcctctgagacctcacagtttagcttgggagagggaatggtagtaaacaattagtaaaaggaaacaacacagtgtgtgttgggagagggttgtgatagaagtgccaagatagaggtgcaaatggaaaagagagccaagcaaagtgcctgatattcaggggtcatttagcacatattcaaatgaaaagacccaccccccatcatctggaatgtaagctgttcttacctcctgtttcaagtattggtgccactattatcctcacaaatccattctccaaagaggagaccatgtcatctctgcctacaacctctagttgcaactgagctcgctggaaacaagagctccttctcagccaggcccttccagacctgcctaccttttggtccttgattcaactacacaagactatattactctagaacctctgagttctctcctggcccaggccctctgttttgtactttctgtggctctaacctgtctcctgtccatccacgtctctactctggtattcctgtggagagaatccatctttataagagggcacttccagtgaatcgcttccaaaaggatgtcttctctttgctttcttccatactccattgagatgcaatttcctaaggcagggaccttgttaatcttgtgcagcatcttatccctggtgtccttcacataatagaagatcattctggcacctgggatggtatggacattcaaaattccatcagcaccttgatggaagaagttccaaaaataatataacaataaccaccactataccaatgcctagcatcctaggcatgggtgaaactaccctccaagcctgtacaggacctcgggagttaatgatatccagctcattgtgcactgttgtaaaggttttataaaggacaattttagtgtcccattttcataggcttgagttagaattatgacataagaataaaaatgaccttagtgaaatgcagcagtattttaaaataacagcagtccagaagagaatcctggtaatctggatttagctacatcctttccttccttcactggcttctattttctgcacctcaaagacaaaatacctgtggtttatttgcaactagagaaagtcctggttaaataaatgggccttggtagcttaaaaaattcagtggtcagtatttgctattcattggtctctgggctctgttttgtctgagcgcctagtctctttttcctttgagttatcacccaagcatcaaaccagtatcttctgtatgccagtcatattaaattagaggttaaactgcaaaagctcctgtgtgcaaaggctgggcttctctgaaaaaagcttctggcattcaaagccgaagcaataaacaacaaaagaggttggtgaagccgaacaaacggccttaattggccattaagtgtggactgcgtggagaataatgcctaaccctgcacaggggtatctacctcattggaggagggttcccttggtggtcaaacttctgatgaatgccaccttcttccttcctcattaaaaacttcctcggcatgttgtcatggtgaatacctatataaagagagatatatggcttgcatcttattcctctgattcttcaactcaatcaagcttaattgttatatatttgcctaatgaaaaaaaaacatttaaacctatttttcacttaatcttttgactagaaaaaaagcagtaaagatgtttgaagtttgtttaaaccatcagagcataaaatagtgggttataattattatgtaaataacacggagaaactgaatcagaagttcttttataactagaataagacatgcagggttcaggcaggtggctgagggagcacagggcactgggaaagagagccattttgtttctacattgtagttcagctctgaaggagtcttgactcaggaatacctgtataaaagccactatgtatgggtgactgtcatcatagattatagcatcctgcagtcctatgatcagctcctctggagagaagcagccatatgttcaggtcgctaaagaggacagacagtctctgcagatatccaggagccttgtggctgtccaaggacaccagaatttatgatgacaacgggaacacagttatactttaaacaaaatagaaaattgccattagccgggctctattaagaattctgaagttcccagagataaaaatgaggttgaattctggtgtctgagacatgctgcgaattgcactgatcttaactactggcattagtgtgagcaatactaggtgttcaccacttgcattctttgcatcttaatgcctggatggttccatagtccaaacactcacattcagaggctcaaagacgtcagaacttattatactaaaagttttcatttatattcattgctaaaaacttgtgcagcagaaaggatagtgttctgactttcatactcccattcctgaagcagtcaggaatgccacggagcccaccagcacatcccagtacattcaagcattgggtgcccatgaaacacaaacaaaaaggggtcccttatacagtacagcatgttatctgggccacaggttctgcaagcagaataggagttggattttggtcctgattagctccatatatattgccctccacaacattcctattggaacaatctgcaaagggcctcctggagacagaaaacaaactgtccccaagaagtgtgatatattttattttggaaagcaatgggttctgtactttggaacagttttaggtattgacatattagtttagaactgacttgttaaaattgttcatttataacaatcaataaactctgtgtgatatgttattattaaacactataggttttgttttgttttgttttgttttgtttgtttgtttgtttgtttttagtgttccttccctgttttaagatcctgtctagtattctgtattacatttggctgttaggtcaccttagactcttcttcgctgtgacaacttcccgtccttccttccttccttccttccttccttccttccttccttcaagattattttttagtaatcattccattcatttacatcttacatgatatctccttcctgattaccnnnnnnnnnnnnnnnnnnnnnnnnnnnnnnnnnnnnnnnnnnnnnnnnnnnnnnnnnnnnnnnnnnnnnnnnnnnnnnnnnnnnnnnnnnnnnnnnnctccccacccatacacccactcccaccccactgttccagcatccccctatcctggggcatcaagcctttacaggaccaatggcctcccctcccattgatgtcagataaggccatcctctgctgcatatgcatctagagccatggatccttccacatacactcctgggttggaggtctagtccctaagagcactgggtagtccggccagctgacattgttcttctaatggggttgcaatccccctctctactcctccaatccttctaccacctcccccactcgggtccctgagctcagtctgatggttggctccaagcatctgcctctgcattggtcagttgctggcagaacctcccagagaacagctgcactaggttcctgtcagcaagcaccttttggcaatggcaacagtgtcagagtttggtatctgcagacaggatggatccccaggtggagcagtccctggatgatccttcctccagtctctgctccatttttttgtccctttctttctttagacaggaacatttctgggttaaaaaattttaagatgggtaggtgaccccatccctagactgggcggtgtgcctatctactggaggtgatctctataggttctatcttcccttcactacattaagatttatttttatgttatgtatatgagtgctctatctgcaatcagaagagggcataagatcacattatagatggtcgtgaggttcatagatgtactatgtgtttgctgggaattgaactcaggacctcttgaagagcatcctgtgctcttaactgctgggccatcttttctacactggctgggataatctcttaagcttgcatttgttttaatgactttgacaattttatgggagttaggcagatgtaggatagaatgtccttgtactggaatttattaggtatttgtcttattataagatgggattttgggtttgggaaaaaaagatcatgggggttcatcccatcattcacaggcacacatgttgaacatattttatgacaaccaatgtgaactttgacctcctgcctgaggctaccatggtcagtttctcactactaaagctgcttcctcccctggcccactgcatgatttgaaaggtgctcactgcgcagagcccacaggatgcagcctgtcatcattttctccacttttggtggagtagcagcacactttgtaaagaggactctgacctctttgcaaatgctgcattattcaatcacttgtttatgtcagtgtggacccatggctatttctatactttagttaatattgtgagaatccttcattatgatgctgaaattatgtcacctttggccactgggatctttctcagttggcgtgcatgcctgcctggcatatagacaccactctgaactttcttacatacctggaagcacaagatgccgcaggctagtgttgaatattctcttttctctccttcatgtatgggaaaggttctttttattaaataatgccattagaaactaaaatttgttgctagtactcataggtagtttccttcagatgccctaaggcaacaaagaaatgcatacttgtctactaacctgtctacatatacatatgtatatatctacatacatacactttttctatatataaccttttctatttagagtaaggtaaacctgaattattatttatatctccaatactagttcattactacattctggcctctttctcctgcttcattctaacagtaggaaactcattaattgcttgatgctatattttacctctgcttccatgggaaagaacttgagttcaaaattacagtccagtactattattggatagctcagattgtctttagtctcatagactctgtttgtttccataaatatcaagttcagatcctttctctgttccattttcatgagatttttttcacacattaatatatatatatatatataatattatatatacacatatataatcttgtcagtctgcatttatttctggcattcccaatgggaagatgtggttgtttattagtcaaattaatcttatgttcattaaaagatggtttacatgatgcttctgaaagtagatgtttttatttgcatgattatgcatttaattttaccataaaagtacataattatctatcaagtaatagtcttataaatgctattaattaggacaaagacagatatatgtattttaaaaactaaatcaattcaggaaacctgatggggaattgtgaatggctccagtttgggattttgcccacaaggaccatttatactctgctgttttttatgcactgtaccttcaaagtccaaatttctctttagatccccaaaataggtcatccttgacatttcaaaatgataaaatggactgtatgtgtgtcctacatatatttatatttgtatatatgtgtgtacagaatcttgtgtaaatagcaatgcttctgtctctagtctcatatgactgtattctacacagagcaataatcaatctataactcagtcaacttctcaagaaggtggaagattttttgacagggcagaaagtagaaaaccacaggggaagctggatgttgtcagcatattcagcatgacagtcctggtgtcaacacgagcactttaattcatcccatggaaactcagatgagaagcagcttcttggctggggcatgggcatggtgctgatgccctcctaaagacaaatctttatgcccgtccgttagtacacctctcgatcttcaccacagaagcttcttattgtaatagattaacagatatctacaattgattaaggttcagaaaatttaaaaaaaatgggagattctcagtcctcaacatgatatctatataatacaaggttcagggatcatggaggaggagggaaacagaaaggttgtaagagccggaagtagagaatgtctacagtgtagcactgttttccagacataaaagagcatgtgctgacagtgactgtgacactgtgatggtttggtatatgcttggcccagggagtggcactatttggaggtgtggccttgttggagtaggtgtgtcactgtgagtatgggctttaagaccctactcctagctgcctggtagctagtattctgctagctgccttcagatgaagatgtagaattctcagctcttcctgtaccatgcctgcctggatactgcgatgctcctaccttgatgacaatggactgaacctctgaacctgtaagccacgccaaatgttgtttttataagacttgccttggtcacagtgtctgttcacatcagtaaaaccctaactaagacagacaccatgcatgggatccgcacacaatcaaccagacaaatatcccagcatggaggatgaaggtggccagggacttccattcccagatggggatattttggcaattaagtcagattttttgaagtcagggtccccttgttgtttagtcttggttagttagctcaaatagaatagctcaaagaaggaacctccttcaaataaaaatattttgtatagttttagtccatttgatgcatattaatatcagaaacttaaagtgagatattgtagttcaattttcaggaatctctttttgatataaaatgaaaagtagggaaatgtagtcaaaatttgagcacagagacagtccttttatcattactgaaaagtaaaaattgcaacccatccaaaagtccaatattaagaaaccattaatataaaatatgctaaatattagcaacagaatattcttcaagtcttgcaagtcaaaattataaatgacattaaaaaatcttcatactatcatttaaaaatagaccattgtaaagttctgtaagtggtatgagtcataggttggtaaaaatgtataaaatgcagattggcacaaagtgttccaaagtgagatacagtttatcatagaacttgtgttctgccccaagatacacacccaatgaggatcagccccagcttttaccccttctatcttggtgtcctcaaatgacttgttataaaatttcttccaatcatccattaggatattgctattgaagttatgatatgatgagaaatatctttttatatgttcacacacacacacacacacacacacacacacacacacacacacacacacacaattttccctagcatttggtatgaagcctaacaccttggaatttctctagaggcagaggtgataggatcaccttactactgacaagtcccctccctggatctgtttatgctctttaggtgactggtgctggtcccctcctacccccatctagctgtagggtagagactggtcatcaaagacaaaggcaggagtatgacattgagcttttaatcccacaccctcctcccccaaccaaagggtaaattcagtcatcagtggccaagagtttgctccattatgcctgtacaagtgagtctcaagcaaacctgaatatcagaaagctctggcttggcaagtacaggaagtcactaagaggccacgtgaatcccatgctcaccccggcttcaccctgctcctctcttatatgactaattactgagtggcatcccctgggggtaaaccaggacaacaaggtaaagtactttccagaattctagaaactgttctagcaagtaattgacaacttactctaaggaactttgtggggatcactgatatataactaggtggtcagagctacaggtggcctggctctaggaactgtcctttcaagtgtggacagccttagggtaaggagacatttaaccagttgggatctgacagtaacttcagatagcatagtaacagtattgaattaaatttctggacaccctactggtgacagatgaaccaaagaactggtagtagggaacactctaggaacaatatatttttgtcacagtaagggcttaatcaggaaacagatccaccctgggtattaaaaatggaaagaatttaattatatcttacagcttataaaacagtaggaagaaaggaagaagaaagtcaaggaaatttacaactatgcccaaaccatcagggaatctgagacaagagtgaaggaccataggagaatttggcccagccagctctgagctttgagtagaggactagaaaacaattcagagactgccataaaaccaacttccgctaagtaccatcttccactgtagaaggagaataaatagcctcggagtaccaattatctccaaagtctagatccagcatgtcagtaggtgagaaaatatgaattgcagaacctgtggtgatggagtctaagaaatgtagcccttggtcttcaaccccaaagaaagcacatgaacacaggaatggatgtgaattgcttacacttgttttaaacttctatcgtagagtattgtaacagttttgtgaggactaagttacatatgtatgtacagtgttaacaggacatatgggtaatttcgtgtaattgatggatttaagcattgttcattatgatggtggtaacaaagccggtatgttagtggaataagactaggtatctgtctttttgttaactcacatttttattttattttacattgagcaatactttttatttagagagttagcttaacccccaacataaatgctggggagtcatgttttctgtaacaaatattggtgtcagatatcaatcactggatgtaaggtatggatcatttgaaaccctcaggttacttcccagatctgccgtctggggaggttttcattttaattctttaattcttattataggcattgagtgagtttggaatcaagtctttatttttgtgtttcaaacttcactatagtacctgctgcctttcttaaataaaaatgctgctgccattcatcagaacaacttggcaaaagccggaaatagtaagtgacaagcagagaacgctaattgtagctgggatagagcaagtaataagaaaatgaaaagatattattttcagtaaacccaaagagagaattccagctaaagactgattaaaatgccaagagagaaaatgttgttttcaagaagaaaatatataaaagatttggaaagcacaatccttccagaacaaatcttaaattgtaacatactaccaggacattttcaatgtgccatgctgtctactgagttattattgctggctgtaaacctttaataaataatgtgaagcatgataacttgctattttaatcaagggctattattagaatgactcgaaaacctgagctttgtcccacttagtgtattaaaataatttttttcaaatacaccaattatgattgtcagagtaagtggaaaataatttatttaggagagaacctcattcttaatactccgtacccaccgacccacagatgattaattctttataaaccagctgcagccagcctcagaagagccgtctcattattggtccgttattgtgttagtcctttttgtaggaaccgattagtgggccaattaacagccttctccttagaggtctacagctcaggtgggggaggggctgctccttccactaaatcctttgcttcagtcgcctattttgagcttcagacataagaataaaggggagagagatttcccagtctttggtcttctcagcattgattaaaaatatatctgagatttagacaaactctaaaggagaaaggtagcactcatgcatcagttgttgttgcaacaaaatgtcctacaaaaatgatgtaagaaacggtttattttggctcacagttcaagagtacagcccatcacaaacgagaaaacctgctagcaggggtaactggtcacattgcatggatggttaaaatcagagtgcggactggaggcatgtgtgggaggggcacacgatggtgggggatggagggcagctgatactcagctcattttctcctttgtactcagtctagggcctcagcccaggaaatgttgctgcccacagaggggatcttccctcctcaattaaccctatttagaaattctgacatccaatgcccaggtattggtcctgtggaggagataatcaatgctaattattatcaatactaatattatatcttatttcaacaaaggcctttcgtgtgtgctttcttaaaatgtagtgtttagccttgttttcttctgaatccaaatgcctaaaatgttgtctggcatatagtagctgatcagtaaatgtttgtttcacaaataaatgaagacttgctaagatgttagtatacaatagtcagagaatggggctcctttgtataggcagctcccaaactaggagagaaaaagacacagcagcagataaatctaaggtagtatgtgctgaattattaaagtgcagacacaggaagagtgcaagacaaagacagttctctctcaagttggcagcttgggttggaggagagaaatcttcctagagatgaggtcacagaagtttcatagacttgccaggaactcaacaagccaaaagggaggctttaggccaaagcacagcgttatgtaaagacgactcctggaagaacatttactgttaaaatataacaatatttatttaaaaatccatgcatttttttttgagatttcataatcaggagtctcaaatggaaaaaatgagaaaacttggggaaggagaggagttggaaggcaaatctgaacgtgcagaaattgagatgttgaagaaactgaggtttagcaatgccaagttgttcatggtcccgaggacaaccatggagtagagtttgtgagtccctttcctgagcatacccactgctactgtgctgtgacaggtagtgtgggctgcctgcctccccccccccccgtctttcattgaattagcagactcaaggaatagctcattttcgaaggcttccttggtgaccaggaggaagaaatcagaaggatcctgtgtgatttggatgattttccagaatcctattttgcctctacttggttattgtttgcttgttttagtttttattgtttttgttgttgttgctgggtttttttttatagctcactgtgttgcttgctcattcattcattcattcattcactcattcattcattccatggttcaagcttacagatggcaagctctgtgctacacactaattcatagccctgtgcattggcttcattgcagggacctgagggaagccaccatctctcacctcattttccacagggtcattgaaatggtcattcaaatgaaatcttactaatggagtacctctttaatttaagaatttcccaagcaaacaaattactacttactgaagaatactggagtttcctcaaggcaggagtcctcttacctggagactttcggtgcatgttatctgcctgtctgcttcatcttatagattgcagagctttcaatcactgttaagatttttacttatagatctggttctcaaagccttattctttggggaatgtggaaaaagaagggttcactttgattatttatcaagaggagatgatgattctcacgtgcatggatgttgacttggtcaaagattgcattctctgtacttgttggtaagtcctccttgtactcaaagcagacctttgattctgagaataccactggttgccatgtcataaataaatctgccttggctgtagccagggagaaatgataatctccctttttttcctgtctcggcccccggttgcctttagtcagtgttctatccctgtaatttacacattctgtatgtttccccatacatttttccttcagtgtttatgcatacatcaccgcttttgagatctatatattgttttcatgtatccaaacaccacagccttttataactgcataatttcttcctagtttatgttcactgaccacctaaattttctggattagctatgttaaaacaaaacaacaacaacaacaacaataaaaaaaacaaatggcatgtgtcaagatgttcacaataacaggacaagataaggactcctggaagacagggctcaagcaaatagaccatcccagacaatccagcgttctaggcatgcacactgtaacaaaactgcaaggaaaatcacacatatacagttcgtcatgggccgaataaaacttgctgacccataagtttcagaagtaccagaaatggcagaaggtggggcatctgcttcttttttgtcctttatccggagtccatacttgatgtaactcctgggtagtttcttacctataatcttttcacatttgaatacatgtcctcagcgtttgtacagcagggcctttggggctgccctgcttgtcatgcctacaagagccaccagtgagatgaacaagaaagttgcctctgccttctggttgggctactcacatctgtctccatccctccctgggaaccctccaccagagacctcttttcctggagtctacacaggaaacaatccttaagctctaatgctctgagattgcccctgatcaattctgtcaaccctagtggcttctgtcctcacattctgagtcccggtctacagaacagcaacatgccaatgtgtacaatccttactttccttctaatcccgtccctttctagcctagaaatctgcctttgatctggatttaggggtgacgtggggcttgaaaaattgcttcagactcaagtgcgttttgtccaattctctttgttacattctaagtctttctagacctttgatttcaacatttgaaacacaggcttttaagtaaaccctcaaatcattttctctccaactgttatatatcttaaagtataaaacctaagaactttgaaatcaaaagttgagctcaagtaagatgacaaagaagtaatacttcataaaaggtattatttgggagtgtgctggctagttttatgtcaacttgacctaatctagagtcactggagaggtgggagcctcaattgagaaaatacctcagtaagatcaggctctagaaaggcctatagggcattttttaattagcgactgatgggggagggccatcatccctgagcaggtggtcctgggttctataagaaattctgctgagagagccatggggaatgagcaggtaagatggtatggaagtgaagacacataggcctttcctccctaagttgctttcctcttgttctggtgtttcattgcagccatggtgtccccaaccaagacagggatgaaagcaaaacccattgatacagaagggaagacaaagtcctgtctttacacaacatgtctgtgtatctacctgtcatctgtgtacaaatcgtcactgggtgggagacatgtcaggcttatgttgtgatcagaggactatttggggaagtcatttctcacccctaccttgttgagtaaaggtctccactgtttctgctgctgccccaggctagctcttgtgcttgtagccttccaggtgattcgcctttctttcctctcatcataggaatgctggagttacagagtcatggcgctgcatctggcgtgttacatgacttcgagagatccagctctgctcattaggcttgtgcaagtaacatttaatttttagttaccgagccatctctccagccctgcatcatttttttaaaaaagaaaaaaaaaagaaaaactttcagtctacatcaagtatagtattagtctgagtcatcatagtcaaagaagagcagtcttttagggtttccttgctttatttcttctgttttttggtttgtttgtttgtttttgctgttgctgtgttgtttttgttttgatttgatttaaactggaatttgccatgctcttgcctctgcttcctgagtgctgggaatacaggcatgtgcctctatatctggctgagctttatgttctgaatgactttgtcctaatgataaccgtgatgtattttattacttttttcattccgctgctccaagttttctttctctgcagctcatgggttggtcaccactattttctgtgaatagacagtgttcctttagagaaggcatcagagcagcgccttggatccccagaaggtgcagcctgaagggaggttattgtagtgtttagaatgattctattgaagtgtggctttatctcctgtacaattgaacattaaacatctaagtgatggctttgttaatgagaagttaaagtcaaagcagtcagaggctgaccttaaatccccattcacaattcttgtgggtctcactgagacatccacacttgcaccagaaggcgacattgtgtagagctttctttgaggttagtgccacaaacagacactttcatttatgagatatgggtcattgatgatatttaaggtgtccctgccctgacatgagggcaataagagctgccctacttttttttgtaaaccctacttggtccacaaatagatcacagatattactttaaaggacttgggaggctaagtcaaggaacttatgtatttttagaagaaaggaataaactggaactaaggttcactcaatgcaaaaatattttaaattcatggcacagcgtatttaccttttgaggtgtgagatccgagccttctgttgttgtcaagtttatcttctgaatcagtgacacatgctccaataaacatcaagtgacagcccctagtcactatccaacacagggttcctggagcaggtccaatccacaggcacagaagccgtgtaaataaactctgctgggcaggtcatgtacagaaagtgaattagactaagacatcaagacagttcctgaacacactgctgtagctgaacagatggtcagcaagaggagtccttaaaggagccattggagcacaattccaagtgatgtctcatatcctttggcagttggagagtgtcagaagcaaacagttcatgagggcgtgttaacacttagaaaggaatgatcactctcagagacgacaccagcagagcataagcgcttctcattttaaaaagggtaatgggtacaagggataactgaagtataggcaccagggaagaggatagtgaccttcaggacgtgtcctaggtcagaggtgaaatgtagcaaaccacttgtcatgccctttctctaaacctaacttgtgattctaactccaggagaattatgtgtgtgctcaaggcaaatgtgtactctgagatggttgagtggagtgttagtatgtctgtgatgtccatttactcaagtcttatctaagtctctatacacatctctgtttgtatgttctatccattattaaaggggggaataaaagcttatttgcatgttgctatgtctctcttcaatgctgtcaacattcactttgttttttaaaaatttttatttaattttcataaaatatatttgggaggtccaaggaccctttcccaggggtcacatatcagatatcctgcatataagtacatagcctacatagcagtaggaaaattacagttatgaagtagtgaacaaaaataattttaggattggggctcaccagagcatgaggaactatagcaaagggttaggaatgctgggagccactgctccaaggaaacagtgtcttccagataaatcagaccgacccacatacaaactcatagagctggtgatagcccatacaagacctgcacaggttcaaacaggacaaaaccctgcacagacgaggggaaatggatacacattcccacccctagctaagaagctatttgcaactgatacctgctggaaaatggaaaatccattttggctaatgaacactgggtttatcaaccacaccccagggcaggccccattttgttttgctttgtgcgtgtacatttttgtttgtttgattgtttgtttttggcattttgtcatatcttaagagtcccatgtttctcgtgaggcactgcatctgagatcacgttaacggtaagaatacttgagtagaaggagacaggtgtggtcaagtacttcctacctcagaaggaggagcaaaggcacttacaaatgatgagcaggcgcagctgtgaccttgagaaccaaatagataacgttcaggaatgctccatcctacatagatcctgcacaggcccagtgagaggaaaagagcgcaattcaaagctgttcagatgtaaatattatgttgagagcattggctgggagctgcaattttggaaatgatagtgttgatcatctacttgacattgcttctcctttcctactccctgtagagtctctattctgttcaagcatccacttctcacccacagagccctaaggaaggtggcttcttccctggtctaagagtaagctcatgttagtatgagcgggcctactgctagaagtttctgggaagaggctaaactaggtccagccaatgagacctccagaccatatatgggaattttggagaagagattcctttgttgaaaaatgaaatggtctgttcatctttagtggttttcatatctttatgtaatgactagaaggtaatgctgtagtcatcttttaaccgcaaagaattgaatcatcagtttagcagataaacatggcagagcttaacaatatacatgaagggtttgccactggaaactcatggtatcttgactgatgcttttaaaaaatgctgggccaacttttcagaaaatatagtagtgatttggggtggatataagtcaatctataaggcttcatcttcttgtccatccatccattcacccactcatctgtgcgcctatgcaaccatgcatgtatattttcaacattaaccaaatgcctataatgtgctattcattatggtgaatgttaaaagttatgaaaagaaattagaagcagcccttgatcttcctacatgcatagcctggataataggtgacttataataatatgaaaaagtaaaccctataaaacatcaacctactgaatgccttggcagtgcagggtaatgagttcttatttccagatcagagttaagtaaggacataaagaaaatgaaaaaaatgtcgtcactctatgtcctgagctggaaacctgaagaaacaagagtagcggggggaggggaaacatcattgcaaatcaagatacaaatccattccaagagcaggctatttgtagatgtactgtagtatcagaggtgaatcccagagaaaagtgaactagagaagaggttagtttatttagcctctagaagaaaaagaaggtgaacttgagcagaagggttggaggtccactagaagaatagtccttgctcctaagttacaatagtcctgttcatgccccaagagccttccaatgaaatcaaagaagtgaccaccttactgaagtcttcatgattgcctttctggctctgatagacagaatcagttacatatttacttctatctaacttggtcctaaatgtacgtttgtgttatataaacctttatttaaatagttatctgcctcatgtatgccccagtttggaggatgagatgaggagacttaagagtttacaaggtataagggaaaagcagacataaccttgttataaagaggcatacatccaggtaaaattattgaaggatactgggggagaggttggccaggagcagataacaggttatagttctattgcaatataagtaacaagggttttctgtctgggaaaaccttccaagtagaaggaacctcaaagacagggaactccagtcaaaataactaaggttagaatttctaaggttagaagaaatcatgaaatgatgaatggagctagcagaaaacattgaagcagagtttagagcaatgggagatgggatggcttgtgagtaagcaaaggtctcacttgccattctcaggagcctgaatattattcatcccacatttactgagattccacacacaataaaatgaagtatcatgtcttctcaagacagtgtgtgtaacaatggaggggatagacacggacacccatagaagtgctagcatatatagagccctacctggactaacgttgttcaaacagtcttacagtccatcacaacatccaggggaatagaaactgtaaggtgggatttgcagaggacagactgaagtatagacatgtaagtgtctttcccaaaaccttatagattaaatgtagcagagtctgagttcaaattttgtcttgctgggtttcaagatcactatgacatggaaatttgaaacctcaatggaatgttatttaactcaagttgggggggtcaacaaagactcccttagggaattgatgcatacaatgttctaaaaatgagtacacgaggcaatgaaagttggcagaaagaacagtgtgagtggggcgtgagagctgggagctagctgcctaatggcagtaccaggtattggtttagccactgctatgaggccaaggaaagcagaaatgaacctggagcaggaatcagatcacggattcctttgaaagagaaagctggatattgtctatcctagcttgtttcctggacatcagtataaattcatcatcattacttcaccactaccttggttgacattaaacacacatgtcaatccaaaggaagtaagagatagtttattcttagctaatatgattgagtatggcctaggagcatggatccctgctttcccaaatgacacacactgccaccatgtcaatttgtgtataaggtcacataatatcacatatcatatatcaatagtcatatatcaatgtattcaccaaagacattgctgaggacattagatagacaggtaaaggcaaagaataagggaggtagactctgtaagaggcttcaaatactatctcatgatattcttagctctgggcatgagggaagtgaataatctactaattttatacatttcaaatatttttacctgatagttgaaaagatgtttagatcagatatagaataggtgataactggttaataaaaggtatcaaataaatcccctgaaagatgtgattatctatgtgggatactccaactcactagaattacaattcctagccagccagtcaacctcctgtctccaatgtagttgtggtcttttcaggaaacttcagatcacactatcctcacaatacagctacatgttgacaccaccatccatcgagttgccagaccttgagggtcatccttgatgccctccaccgtgttgaatgaatcagcactcaaagagaatatgttctgtactggaatacactttggaagctctagctttccacccagaagccatggaaatctcctgagaagaattcagactttatactattctcagatgttttggcttacatttcagaaaaacagcccaatagcttactatgactggtgagcctctgccctcctccccaagttcttctcaccctatgatccctggtccatttggatctactgtcgtctcctggaaggctttcagttcctccttgcctggaagccatagttcatgcagtaagttccaccagacatgatctgttctagatctttaaaagactttttcatcctttaaattgctacttcaataattttcttggtccccctgccccccattacctctttacaatttgctctccgtgtttaatatgattatttttttcagtgtcctcatgacagttcgtctccatgtctgtctcttctcttagtctattcactcacaaaaggcagtaagtactttgttgcttctgtcctgattcaatcccaagtgactatcccagaatagctactgtcattagaaaagtagttgtcttgtgtcagatgtctaagaacagttccacctactaacaactgaatagctaagacagctaagagactaaatgtgaacaggaaaaccgtgtataagacatggagagtagactttgccttggcaggcatggtgtatgggggcaactttggacagtaactgccagagaaagggcattggaaaatgtaaatgtttgtccaataaattaatattagctaactgacttgtgaagtatgtagataaacattccaataataacagataacgtagtgtccagggaaagaagagaaatagcccacagatgcatgggtcttcaaagtgtgcattttatctccgaagggaaatctcactatgaggcaatgtttcactttttttttcagctgctttgtacttatttactatccaaattgaagccaggatccactttgttatagaagatgaaccctgcctgccatgacattttgataggagagagacagaagcagttcccttggtaatgcatagaggttgattcagtaaagagtaatctaataacaccaaggaaaagtaagaatgtggcctaaagagcagccagagacattttggtccccataggataatgcagtatgggaaaggatgtgtttaaatgcgtatggtggtccaagtagaggagtggctgaggcaatcagacttggtgttctgagggcagcagtcggtcactctactgccacaataacatccttcaagaaaatgctttttatagggtcttcatggatagctgaaagcagtctgtgtgctttgagctatgctgattagcagcaaactttaaggcttcacactcttgtctccttacgccagtactcaaaggaatttagtttctgaatccctagttatcagtcaacaaatatttattgaatacttgctatgtgccagacagtgttaattaaagtttgctctctcttgtcatgttaaaatgctcagcttctgtctttgtttgccttataattatggagaagagactccctttcttagaattttagttttcaattccttatgactttccacagagggagggaattcttagggtccaacttttgagtaagggaccttcattctttagcaactattaaaaggcccagtctaaggaactatgggcagagttgtttaaacagcattctgggtcctttgtaatgaagacttccttcagatggaagaaagatcgctaccatttgctcactgttttcctgatcaaccgttacctcctcaaatgcaatttcttcccctaagcactttacaaagtaggtggattatttcttatcccacatatatgaagatatttaaaatctccagccaaaatgtgtgtaattgcctcttgctgcctcattttgcagacacttttattagtagctcggcttatctcctggagagatgtgctggaaactgttcagaatatttggggcaaatgcaaatctaactatctaagaatgaacaatatataataatgattcttatatttttctttaaaaatgaaatttattcagctacactcatatagcacaagcactaatttcatgtgtgcaaactagatggatgttaggaagtacatatctaattcaaggtcatcataataatcagagcattgcagttttctcaagagtttccatggttccctgtgtaatgggttccctgcctctagttcagaacaaccattgactggcactgagtttctaactttatgcaaattgctatctagagtacaagaaaagagacagctccagttgtgtgacaaagctttccctatgtgacatacaccccagatcccataacacaccagtgtatagatgccaccaaaatctaacatcgtaaactagtgagctttattggggtaacttacagagcatggctaaggggttgcttaacaagagcatatatgtatcaaagatagctgtatcaacaatgcccaccccagcatgggtgccgctcacaaaagctggaaacctggaatacactgcacagcttgaaagcagctcaacaggattggagagtgtcctttccaagtgacttggttggtctaaacctcttccatagagcttatctggtttctgcttcttccaggcagctggtccactctcaagagtcttatttgctgcttgcctctcatccaactgatgggactcttagattttattgtttattcctgcagggatggttctagtgaatctagtcatctttaggaacttcctgaagctatttttgtgttgtttaccttcctgtttaaggagatttctgaaggatggaatttttcagtctcagaggaagctgttacacaacacaagtcttaaatttatgacatgataattaaagatataatcacagaagaaactgaccaacaaggaactgtacacatggatgaaaggtgttcccagaggcctggcattgatgggtagaagcagggctggactaagcatcctgagctctgggtactgtctatacattatttccaattgtgtttttgctttcccacccataaaatgattagtgtcactatatggcctccagaaaccttcctgacatcatagccttcactttgcatctgatggtggattttcttgtgttgaggttcaagttgtgtgaaaatttgtactccaatatctgtctttgctgaaatacatttaaattaaatttttttttccattttttattaggtatttaactcatttacatttccaatgctataccaaaagtcccccatatccacccacccccactcccctgcccacccactccccctttttggccctggtattcccctgtactggggcatataaagtttgcaagtccaatgggcctctctttccagtgatggccgactaggccatcttttgatatatatgcagctagagtcaagagctccggggtactggttagctcataatgttgttccacctatagggttgcagatccctttagctccttggctactttctctagctcctccattgggagccctatgatccatccattagctgactgtgagcatccacttctgtgtttgctgggccccggcatagtctcacaagagacagctacatctgcgtcctttcaataaaatcttgctagtgtatgcaatggtgtcagcgtttggatgctgattatggggtggatccctggctatggcagtctctacatggtccatcctttcatctcagctccaaactccgtctctgtaactccttccatgggtgttttgttcccaaatctaaggaggggcatagtgtccacacttcagtcttcattctccttgagtttcatgtgtttagcaaattatatcttatatcttgggtatcctaggtttggggctaatatccacttatcagtgaatacatattgtgtgagtttctttgtgaatgtgttacctcactcaggatgatgccctccaggtccatccatttggctaggaatttcataaattcattctttttagtagctgagtagtactccattgtgtagatgtaccacattttctgtatccattcctctgttgaggggcatctaggttctttccagcttctggctattataaataaggctgctatgaacatagtggagcatgtgtccttcttacctgttggggcatcttctggatatatgcccaggagaggtattgctggatcctccggtagtactatgtccagttttctgaggaaccgccagactgatttccagagtggttgtacaagcctgcactcccaccaacaatggaggagtgttcctctttctccacatcctcgccagcatctgctgtcacctgaatttttgatcttagccattctgactggtgtgaggtggaatctcaagggttgttttgatttgcatttccctgatggttaaggatgttgaacattttttcaagtgcttctctgccattcggtattcctcaggtgagaattctttgttcagttctgagccccattttttaatggggttatttgattttctgaagtccaccttcttgagttctttatatatgttggatattagtcccctatctgatttaggataggtaaagatcctttcccaatctgttggtggtctttttgtcttattgacggtgtcttttgccttgcagaaactttggagtttcattaggtcccatttgtcgattctcgatcttacagcacaagccattgctgttctgttcaggaatttttcccctgtgcccatatcttcaaggcttttccccactttctcctctataagtttcagtgtctctggttttatgtgaagttccttgatccacttagatttgaccttagtacaaggagataagtatggatcgattcgcattcttctacacgataacaaccagttgtgccagcannnnnnnnnnnnnnnnnnnnnnnnnnnnnnnnnnnnnnnnnnnnnnnnnnnnnnnnnnnnnnnnnnnnnnnnnnnnnnnnnnnnnnnnnnnnnnnnnnnnnnnnnnnnnnnnnnnnnnnnnnnnnnnnnnnnnnnnnnnnnnnnnnnnnnnnnnnnnnnnnnnnnnnnnnnnnnnnnnnnnnnnnnnnnnnnnnnnnnnnnnnnnnnnnnnnnnnnnnnnnnnnnnnnnnnnnnnnnnnnnnnnnnnnnnnnnnnnnnnnnnnnnnnnnnnnnnnnnnnnnnnnnnnnnnnnnnnnnnnnnnnnnnnnnnnnnnnnnnnnnnnnnnnnnnnnnnnnnnnnnnnnnnnnnnnnnnnnnnnnnnnnnnnnnnnnnnnnnnnnnnnnnnnnnnnnnnnnnnnnnnnnnnnnnnnnnnnnnnnnnnnnnnnnnnnnnnnnnnnnnnnnnnnnnnnnnnnnnnnnnnnnnnnnnnnnnnnnnnnnnnnnnnnnnnnnnnnnnnnnnnnnnnnnnnnnnnnnnnnnnnnnnnnnnnnnnnnnnnnnnnnnnnnnnnnnnnnnnnnnnnnnnnnnnnnnnnnnnnnnnnnnnnnnnnnnnnnnnnnnnnnnnnnnnnnnnnnnnnnnnnnnnnnnnnnnnnnnnnnnnnnnnnnnnnnnnnnnnnnnnnnnnnnnnnnnnnnnnnnnnnnnnnnnnnnnnnnnnnnnnnnnnnnnnnnnnnnnnnnnnnnnnnnnnnnnnnnnnnnnnnnnnnnnnnnnnnnnnnnnnnnnnnnnnnnnnnnnnnnnnnnnnnnnnnnnnnnnnnnnnnnnnnnnnnnnnnnnnnnnnnnnnnnnnnnnnnnnnnnnnnnnnnnnnnnnnnnnnnnnnnnnnnnnnnnnnnnnnnnnnnnnnnnnnnnnnnnnnnnnnnnnnnnnnnnnnnnnnnnnnnnnnnnnnnnnnnnnnnnnnnnnnnnnnnnnnnnnnnnnnnnnnnnnnnnnnnnnnnnnnnnnnnnnnnnnnnnnnnnnnnnnnnnnnnnnnnnnnnnnnnnnnnnnnnnnnnnnnnnnnnnnnnnnnnnnnnnnnnnnnnnnnnnnnnnnnnnnnnnnnnnnnnnnnnnnnnnnnnnnnnnnnnnnnnnnnnnnnnnnnnnnnnnnnnnnnnnnnnnnnnnnnnnnnnnnnnnnnnnnnnnnnnnnnnnnnnnnnnnnnnnnnnnnnnnnnnnnnnnnnnnnnnnnnnnnnnnnnnnnnnnnnnnnnnnnnnnnnnnnnnnnnnnnnnnnnnnnnnnnnnnnnnnnnnnnnnnnnnnnnnnnnnnnnnnnnnnnnnnnnnnnnnnnnnnnnnnnnnnnnnnnnnnnnnnnnnnnnnnnnnnnnnnnnnnnnnnnnnnnnnnnnnnnnnnnnnnnnnnnnnnnnnnnnnnnnnnnnnnnnnnnnncctttagtgagtctagctaagggtttatctatcttgttgattttctcaaagaaccaacctcctcgtttggttaattctttgaatagttcttcttgtttccacttggttgatttcaccccctgagtttgattatttcctgccgtctactccctcttgggtgaatttgcttcctttttttctagggcttttagatgtgttgtcaagctgctagtatgtgctgtctcccgtttcttcttggaggcactcagcgctatgagtttccctcttagaaatgctttcattgtgtcccataggtttgggtacgttgtggcttcattttcattaaactctaaaaagtctttaatttctttctttattccttccttgaccaaggtatcattgagaagagtgttattcagtttccacgtgaatgttggctttccattatttatgttgttattgaagatcagtcttaggccatggtggtctgataggatacatgggacaatttcaatatttttgtatctattgaggcctgttttgtgaccaattatatggtcaattttggagaaggtcccgtgaggtgctgagaagaaggtatatccttttgttttaggataaaatgttctgtagatatctgtcaggtccatttgtttcataacttctgttagtttcactgtgtccctgtttagtttctgtttccacgatctgtcctttgaagaaagtggtgtgttgaagtctcccactattattgtgtgaggtgcaatgtatgctttgagctttactaaagtgtctctaatgaatgtggctgcccttgcatttggtgcgtagatattcagaattgagagttcctcttggaggattttacctttgatgagtatgaagtgtccctccttgtctttttttgataactttgggttggaagtcgattttatccgatattaaaatggctactccagcttgtttcttcagtccatttgcttggaaaattgttttccagcctttcactctgaggtagtgtctgtctttttcccctgagatgggtttcctgtaagcagcagaatgttgggtcctgtttgtgtagccagtctgttagtctatgtctttttattggggaattgagtccattgatattaagagatattaaggaaaagtaattgttgctcccttttatttttgttgttagagttggcattctgttcttgtggctgtcttctttttggtttgttgaatgattactttcttggttgttctagggcgtgatttccgtccttgtattgcttcttttctgttattatcctttgaagggctggattcgtggaaagatattgtgtgaacttggttttgtcgtggaatactttggtttctccatctatggtaattgagagtttggccgggtatagtagcctgggctggcatttgtgttctcttagtgtctgtataacatctgtccaggctcttctggctttcatagtctctggtgaaaagtctggtgtaattctgataggccttcctttatatgttacttgacctttctcccttactgcttttaatattctatctttatttagtgcatttgttgttctgattattatgtgtcgggaggaatttcttttctggtccagtctatttggagttctgtatgcttcttgtatgatcatgggcatctctttttttatgtttgggaagttttcttctattattttgttgaagatattagctggccctttaagttgaaaatcttcattctcatcaattcctattatccgtaggtttggtcttctcattgtgtcctggattacctggatgttttgagttaggatccttttgcattttgtattttctttgactgttgtgtcgatgttctctatggaatcttctgcacctgagattctctcttccatttcttgtattctgttgctgatgctcgcatctatggttccagatctctttcctagggtttctatctccagcgttgcctcgctttgggttttctttattgtgtctacttccccttttagttctagtatggttttgttcatttccatcacctgtttggctgtgttttcctgcttttctttaagagcctgtaactctttagcagtgctctcctgtaaatctttaagtgacttatgaaagtccttcttgatgtcctctatcatcatcatgagaaatgtttttaaatctgggtctagattttcggttgtgttggggtgcccaggactaggtggggtgggagtgctgcgttctgatgatggtgagtggtcttgatttctgttagtaggattcttacgtttgcctttcgccatctggtaatctctgaagctagctgttttagttgtcactgttaagagcttgttcttcaggtgactctgttagcctctatgagcagacctggagggtagcactctccttagtttcagtgggcagagtattctctgcaggcaagctctcttcttgcaaggcaggtacccagatatctggtgttcgaaccagactcctggcagaagttgtgttccactcactagaggtcttaggatcacgtgtggaatcctgtgtgggcccttgcgggtgtcaggcgactcagctggcaaggtagccggggctcgagtggagtggaaggggtttgagccccagatcaagcccgggtagcctgcttccctatgtaccgcagtctcaagttccacgcgattggattggggtaggcgctgtgttccactcaccagaggtcttagggtcccgtggggagtcccgtgtgggcccttgcgggtgttgggcaagactctgctgtcaaggtagcccggggctcgagtctcgagtcgagcggaagggacttgtgccccagatcaggcccgggtagcctgcttccctatgtaccgcagtctcaagttccgcgcgattggattggggcaggcactgtgatccactcaccagaggtcttagggtcctgtggggagtcccgtgtggacccttgcgggtgttgggcaagactctgctggcaaggtagcccggggctcgagtctcgagtcgagcggaagggcttaaattaaatttttaatgtgaagtgaggagaccttaaagtgtcctcacagaagtaatccctagagtgtgtcatttcaatgtatttacataatttgaaatcaattgcaggaactacctttggttcagttttgagaaatatgctaattgatgttttccaagccaggaaatagctctaaggtgctctttggactatatcagtggccctcatcctccatgatggtcagagaccctcacccttgcagttagatgtccagatagttacacccttctgcaaagagtgagctaagcaaaaaaacatgagagaagaggcctctacaatggcttcaattacaagaagggcaaaatgccatctccagatatgaatgaagaactggatccttttctaagcatcctacacctccaattttcagagctgtttatttcccttcaataggcagtacttcttgatctttaacaagttagactttttcagtagggctcatgtaaagatgcaaatcttagtctgagttaggacatgtgccaggtagataagctggaccagagaacacacctgcaggggctcagtgcaaggggtgtgtgtgctggtttgtgggggtgggattttgggggcattggtttgttggaagtagagtgtggtgtaagggtgtgaaactgggacaacacaaccactgagtactcgttcaagttcttttatatatccaagaaatctcaacatgcttggggaacaggcctcctgtgacttaagccctgtgtaaattagtgctctgacagtactgcaaatgaaaatacaaatgttaaacagggcaggcaacccagttatccagccttcttgctggaaaatctgttgtccttcaaattaacaagaaaaatgtgaaaaacactcctgccccaagtccttggggatctgtctggctgctgtccatgctctactcgggcctctcaaaggacacggcttcatggtagtgtggcctctgaaaggacacaaactcaaggtagtatggcttggtttcttccacagggacggctggccttagtgttcaacatttaactttgagcatacagaggtgagaacaaagttttgttctgaccttgcctttcaacaagttatttttttttcaactttctcccccatttattagtttgttgatttctaaaagcaatctttgttccatcaatcacacacccagggagacatattatttttatcacctaaggaaggcagatgctgaaacttggagcagatttatgtgttgttggctttatttatctgtagggtatctgaactaaatcagcctgttgggttgactagacaggagggatgtggagagtagacatagcgctgtagtcaggaggctgaggggaggaattacaacttgcaagttatgtggaaaggaagggctagatggcattagcaacggctggaactggtgatctgggatacagatgggatggaaactcattttaaatgaaatggagagttaggagacgaggccagattatgggtgtcctgagccctatgcactcttggtgaatattaaaattgcaattatctgaaataattgagccttaggaatagagagtgggtaaatagaaagaacttggtctttgaaaaagtagtactgagaccaattagtggccactgaagctaaaattagctaaaaataaaaagttgagaattggagaatgggaagaaaaatgtcaccaggaaagagaagcagaagaaaataaccctcccagttcttaaggcaacaagcttttagccttggtggtttgggaaggaaggctgtagggtactgaattctgcagatttgatgagactttggcaagccctgtctcgggtaccatggcttacccctatgggacctatccatgacttagtttgaacctgctggattaaagcacaactaaaaagtaatggcccctcctctatgcgtatcaaattctttaatacttgacatgataattaggatgattgaatccagaacttcccaaattctaggcaaatattctaccactgagcaacatcccagccctggtttctttttaaagagtagtgtactttatgcatgtctatgtatgtctctctcagcaccacaagctatttgagctgttcaacattggtgctatgaacaggactctggttttctgaatgagcagcaaatgctcctaactgctgaggctccagctcgagcctttgatttttggagacaaaaatctccctacgttatccaggctaatttcaaactcaagatctcctgcctctcccgtctgagtgcttagagttgttggcctgtgacccaccttctccccgcctatctttttttgttcacttaaaggcactttattttttttttaaaaagagtttcttaaaggacatcttaaaaacagcaccttttattttatgctctgacttgtcagtcaaattgcccaaatgccaaagtacaccttcatttaaaaaaaatgagattgagctgagagttcagtgcctcttcctggcactagcctggcatgtgccaagccctaggctggagcccttctacctcaaacaaaactgacctgtctgactgaatagttcctgaagcttgaaacatatttcaggagggagctccccatttatctccttcagcgggtgcttctcagttcttcctttccccttcccccttgtccactctccaccactgtagagacctaactgtccatcaccactgtcttttgcactaccttacatgtgaccacagctagtgtgaggagtctgaagccctggttgcaacaggaggaaggctctggagggacagtccctgcctacatggcccctgcagaatgcctcagggggtatcacgtaggctccctcccaaggtctgcttcccactatgctttctcatcagttactccagagcatcttccccacagctgttcctgagcccacatcgcatgaagtgatgctttttttcagccggaaagtgctcattttgaccacgacagcaaaaggatggagacgaatcttcccaagagagttccctctctgttcacatgagatggctttggcttggctcttgtttatatatccctcttgtacaccatgaggacctgacattgcaagagacagaggaaagggcctgtaggaaatttaataggtctagagagaggcataaagttcacaacctggtggtctggacctcaattaaataagagaaggcataaggaaaatgctttaagctataggtatgaaattttcagttagttcttcctaaatctagaaagccaggtcccacttcccatctcatcgccttcctaaaatggactgagaaaatagatctgagagtgaacggccttttctgtgctttgccaactctttaatgaaggatggttgagtgtggaggtgggttcaggctgagctgggggagataagtggagactgcagaaggtagcagaagaagaacagtccctggtagttacacagggtgtctaggatgccaggagacctatagaaatttaaggtgttttatatgggcaagagagccttgtttcctgatacctctgtatgtctggcttgaatgaaaaaataaaactgtacacctgtgcatttgttcttttctcagcgggcaatgccagaggcattggcagccaaatgcatcctcctcaggtggcccaggcctcacagcactgatcctgacattgagtgccagtaaagaaccagagagaaaagacctgcgtctacacaaaaatctgttttgattttttttcaaattgttggtcacatctattgccatatacaactttttaaatgtttacctcatacatacaatagctctattttgctgtatgcatgcatatatagttacatatatttatatgttgggttttcttctttcttttgtgttaaagtagtgtataggggggtagggttcactatttatcccaaaatattctcaaattcatctccttctgcctcatttttccagatgcttaagttataggcatgagccattatatactactcataatatatacaatatatatccacacatatgtatttatttctatgatatgttatctgaatctttacaaatatcacttagatttaacatagtatgttcatttgcaagtctttaaaataattctgctgtccactctggttaagaattaattataaccaagtgagagagaaacagcaggctcactattggatggagtgattactgagtgtggactctaacattgaagctgtttccagtgcaaaggttggggactgggcttcatgggtagaagtcctggacagccgacatctgtgcagacaggcagcaagtataccactgccagtctgtcctgcagattagtgacttaaggataagggctcatgtagtcattcaggctgcaaatattcccaggagggaaaaggaggcataaagaaagtaagttgtgccattccgttagctctgcatgttgttcaacaggaatagcatgcccatatctggacatggcctgtatccacgggctggtattgctgccctcacagagcagaagaaactcatgttccaagtagccatgtcattctgggttaaactgcctctaaatgacagtgcagagagttgaactcagtctttctaaaagggtcttctctttacattcaaccaacaagtggaaagctatttaatttatggtgattaaaaataatttatctttattgacttgtgtgtgtgtgtgtgaatgcatgtatgtgagtgcatatgtgaatgcttgtgtgggtgcaaacacgcatgggtgtgtgcacacacacacaaacacactcacacgcatgcatgcgtgcatacatttcatgaaggtcagtagagggatttgggtttcctgaagttagatcacaggtggttgtgagctacctgacatgaatactgccacgcaaagtctggtcctctataagagcagcaagcactcctgcctgctgagccacctctccagacgctcttgttcattttttaaaaattattagatattttctttatatacatttcaaatgctatcccaaaagttccctataccctccccccgccctgctcccctacctacccactccctcttcttggccctggcattcccctgtactgggacatataaagtttgcaagaccaaggggcctctcttcccagtgatgacaaaagggaaaacgaaagcttgagtacagctcgcctgtattcacctgcaaaactcagcctgagatcctacggaaggcaccataaagggttctagaactaacagaaaaatctgcctccattagtcaggtgggaaggctctggaaggtactgcaattcaggaattttgctttatgaggcaggtgagaggtgttcagacccgagggcacagctgtgtctgacctagtctctctaggcctgtgcctttaattcacatcctttgctaacacaggtagaaatgttctctctgtgaggatgctgttggtgttacagatactgtatcaacaaaggcatgaaagaattatgcaaggaaaacattttcccctgagttctgtctcaaaatcttatgtgtaggggagaaaaaaatctatatgaagaagggatgtaagtaagtagccaaccacacaggtaggagaacgagtttgcacatccgaatgagccaaccacacaggtaggagaacgagtttgcacatgcgaagattgcaagagggcactgggttatttcagccctatgttctctctcagttggttttcttgcctcttaatgttttcagatcagaggtcccaaagctgccagttcctaagatttagctaatgttgagagggtctccctccctctctctttcccctccccctctgcttccctcccccacagcttcagtagttcttcttcctcaccaactgaatgcattcttctgttgctcttggacacaatgagctgctcagtttttgccacatgaaagtgaaattcgcatctacaatttgaagcctagatctactaatcctgctgctgttggtgacactctgcatttttcctccccttatctgcaagtgaacgaggccaccctgcagcagaaaatattttcttagtgaactcgcatccactcccagtcccagtgatgtagcgctccaaaatggagaggtgaggtgactgccaaacatgccttactggaagcaaagcactgttccaataataaatagttcaaactaatgtatcagaattcacagacacaaatgcaaatggggccagggcagtaagagtagcttagaccgtggcgaggatggcacgggtcccgggaaaggcagacagacaaccccagtcagctctggtaatttccaggaagaaacagcagcccagcatgccttcagctgtattttccaacagaagttcacagtttgactttttacatataacctttttatcgttagtcaatgattctgaaaaaaataaaataaaataatcttctggctctcagctgccagtttgcaacttctaatagggagggatagagagaaaatctctactaagatagcactattcggtaggaaatggaaagcccatgtgtagttcagggctttgctcctaacagtgtgctccagagcccagcagcattggtgttggtctctgtcagagtccaggacgtcaggcctcaccctatctttcttgcatcatagaacatgaatttgtcaagagctctaagtgatcggcctggggttataatgataatggttgattcctgcatgaaggtagtgtaggagcatgccttatgtcccagaacaatgcctaccctgtcctcactctactgtggtccatctcttgcctccctcatttaccctctccctgttctcattagttgtagtcagtgaatgtggagctgtggtcttgcagcaaccaaagggcagggcttgggtaattgctgatgctctcactccagatgcctctggtttcctgggcctgtagtgcctgtctcttctttagtcaccaccttgcttatttgtctttagttgtggctgttcatattcatttgttttgttttgttttgcctatcctttgcccatcatgactggagttagagatcccagtctgggatgattctctggctcagatggtgcaatttttaaggatcctccatcctcttagctctcacaaacacctgtctagtctagtaaaatagttactttattacttaatcaatagccatgataggaaaatggtatgtccatattcatcatacatttttttcagctattcttcatcccttattggttgcatatacaaatacagaaaccagagatatagaggaacaattttgtgtgtgtgtgtgtgtgtgtgtgtgtgtgtgtgaatgtgtgtgtgtttcccttagatgtattgacatttgagtccaaaagtagaaatgtaatttctcttttgaaaatagctcaaggtaacacttctgtcaaaactagccaagttgctatggactgtgatggctttgtattcagtatgatagaaaacaacctatttgtttgggtgtagacctcacattttgaagacctatttaattgaagatagcccctttgaaaataatatctctagaaaacgtgtcaattttcctccctctagctttactatgacaacgggagatggggtgggggtgggggattcttgtgcttttacttcttggtttagcagcgtgagatttctatatttataatggccttgtcgctccagggcactgtcactgctgcctcagtctccatatttatcagcctttgattaggtgaaaaactactaagtatctatgtgttagtgtgcctgagttctcctcaaagcccaaaagagtcttgtcgataaatgtgacagaaagatcactagacttcatgatcaagatcattcaagatcattaggaaaagctgtgtggctcccagtcttggggaactatcctaatctgcttctattgctatgataaacaccatgaccgaaagcaaagaggagaagttttacttcatcttaaaacttacagtctgtcatggagggaaaccactggagcaggaactgaaggaaggaagctggagctagggactaaaacagagaccacagaggaacactgatttaacagcttactctcatacttgctcactttgctttgttataaatcccagtatcacctatcaagggatggcagcacccacagtgggttgagccctctcacattaaccattaatcaaaataatgccccacagacttgaatacaggtcgttgtgatggaggtattttctcagttggggttcccttttccataggaagctagcttgtctaatcgtcaactaacagaaacaagcaaaagagcaaccatctcatggcgtcaaacacgttgcctcgtgagtgttacctccatctcctggggagacaggtgttcagcacagaggaagataacttcttcatctatcctcgttgtactttcagactgagcacctgggaaggctatcatgaggttagaaaaaggaatggtggttaacaaagcctgtgtttggttttcagtctaatgaagttttctgtttattttgctttaataaacaactaaaacctagaaaatattatcaatgacagaattttctgtattcagaaaatttcttgttcccttcttttattttccttcagacttttataaaaatataaactttcagagttttaagacacattgaaagtcatttatgccacctcctgattttgcttcccccaatataaccatacctccctttagaataggccactttgtaaaacagttaagggctacttcagttcatctatggaaggaagctattacctcttatgtttacttcaatctaatctgactttcttgaacttttattgtgtgactgactgaactaactaagctccttgtcactccatggcaagcctgcttttgtcccctttgctgttgtccttgctcattttatttaggaagagtcaagacttgagatggtagtgttaggagccatgctcattttgatagatatttgccacaagattgccccctacactcaagagccaatatacagtcaattaaaagagtcatctctttccagttaggttttggcaacttcagagtgtgagcgtagacacaaacacatacgtccttgtagaaaacaactacccatgatgtctcttggcacattccaaaacaaagccccctttcttggagagacaaagctaagtacacttttgtgcattccagaaaaagtggcaactgaaaacacaaaaataagggcttggaaaattcaattggggttcctgatcaaacacacagaaaggaggattattgtagtgtttgttatatgacaagaacatcgagaagagatgaatagctgcctatggtagaaaaccaagtaccagtctgtcatttctgttatcccatcattgtccattgtctttcttccatttttgtgcacctggacacctagggttgggcaaataaatattgggctccaaatttaaaatatattttatgtaaacagttttttaccttttctctgaaaactttgggttctttgtttattaagttttagggttttttttttccaaagaaaagatatcaacattttcttcagttgtaccttaaagatcaggtcaggtttggcaaataacaagcctctttgttcttccaaacaaaggagccattatataatcaaatcaactatgagcctatttattcttggccttcatctgcagacagttcatgcaaacccactgtgcattatgcctgaatccaaaggctcctcaactcagaccagatgaaggcttgtaaaatatttcacctcagtgcctaatagtataaaaccattgtcaaaatggagtttggggagtagtgggcaggcagtaaaggagtaaggataagttatgtctattgtctgctgttgtatagcccatagtacatacatgaactggtgacatgtcaaaacatgccctcactgatcagttagtattggtttcatgtaagtcggacactagacttatgatgtcaggaccatttgagagtaactctagatagatcttgtttaagagatacttgggtacttggactgataggcatagagaatcaggactagtgatgggacagatcagggaatataaatcagataaatcagggaatcgtttctatatgaaagtaggtgttttatacgctgttgtcctttaaagcaccacggcaatttcttttacatttgattagtggataagttttgttataacagcaaagcctctgagacatctgtccactgtaaagagtaaattgaattattacaaaagaatttcagcccacactgtcaaaggaatttcaaataacaggttgtgctacacataccacaagcaaaacaggctgtttgaagctttccagtctagatttaaaagcttcccaaagtacactgacatggttgaaaatgagtcagggcaaagaagtaatgtttgattttcatctttcacaagataaattgttcattctgtcttgtcagtaataatgacaacatattttaaggccatcaatcaaacagcaaccaatgtcacattttaatttgaactaaatatgttttaaacatctacattatttatcagctgactgcttgctgggatattgatctgattgggggaaaaccagagggttgcgttttcttgtcatttatattctgttgcgaccagcagttgttttcagggttccaaatggtacagctggaagagataaatatgctttagagaatatgaaacgagatggaaactttcctatgagtgatatattaggcaaattatattcaaatcacagacttttcccctttgctgtaaaagacttcagggattggcagggatgccagttcaggtaaatttaggaagaataaaaatcatatccctggttctgctgccagacaacttcagtgtggcttcagctaaggcagtgacttgaccagatcttgatctccatagttctgcaagagtggattctgggtcaaattgataggctatttcctacaacactcaatccaaacaaccgtggttccaaagagtgttttagtttcacactaaagatgaaagatggcagggaacaggaagaggggataggcaacatttgtatatcttgtgggaggtcccttacttgggccaggggaatagtggaccacaattctctccccttccagaagaatggaagcagctgaggtgatggtcacacacatgctttcaaaggtggaatgtcacggggatggtcagaggttcactctcagcctcttttctttgtttgccaggatgaattttgcagtttcctttttaaacatattttaaaattattagtattatgtatgtgttcatgtgtgtgtgtgtgtatgtgaagtatatatgtgaggacatacatgctgtgacacatgtagaaattagacacaagtgtatgtaaaactacatagacttggttcttttctcccacttttattgggttctggggactgaattcatgtcaccaggactgtgaggcaagcaccttacccctgagtcatcttgctgactccctccccttggggtcttagaatgctccccattgtgtggttcatcagaggatatgtgcctagttacatgtgcatgtatatgtatctcacgcatgatactcacatacatgcacacatacttcacatcagataatctaaattgatgcaactggactcagagcagaaaaaccacctacattattatgttaattagaatatacctgttccttcagtaaacagagaaacttattccggggtttttacaatatttaaaatgagaatcttgagcagtcagtcacttgggcacttcctacaaacttcttcgaagcatgccatgagcagcatcagatgttccctaatgcaagaatcagcttctcatctattattattattattactattactattattatatgagaactatatatcctaacttagagtgtcttacttaatgtggcctggggccagcatcaataccaccacagggaccatatcagaaatgcagaatcttgaaccccaccatagccctctggttccgtatgtttggcttacacattgaagcacaagatgcgacgatttagaaaagttgtgctgaaccctgaccacatcttaaaacaatggacaaattttcaccgcatgatcctggaacccacctacagaaagtctgtcttactttgtctgagatatagccagtatcatagccttcaaatgattcgtagtcagcactgtagcctttctatgactccaatatgcagcaaaatttatggcccaataaattaggcaatctgttagggaccttcagtgacctaaaactttgtccacagcacatgcattacttcacttgtggcagccatttgtcctttctttgttgtgactctattcttgtttctctcgtaatcatgtctgatcctgggcagcctaatgctttcttcctcctgactgtgacttcccttctcaggatatgtgaccctttaaggagtgtgactagacttgcactttctttcagcattgttcaagcttattctccatcatcgacactgagtggtggatgggctctgggctggacacagctctttttcacattttaatggccagtactctgctaagcagtggatgtggtaagcataaaatcaggatgcttggtcaggttctgccctacgtgtggtttattttttggccagattctttttctcttctacattcaatattgcaattatgcttgtcctgcattcatgttagggtttgtgttatactctttcatgaaccttaaggcacttcatggaagggagtcttgatcgtggaaaggcaactgtgcagttttctgtagcagaagcaacaaccacaaaaacacaaggatgaagcttctggaggatgccagaaaggaaactgatggagggagacctaaggagaatggatacagctttcttcccgtggtctcaaggtcaaagactgggatcccatccgggattaaacaaaaacgtgtcttatcacaacttgctgtcttcaggcttttctactcttgaaacatcattgttgatagtggtaggactataggaagctaagtgtgaactggcaggaaggaaatcatggaagacaactgaagtcagtaaccatcttatgaaccatatttaatcctaaagcagataagatgttctacaatcgaaacaaaagatatagtgatggactttgcaaatgtggaaactaaggcaggtattttaaactgtcttcttagtacaaatagtaaaaataaaaaatgctttaaaatctactttatattgttagttttacctgaatcatgatggctgcccaactgagtgttctctctcctcaccccctcttgtctgtctgtctgtcacacacacacacacacacacacacacacacagagagagagagagaggtttcagtgaaattacagcattgtggtgatatactcccccaaaagccataagttatctaacgaaacccccaatagcaagcatgagaaccttcctttgcattattgtctagaggagtccaagagaatcccagacaatataggacattgctctgataggagcttgtgccttctaggtatgacagggaagagaggctgtacccacaaatctcaacaacatggccaactaaacaaaacatgaacacttctaacagcagctgacatcccaacatagatggggggtaggggtgacacatatccctacccttagataaagtgttataagtagttaactgctgagagaaggaaattagtttttcctaggaatgagtcttcttattggttatccaataccaaatagttagccctaacccataaacatgctggcaatactaaatgaacccagcaggttttattaatatggttattcatttagacttatctatagcaataatgattaaagatgaggcatgggcttggagagcatggagggttagcagtagaagaaaatatgatgtaattatattttaattaaagaaaaataataaagagaatttgagaatttgtagtggaagtcaacacaggacaagcctatctggtgtcccagtagtgagtggcagatagtgatcgttctatgattaccgatggttgggttttgtttatttgtccatgatagtttcttttgttttggttatttgttgttgttttgttttgctttgtttgtttgtttttctatgtcaaatagagactgccttgaaaagaaaagggtttacagttcagaaaagccatccgaagttgggcagcccacatagcccaggagccctgggaacaataatccttacctggatacaccatttaggttcatagtatggcagctgctgctcacagcttgcccagagtcctcaaagatacccgcttctctgttaacctgaactgtatttctcacagacacagtactttcttttcagttttcctgcttcagatgacatctcccttcctcagggtagacatcatgtgttggactagttgtatatttttttcccagaactcagcagagacttttatactagtaaatgcttactctctccatgggatataagaaacagagatgaaaggaagggattgtgagtttgacactcataagagccacgtggccctacagacactcaacgccatcatctatacaactcattgtatatacagatactataatcctgccatccagtgtccactgtgccatcttaagctcctaatcagatgaagcagaactgccatttttaaacctttctttgtgagtcccagtaagacatgcgcatcttcagagcttcttactcatttgaaatcaattccagtcccaccccagccctctgtctggagaaagatttgagttccctcctagccagatgcctgagagctatttgtgtcatttccatgtttccaggttctttcccacccactatgatctaactttacactctaatggccctacatcaattggtcctcttgacaccgttcagctcctctgaccttattaaaacatctcccttgtactcctgtgacacatacatctctgttgacagattcctggcctctctgttttcttcatcctcctttaacttccttcaagtaacccaagccttggtcataggccttcttctaatgtgtgtactttctatatttttatctatagccaaggttatactaatgcaccttaaatatttgatctaacatctgagtcttaagcaaacttctcattgatctatttcagacacccagcagtctgtctcactaccccagacccaacatttttaaaactgaactgtgtaagctagagatccctcagctttctccaggactcagagttgggcctgtgggccatctttatttctctgtagagctcttagccacaatgtgaatgaaatgagttaatgaactgttacacctaaagtgtagtctccttgagagcaggcataatctactgataattatttgttgaacgaagaaatttagtttccaaattatgaattcctgggtgacaaagtgaatgaaattggctaagtgacccaatcctatgcaacataggactactagattcatgaattctctggtggggccttagaaaggaaaatatactctggtaaaaacaaagggtaaggctgaaacctctacagcacacagacaaatacataggaaaaggtgtttactcaaagggaaacatttaggcacagaattcagaaaggcatgggctgaagacacagcttagggcttatgagtgggtgctcctcttccagacaacctgagtttggtttccaacacccacattaaatgactcacaactgtaactccagatccatggtgcccaacagcttctctgagactcagtaggtccctgtgctcatgtgcacatatgcaaatcaaacacacacacaattatacataaatctttaataaaaatttcaaaaatttcaggtgtaccttgattctggggtgtgtgaaccctagctttcctcactagcaagtgaattccacatagttccctacttcttgtgctcaggtaaccatgtgatctttaggggattaatgcaaataatccacacttcccttccttagccattacaaattcaatgcaaaaatctgcctttctttgtgttatagacacagcttggtgatggttattttctaataaaacgcaaaagagagaatttttttttaagataccaagatgaaaaggacgtgttttgaaattatccaagcaactgaatgttctggaactttttgttttgaaaccttctctcagcatgcctttaggtatacaagttagagactatgagacaagctgaagaaatttcaaatcagtaaatgcttcatgaacacccaggaaagtgagaacattgagcaattccccaaattctcttgcccagtgcccttcactcaagtgaatgacatactgccttttgtttctctactgagtgtcatagattcacagccactatccaaaggatagcactaagttggcatcacacctcttgtggaaactaaagttgaaatcagtgttatcaacagccgtgtgtctgatggggcagctcctgccactgtccaccactcacctcaggggtcactaattttagtgatccctgggcacctctgtctcaggttggccattctgagccacctgaaaggcgttctgtgaagggtcagcgggaattctgtggaaatatgtggctgccaataaattaactttttagcctttgagttaacacattcacaactaattgtcttattaatagtgcagcagtgacaataatgtgctgacatacaaatagcaaagcaagaataacttattacagttagtagtgatagtgaccattgttgggtcagtaagagtgaaaatgggcaaactgcgtacatactgtgctgggatcagtttttggagattttctttttcaattgttttaatcaattaattatgttaattcatggaagtaactgattttaattactttatgtccagtagttcagctggagtaaatttgtaatttacattgttaaagcaaatgtgtgtatatgcccccacccacacacagatttcagaagtgttccaaagccattgaaaagctgtgctgttagcgcctgtccacccagattcaactcgctgtgtgactatttaacctctgtgactcttgattgtctcattcgtgaaggggataattacaataccttcctcagagaaccatgaggattaaatacacaatgactgcctattgtctgtaacagaactcgttaatgttcattattgtttgtttctactatggttattatattaaaagaatcggggaaatccaggaaagcaaaagaaaagttcacatttaattccttttatgtaactgctattaacagtcataatggatcctatgctgttctagtttgctttctattgctgtgagatagaccatgaccaaaaggcaactttgggaggtttggggctggaacgggatgctagaggtgaatgttccggtgtgggatggtcagggagtggggtgtgggtgtttccgtcttactggggatgggaggaaaggaagaaaaggcagacagatggatacagggatagaaagctgggatcagagggtctgggctttcagatagagaaactgcaaccccccgaagcccagcatggaccagggaagtagtgttcaggttgtaaacacccagtacaattatggtgggcattgtctacacacactatcaatacccacagccagacgcacccctctacccaaggaaggcttcatcacttcattctaagtcttatctgtgaaaggctttgccattcccatggggctgtacctatagcaacaacacacatcatacacttcatgtgttcaacaacctcctactctcagggcttcctcccctcctcaccaataacaatagcagatcgcacctgagacgatgagcatccagcactctgtgcttgaggctagccacctcaacatttgggcaagtcccagacgagctatctcttgctggagagatggccagcagttactcagtccacaaggttggggcctcagtattcccagtctggagctagaaacctgggtcgttcctgaagagccactggtccctcgtccaagatgaaagcttgaaagtgcacgttctgttgtcagggaaggcacaagcagtgctggcagccgtggggtggatcccttcaatggcaggaaggaagggagccatggcaacagaggatgctcttcctttcgatgttccctttctgatgagggtgtgagctgctctacgccaatcaaggcaattcctcaggagaggtcccctatcaaggggattttaatctgtggcaagttgacataagaactaatcatggtagaagaaacgggcttatgtggctcatatgtccatgtcatatttcattagtgaggggagtcggagcaggagcagggaggcaggaattgacaaggaaaccctaaaggaatggtgttcactgacttgctttccatggcctgctcagtttgctttcttatattacccagaaccacatgacctctaatagtaggctgggatccccacatcaattagtaatcaagaaaattctcccacagacttgcttctaagccaagatgatggaaacatttctcaattgaactatctttttctcagatgagcctgactgtgttataacctagccaggacatattcttgcaggttttctgcttgaactcatgcctacattcactcaacttcacaatttttaaatgtattatttattaaattttaataatatattttccatacccaacatattcttgtatataattttgtctttaatagttgttttaatgattagctatatacaactgtacttttcttttaatttttgctataattaatacttgtgatctgaaacagaccaaatgcatatgtttcagaacagatttgattaatttactgatgttagtccttaggaaattttgatgaaatacaggctaccttaacattagtagttttaaagtgacttgccaggtgcatataaggacatcagttttgtttatagcaaatgtacaaacatggctcttagctttctcttggcttcattaagcttaggcagcaggtatgtgtgtagttttcttttctcaaattaatcacttgttaaaagtatacaataagttcatttcaacgcttattttctgtttcctataaattaaccagtaaatataaaagttagggatatgatcatagtttatactatttatcatggttctgtagcctgcttgtgctcagtgtctgaagtatagttcaaacaaggaaagacctttgtgaagctgggatgtgaaaaaggcccaaaaggaagaatattgaagaccattctgttatccaggttagaagtgtccagaatgtcataaggctgacagtacttgcagattccacccaacggaatgatgtggaccacagatattatttacatttctgattgttttcacttttgttcatcctgctaacctatatattcattgagggcacaggccttggttcattaattcttagtagagatcctgatgtagtaggagttcaacaaaatacatatgttgaacaacagtagcagcaacaacaaataagttgaatgcagcttccctggatctggagaacatttcatagttggccccctggggaagttgcctagaacaaggcccttggacttacctctttacagctcctatggtcatgtgctactggcacaaatatactaatattgaagacattcaatctggttaagattcaattcctaccctggaatccatactctgcaaagccatgtttagtgtcttagctctagcaccctgtggatccactcagtagtttaatccagaggatgctgttagcctcaagtttctagtgatgctctattattgactcttggacagtctagagcagtgtttctcaacttgtgggttgtaacacctttgggagttaaacagccctttcacaggggttcataacaaatactctgcatatcagatgtacacattataattcctaacagtagcaaaattacagttatgaagtagcaacaaaaataattttatggttggggatcaccacaacatgagggactcttaaagagttgagaatcactgctttagagcgattatttgatggcttgtctcagggtccattgcatgagatggcttatcagtatagtggaaaacattaaagccattcttccagtaacacgttatggtggctaaaatcaccagtgttggaaccaggctgtctcatctcaagcctaagcgtcctgcttaatttgccatgttaagcagctctccgcttcacactgtggccgcttttctcaggtgtaaatagatagtgtcaaccttacaggatcgactgcggatgaagttaattaaagcatgtgaagaggcagaaactgtaaataaatgtttcccatctccactttcgtgagaaatagtaagcagctccctgagagtgtcaagagcatcggacaccagtcatcttccaaagtctccatgggccactgttatcctagctgatgaacaatgtactgagggttagacaggtttaataataccttgaaagcatatatatatacatacatatatatatgtatatatacacacatatatacccattatatatacattctctctatatatttgagctctgtttgaaatgttccctgaatgagttagttctcctaagagaatgaaaagtgtctgtacgactgttgagatccttacatcctaatagctgacttttagccatttttcagccatactcactgcctcagcacgttttaaacactaaactgcaagtgcatgtgagagtttcaatatatatctgggatggtctgcagtttctaaagactattactgattttagattatactggtttgtaggcatgatttgctgtggtacatttgataatctttttatcagttaatttatttattcagtttacatcccaatatcaccccctctcctcccagtaccctctcacatagctccttccacatcccctacttctcctctgagaagggggagccccctgggtgtcctgtgtagttgtcacattgccccccccatccttcccctcctcactccagcacatcaattcactgtaggactaggcacatcctcccctaatgatgccagacaaggtggcacacctaggggaatgggatccacaggcaagcaacagattcagggacatccccctttcagtttttgggggatccacatgaagaccaaactgtacttttactatatatatgtgcaggggtcctaggtccagcccacactcattctttagctggtggttcagtctttgggagaccccaaggatccagtttaattgactcttgttttttctgtggaatctctgtcctcttcaggtcactcagttcttcccccaactcttccacaagattccctgagctcgatctagtgtttgactattggcctttgtgtctgtttccattggctactgggtggagcctctcagagaacagctatgctaggtacctgtctgcaagcataacactatcattaatagtgtcaggaattggttcttgcccatggagtggatctcaattttggccagactttggttggtcattccctccatctctgttctatacgtatcccagcacatcttgttggcaggaaacattttgggtggaaagttttgtgggtaggttgctgtctttatccctcctctgggagttctgcctggctacaggaagtgccaacttcaggatttatttccctcaatgctaggagtctcagcaagagtcaccctcatagcactctggggcctcttcctctcctgcccccttcccaaaactttgggatgctgtagagatgccctcaaccacccacctctgatttctgttctcccttccctgctctccctacacttggcacccctggtccactccccctctcctctgccacccagtttcctccctccatccactttaaatgtcatcctgagtgaggtaacccagacccaaaaggatatgcatggtacatagccacttacaagtggatattagctataaagtataggataaccacactaaaatccacagaaccaagaagccaaataacaaggagggcccaagggaggctggttgaatctttctcagaaagggaagtaaaatagatatggcttgacaatttttttatacatcctttaagcttacctcactttcaatagcatatgctagcaaatgctctgttaaccattggctaggtgaatggattgatattcagtgaaaatattgttcaaagctgagagatcaatagtagccatgaggatggtgatagtttatgcatgatacatatccagaaggcacaggagaatgttctctgagacagcatgggtttacacaggatccagctcgatgtctaaaggccttccgtttctcttttacaggttaattatgtacggctttgtgaaagccatggtgcatgctggccagctgaagagcggagacttccacttcactgactgtttattttttggttcactgatgtctgctacagatccaggtaactgttcaaataatgcatttcttttttttttttgaagagtcaaacatttaaattgatggtttctccacaggccgtcatttttgtctccttggtaataattcttcattcctcatcataggctgttgacacatctgtaagtgaattaaataagtcaagaaaggaaaaggaaaagaaataggcaatatcagacagctcccgagaaattggtcagaaaggagtctccacggtggaagggacttgtttaaagccattattgcttctctcgaatctagaaccatctgagctgttgtccttaagtttgtctctattgaacacttcttctttcaaaaattaattgttcaattaattagtttaaacattttttaaacattgtttactatggaactcttaaagttcatcaaagatagggaccagagaaaagaggactgccatctagcttttagtggccccaaatgagcacatgtctcccacctgttccagtttattatgactgtattgcattaaagtgaatttcaagtaccatatttggtacgtaagtactctgaaagtgactgccattatagaactgacaactgttcgccgtcatgacttaaaaaatctgaaagctccagccactgtttaaatatccttagttgacttgttcttgccattactggtttgttagtagtctatagaaatcatatccaaagacgacacataataccctgctccatctcctgagctatgtttatacttacgatctcctccatctgctatgctgtttgttgttcagagaatcagcaatagtgtcgcaagtaaactgaacatgggtccttaacatgtccctgtgtgcccagtgtttcttatggttaaagctagaggcttaatcagaatcggggtcaaattttttagcatgattctttacaaatgatgctgggaatatcccatcagaaggcaagtggtgactggcaattctgctgtcaacttagccatcatacccaggaattggtattctagcaatgtacctgagggtaaacgcaatgggtttcttatgcgatacagtgaaagagaatgctcactgggggtggggtggaggtgcttgctagcttcatgtcaacttgacataagttggagtcattagagaagaaacagcctcaattgaggaaaaaaaaaaagtcaagccataagacattttcttaattactgatggatgggagaaggcccaacacattgttggtggggggctgctcctaggctggtagtcctgggttctataagaaaacagaccaagaaagccacaaggaacttggcagtaaggagtactcctccatggcctgtttgagttccttccctgacgtcctttgatgatgaacagtgatgtggaaacaggagctaaacgaattcttttcctcctcaagttgctttgctcctagtcttttaccagagcagtagcagccctaagacagcagggagcaatgggttgtctcagagggtgtgataagggacaggcttatgatgggacatgagtttccatttgtgatatttagagaaggtttaaggggtaaggacataagtctggattagatatgtcaggaagtaaaagtaattccatataatccactcggtatcttatcttaaagggaaaaaccagactaagcttaatctataattgataaagaagccatttccctcttcttggttagaataggggatgttggaatttggcttggataattctcattgtgtttagagatgatgatgtagctgtcttgcttttgttgcaaccagcctggttacagagttaccttgcctgaggttgttctgtggaactgttcaacgggggtcgggagcagccaacacctcctgaccagtcatgctgacattaaatgggttatagctgcatattgtcaggctcaacctcagacctcagaatctaacttagctaattcataggcacagacagtttgacaagctctattgcagttccctgttgacattggctgctcccattgatggttactatttaatacagtatagtttcccagttcaactgcacagtgtaatagcaacaaacaagagccaagcaagacaaatgattgataatttcctctaacttcttaaataatgtgttgttttcatgccatcctctacacattgtcaccagggcaggtttttaaaatacatctttctgaatgcgtggattttaacataattgctatgtttcaatctatgctggctagtctttttttatgattaaaacactccttttattttttaaacaaggaagttcttcatgtttctcctgtatccttttgaaatgaccctagtgacctttgataaactttttgcatttgagtcgacctaatattccagccttatcatctatgacttctgtccctcaatttaaatattagccacctctccaagaagtcaatttgtttaaggacaaagtttgctactaagtgttttcattaccattatataggtcactctttttagaccatctgtgtttaggcagttatatcataaattcattaaagccataccataaattgattaaaattataccataaattcattttaatatattctgctcagttttaggattatagaaattttattatgatgccttgaattttaatgtacacttgcagtttttctgcctcttttttcctcctgctgaattaatagaatttttacttgcttcaatcatacattctcaaaattatctcacagacattattgctagaaatataacaactgaaaatggcttaagatttcatgtggttattttttgcctttgagtataccccacttgggatgcagttaaaagtttttctgtttttaaaatcactggaaaggattccaatgtgtggttaagcctcaagttcatcacaatcaagtgcgtccaattcgctgtgcttttttgctttgtttttattttaaaattggattaaatatctccaggattcaaaagaaaaaatacatattgggttgggggtagagagcctagctgctgtccctgtctgctctgccctaacttttgagacattttggtagttgttgggttaaatttctattcttaaattgaggctcacatgcaaacataaccaccctccactatgcactgttctgctggctctgtgttttagttttgtctaattaacagcacgttttagacattggcagcatctgaagatttctcttgctcccttttataactacagaaaaggccactctttagccaatctgctatcaatgggcatttgaaggtgttttcttgtgctttaaattagtaatcctgtagcgattagcagctcttttgtttcagctgttttgtttttttcaagacagggtttctctgtgcagttctggctgtcctggaactcactctgtagaccaggctggcctcaaactcagaaatccgcctgcctctgcctcctatgtgctgggattaaaggcgtgtgccaccatgcctggcgcaattagcagctcttaaattaacagcttttcatgtgtttccagtgtgtccttgatattgatttctagaaatagatattcctagatactaaaattctcccctgaacagtgtaccagtttgagttcagcttcggatctgtggaggtttattttcctcaaagatacgtcaaggcaaacttaggattctccataggtgaggggatttacatcttcctgtggtctgcgcaagcatctctcttactatgagtaaaactggaatatttatgttaaggggatacaagaagggtctcccctgcccctaacctctggtttggagcccatggtgtagatgagagaatcagagatccatgtgatgtaaagagtgctccacccctgggtgaggggtaacttggctattccaatactgctgggagatttatattgtgtttttcagaatgattccacactccatcacatgcccctggggaatgcagaggtggcttggcaactgctagaagcattttgagccagttagggctatacccttcagctaaatatgcatatactgcctttcagtggtgggtcaaatttcaggtcacctttacttatatgtgtatgtcagaaagcacctcctccattgtatctcaattctgagtttattgctacagcctgagtgtgctgaattctgacagactcaagcgtgtccaagtgtggccaaatttgttccttctttactggtgatattcccaaggttatgttttcacaacacagaaaactggctaaaatgggtttggggggttccagcctaataaatggttatttacctgccttgtgtcaagtggctaagtggatgagtcctttaaaatagaacattggcttgcagccaggaggagaacccagggcatgagtccacctctgtgtctggcatgcacagctctgcgactttgtgtagccgcttcagttccttagatttcacaggttcctgcaggtggaagagatgcaatcttctgccttcccgcctcagatggagacactgcttcttcatctgtaaaacggaaagttatgactttggctctcacgctcttccagctctgacggcggcgtgggattcttatttctgtgagatttcttttaaaataaactttagttttaaagaatctagaaaatcaacccaagaccagctgaccggagagtttgaggttctagccccagtcagcaaatgctgccatgatttctgatagcagaagcctgtagcatataagcaggagccctgggttcccctcctttactgagaactaattgttatattaaaacacattgaacctactctctgctaaattggtgtaatttaaggtcttcaataaccttaaaacacgtagttaatcttaccccacaattaatcatttattccctaaattctcatgactcactaatttatgaaagagaatctgtgttctctgggcttggggtttcttggccttctttaaatgaatcctttccctgttagctgtatccaagccaggggtcattacctacccatatgtatctgttagagaaacgtgttcagactttacagcttccagccattgcagactatctccagctagcttggtttgccccggctagtgaatctcctagtttagctaggaggatttgaccataatttgattaatttcatgtcaccaatgagacacttgctgctactgagacagtgagggtataactaggatcagaccctgagacagtgcaggcaggacagacaggtccaagagtatctgttaaatccctgagtcagctttccttcaggtaaattcagaataaatgaatcaaaaagatgggcaaagacatagaaatttaaattcagtagcaaaaggccccagtgtgggagcttgccttaataatgccattttcaggcctgcaggtagtgaagcccataaggaaaccttctgctagtctctcttcctggctcatccttcattgacttgggacactttggtaaatttggaattcccaagataatgattttgactacaaagacctaaataccgttacaggcaagtaggtaagatacaggaggggtctttaaggactgtgaagagacatggagcccccagtggagccacgtgccttgaatatggctgttcctgtggttatctcatttgtgctgttactcttcccactctaccctcttcaaggtctctgctcgagtgtcccctctgaggcagtgttaactgtgcccggcctctcaccctaatcaactccagatgctgttacttcaatccacttctgtcaacagcacttaccactaacaatcagctcagtcattttgattgatctacttattttggcctgctgcctaagtacgagggcttcttacctgtcttttaaagctaatacatctagtgtcatgggctttaataaattaatggatatgtttgtagaagaaactgtaagagccaagtctggagcattgaaaggaatctgagtttgaacatacaggtcactgtcagtcattaaatgtctcatggccctgcaagagtcagggacatgaagtacagatcaaactcaaggtagagctcctttctccctgttcaccagataggttagtactttcctgagaacaccacgccatggtttatagacttgtagaaaatgtcatagtgatataggtactttaggctggatgttattcaaagtaatagcttcctttaggaaaaggaaggactccacacattacaccatgtattaaatacttgtccaaagaattctagaaactcttcccggcttttgacaagtccgatcattcctgcaaggttcatagaaagctgctcattcgagcacgtgtgagctgtgcatttttgcacgccatcaatttctctatttcctttttggattcaaatgtcttcattttataggctgcagctgtactaagattcaaatacagctgcagcactttgagctccagaagttttagttcaggactcaaagcgggaggataagtgacttcataggcttgcctggttctcccaggagaaacactttaggctgtcttggatttgagtcaaattagctaaggtggggtctacagtcttgtttgctatacacatgactactgagcacttagaatgtgacacgcacagtcaatatgatctacaagcatgaatatgccctctgttccaaagacttaacacaataaagcatctcattagtaatttttaaaataacaataaagttgtttctatggtgctgaagaatgaccccagggccttaagcgtgctagacaggtgttatgcccatgaacatacccatgggacatagttttaaacattaattacacgtttaaatattactcatttaatattcagttgaccaaatatgctattaaaattaattttatctgtttatctttacttatttttaaaatatgaccaccaaaaaaaatggaaaattatgtgtgtggcttctattactctattgcttcaatagagcaatgtcaaaggggaatgttgtaagacaaatatatgatccttaataaaaatagcacaacaatttaaaattaagtaaaagaataggcatgcttatagggtgcactggtttgaataagaatggcctccataggctcatatatttgtatgcttggtcattagggagtaggtctacttgaaagagattaggaggtgtggccttgatggggcaggtgtggccttgtaggaggaagtgtgtcactgggggtgggcttttgtgtttaaaaggtcaagacccaatagctttctctcttcctgctgcttgggaatctggatgtagaagtcttaagctacttctccagtaccatgtctgcctgtgtggtgccatgcttcctgcaattaggatgctggactaaacctctgaatgtaagccagcctcagttaagagttgttatggtcatggtgtctcttcactgcaaacacacacacacacacacacacacacacacacacacacacatacacacacacaaaccaaagccattgactaagacactgggcacttggtggattgattatggaattggctgaaatacagatgatttacattttataaaattgaactagtatgtctggattttctttccagaattccttttccagtctcctttttttcccactggagttacacccatgcttcagaagcaaaacaaagagaaaagagttgatttaaacaccatagttgtgccttctaacccggaaacatttcagcctctgacctggggaaaggcggcttcaataatccccagcccaagggtctcaactgatcttctccttagcagaacataaataaaaggcctaaccgcctcagaccactgtgtgtgtgtgtgtgtgtgtgtgtgtgtgtgtgtgtgtgtgtgtgtgtgaaataactactactggttttaaatatacagtttgtcacaaaaccagcaaatctgacaatctgttagccccatttcaaagtgtattgagacatttgctgttcttgaattggataaactcaataccagaaataaatgtttatgtaaaagaagtcaacaaagacatgtggtcagttggaaaaatatatcccataactcttcatgaagtttagggtttatagctagctgaagtacattgttggttcggttctccaattaagcaaggaaacacacagaattcaatatgattcattatttgtcactgtcatcgctaaatgacatttagtgactatgtgtaagaaagtacccacagatgccacagaatacaaagggcttgctgctatggactgcacaatgcacaggtggctaataaatagaagaagaaatgttgattcttgtttaagagcagtctgctcggtgggtgggatgggcccatgctgaagtctgcactcaacctgagctacatgagcctcagtttctccatttatacaatggggataagatttatttaaaggtttgtctttgtgagtaagtgagctgacacatgttttgggtttttgttgttttgtttttaaatttttattatatataaatttatttttattcatatatatttatctctgtcttcagacacaccaggaaagggcacaaggtcccattacaggtggctgtgaaccaccatgtgcttgctgggacttgaactcaggacctctggaagagcagtcagtatttttaactgctgagccatctctccagccccactgatacaagtcttaacggttgtcactatcttatggtgacactgaatagagatgtcatgttgctgtcactgtaatcagatgttcacagtttttgcttggtttttctggcaatagtgctgacttcttcatatttagtggactctaccctggatagctgccttcctttgagggctgcatggttaaagtaggaagtactatgtgtaaaatgtggtgatttttcctttaagaaacaagtaacactttcacttctgtctctaccaatagagagaagataatggttcttaaaagtaaatttagacattgtcattacatttgaatagtatctttctacccctaagtatctagaatcatctgcaagcatgaacaagagcctttatcctgcaaaaacttgccaagggtttgaggatccactgctattgtcaagtaatctattccctttcacatagataatcagattgttgtctctgtctgtaatcagaacccaagcgtgacccacaggtggcatgtaggtgccacatccccaccttcttagtccagagccacaccccctgataccatgtcttttgaactgttaaagaaatgaggtcacttctagaggaggaagctcattctggactggacagtgtgcgtgcgccccgctgctccactgtttctctcaatatgcagctccctgagtgatggtcagcttcaccctcaggcttgtctccacagttccctacggtctgactatgttacctccattaggaagggcaaaaacagtacatttgttttttataactttaccctttcctcaaaatcttcatctgtaattattcctgcaatgaaactttcctatgtacttattctaagggtataccttatacatatcaaaaaggattatacagacatcctctggactcttgttcagagaaacaatccataaacaaatttccactataaacatgcattaaatttaaccacacggacaccattgcatctaaaatactaacagcaatgtttgtggtaggtgaagtaatggccctgccaagccctagtccccagaacctactaacccaattgcattaactttcttggctcaagagactttgaatatgtgattaagttaagaatcccgagttgaggaaattatcctatctcaccacgtgggactttacaaattgaagccccctgcttggctttgattggagaagatagtgtgaaaagaaggcctaggaagatacaatgtagctgctgaaaatggaggaagggtgtggtcatccaagggatgtaggtgggtactgccagctgggatgctcaaggaagctgattgtctcctgaagccttgtgttactttctctgtgactctgatgacacacctagcaaaggcatctgaaggaagcgtgagcttattttgtcttatagtctgtcctggcagggaagccatagcagcgggggtgtgagacagctggtcacatatcatcaatcctacgagactggaagtggggcctggctataaaatctgaaggcctgctcaggtcatgtgcttccaccagagaggctccatctgctacagattctatagtcttcaacaacagtaccatgacgtggagacttgggggtcaaacccctgagattatggaagataatttccattcaaagtgccagcaacgattgcagccctgctttaatttttatcctactgtgatttatgttgacgtctacctatagaataataagttgctagcttttgtgttctttcagtttgctatggtaatagcgtaatactaatgcaattcttaaatatcagcaatatgtaattaggttaaaatgtcccaaactgcctcataaaacttactattgctgttttctttgatcaagaatccagacaatatgtgcttattgcttttagaaataaattaaaataataaacttgtgggatgcttttctataaaagagactttaaggatctggaatcatgcattttaacttacagagaacacacaaaggtttagagatgggtgacttggctctacatcaatcatttgcaaagctagcattactaactggaagagcagccgtgcctataatccatcacttggaagtcaagaggcaggatgatctgaggatccatgagcaacctggactacttagcaagtcccagtgtggcctggcctatctaatgaggtcctgtatttaaaacattgttcatatttgtgagaaaatatagaatcaccttgaaaacacatttgtccatacctatgagagtggaaggtatttccaacagggctgggaagacctccttgaacatgtgacactccttcatggatattggactgagtgaagagagatccagccaagcgtcagcatctgcctctctccactcactgactgtgtacaatgtcatcagctgtttcatgctcctgccatcacgacttccctgccatgatagactgagccttaaactgtgagccaaaatagatgcttcattgtgttggttgtgtgaaatattttgttccaggtaaaagaaaagtaactaaaacaatattacaattagtttagagggcccctggggggtagacagtgggttctggaagaatggcaagcttagtctgcttcctctaccttttgttgctccatttattgtttagctttcctaaattcttggttcctaggatgcccctagcaaaatcatgagccctgttgttcctatccaaggagctttctgtgttgtgaatagtgtgaggatatcgagatctatagttgctgtagaacaggtttcccatgggaactggaaagtcataaatgtaagaaaaatgtgtgttgtaaatctgtacactttgaccctccatgataggaagagggcagaggttgatgtagatctgatgttagtaaagttgaccttctgtagtctggtggcttccatctggtgcctgagagctagccatactgtgttcagagctgcttgcacagaggggagtcccatactttgaagttccaggaaacaagcaaagacaatacaaacacaagatttcttagcaacccgagtgtagtggctattcctggttgtcaacttgacaatatttggaatgaattacaatccggaattggaaggctcaccagtgacccttatctggaggcttggagatccttatctggatcttggtttgaagatcttgagccacagtggctatgaattccagaagattgaatctccgagtttaaggaacacacctttaatctgggctacgcctttcatctgggattaaaggtgtggtggaacacacctttaatctgggctccaccttctgctggagacaatataaggacattggaagaagggagtctagctcttgctcttgctccttcgcctgcttgctgcgtgagactgagtaactgctagatccttggacttccattcacagctgcgactgaacaattgttgggaattggctgccgactgtaagtcatcaataaattcctttactatctagagactatctgtaagttctgtgactctagagaaccctgactaatacagaagttggtaccaggagtggttctagagtaacagaagtacaaggatgaatcttttaaaattctggaattggcttgttgatccaccagcactttcaactattgaaacctctcccagattctctccctcctgggagctcagagaattttgaagacccatggttgaaactatattccgaacttaaagaagctaatgcccttgattttcttaatgaattaggtgattcagtgcacaaagctttctacaagatggggaaaaaatcgaaaaatgattttactggctggctgctcttagtatctgtggaaaaaatgatgaatgaaaggaaggagttgtgtgataaaatcgaaaggctccagacacaagtaaacgatctaaaagttgctaagtgtgtccttgaggagaatcttctctcttgtagcaatagagctcaagttgcagaaaatcaaacagaaactctcattgtaaggttggctgaactacagcgaaaattcaagtctcagcctcagagtgtgtcgacagttaaagtaagggctctaattggcaaagaatgggatcctacaacatgggatggggatgtgtgggaagaccatgttgaagctgagaattttgaatcctcagattctcaagggtttgccccacctgaggaagtagtaccctcagccccacctcttgaaataatgccttccccacatgaggaaattaattttgcagagtctgctcacggcccaccaatagtttcttctagacctgtaaccagactcaaagcaaaacaggctcctagaggggaggtagaaagtgtagtccatgaggaaattcgctacactactaaggagcttaatgagtttgctaattcattcaagcagaaacctggtgaatatgtgtgggaatggattttaagggtgtgggataagggtggaaggaacataaaactagagcaggctgagtttattgacatgggtcctctgagtagagattctaggtttaatacggaagctcgcatagttaaaaaaggtgtcaaaagtttgtttgaatggttggctggggtgtttatcaaaagatggcctactggaaatgacttggagatgcctgatattccatggcttagtgttgatgaagggattttaagacttagggaaattgcaatgctagagtggatatattgtgtaaagcataattgtccacaatgggaaggtccagaagatatgcctttcaccagctctataagacgcaaattggtgagaggggcaccagcacatttgaagggttttgttctttcccttttccttgtgccagatcttagcattggagatgcttctgctcaattagatgaattaaattcactgggtttagttggatcccgaggtaacaagggccaggtggcagcattgaatcgccggagacaaggtgatcctagttattataatggacagcgtagacaaaagaatgtttataataacatacccagtaatggtcagcacaggagaggtgaaatttataatggcatgactcgcttggacctttggtactggctaatcaatcatggtgtttccaggaatgaaatacataggaagcctactgcatatttgtttgatctgtataagcagaaaaattctcaaacaaatgaaagaaaggctacattagatcgtggtaaacagcaatctcggccagtgaatcaatttccagacttgagacagtttgcagatccggaaccccttgaatgaaggggtggccaggttcctctgaggaaggatcttgataagacactcaaaggttttgctgttaccctttctccagttcttccccagagggacctacggccttttacaagggtaactgtacactggggaaaaggaaataatcagacttttcggggtctgctggatactggttctgagttgacactgatcccaggggatcccaagaaacattgtggccctccagttaaagtaggggcttatggagggcaggtgattaatggagttttgactgatgtccgactcacagtaggtccagtaggtccccggacacatcctgtggtgatttccccagttccagaatgtataattgggatagatatactcagaaattggcagaattctcatattggttccctgaactgtagagtgagggctattatggttggaaaggccaannnnnnnnnnnnnnnnnnnntttccttacttgagcaaattaacacatctcctggcacctggtatgcggctattgatctggcaaatgccttcttctcagtacctgtccataaggaccaccagaagcaatttgctttcagttggcaaggccaacagtataccttcacagttttgcctcaaggatatattaactctcctgccctgtgtcataatttagttagaagggatcttgatcgtttggatcttccacaaaatatcacattggtgcactatattgatgacattatgctgattggaccaagtgagcaggaagtagcaaccactttggactcattggtaacacatatgcgtatcagaggatgggaaataaatccaaccaaaattcaaggaccatctacctcagtgaaattcttaggagtccagtggtgtggggcatgcagagatattccttctaaggtgaaagataagttattgcacctggcccctcctacaaccaagaaagaagcacaacgtttagtgggtctatttggattctggagacaacacatccctcacttgggtgtgttacttaggcctatttaccaagtgactcggaaagctgctagctttgtgtggggcctggaacaggagaaggcccttcaacaggtccaggctgctgtgcaggctgctctaccacttggaccatatgacccagcagatccgatggtacttgaggtgtctgtggctgatagagatgctgtttggagcctctggcaggcccctgtaggtgaatcacagaaaaggcctttgggattttggagcaaagctctaccatcatctgcagacaactattctccctttgaaaaacagctcttggcctgctattgggccttagtggaaactgaacgtctgacaataggacaccaagtcactatgcgacctgaactacccatcatgagctgggtactatcagaccctgcaagtcataaagtgggacgtgcacagcagcagtctattatcaaatggaagtggtatatacgtgatcgggccagagcaggtcctgaaggcacaagcaagttacatgaagaagttgctcaaatgcctatggtttctactcctgttacaatgccatctgctgccaagcatgcacctatagcctcatggggtgttccctatgatcaactgaccgaagaggagaagactagagcctggtttactgatggctctgcacgttatgcaggtaccacccagaagtggacagctgcagcattacaacccctttctgggacaaccttgaaagacacaggtgaagggaaatcttcacagtgggcagaacttcgggcagtacacatggtattacagtttgtttgtaagaagaagtggccagatgtacgattattcactgactcatgggctgtagccaatggattggctggatggtcagggacttggaaagatcacaattggaaaattggtgagaaagacatctggggaagaagtatgtggatagatctctccaaatgggcaaaggatgtgaagatatttgtgtcccatgtaaatgctcaccaaaaggtgacttcagccgaggaggagttcaataatcaagtggataagatgacccgttctgtggacagtcagcctctctccccagccatccctgtcattgctcaatgggcacatgaacaaagtggtcatggtggtcgagatggaggttatgcttgggctcagcaacacgggcttccactcaccaaagctgacctggctactgctgctgctgattgccagatctgccaacagcagaaaccaacactgagtcccagatatggcaccattcctcggggtgaccagccagcaacctggtggcaggttgactacattggaccacttccttcatggaaaggacagcgttttgttcttactggagtagatacttattctggttatggatttgcctttcctgcacgtaatgcctctgctaaaaccaccattcacggactgacagaatgccttatctatcgtcatggtattccacacagtattgcttctgaccaaggaactcatttcacagccagagaagtacgacagtgggcccacgatcatggaattcactggtcttaccacgttcccatcatcctgaagcagctggtctgatagaaagatggaatggccttttgaagacgcagttacaacgccaattaggtggtaacagcttggaaggctggggtagagttcttcagaaggcagtatatgctttgaatcagcgctcaatatatggtacagtttcacctatagccaggattcatgggtccaggaatcaaggggtggaaaacggaatagttccacttactatcactcctagtgaccctctaggaaaatttttgcttcctgtccccataactctaggttctgctggcctagaagttttggctccagagaggggaatgctcctaccaggagctacaacaaacattccattgaactggaagctcagacttccccctggtcattttgtgcttctaatgcccttaaaccaacaggctaaaaaaggaataacagtgttaggaggggtgatagatccagattaccatggggaaattggattacctcttcacaatggtggtaagcaagattatgtctggagtgtaggagatcccttagggcgtctcttagtactaccatgtcctgtgattaaagtcaatgggaaactacaacagcctaatccaagcaggatgacaaaggacgcagacccatcaggaatgaaggtatgggtcaatcctccaggaaaagagccaagacctgctgaggtgctggctgaaggagaaggaaatacagaatgggtagtagaggaaggtagttataaataccaattaaggccacgtaaccagttgcagaaacgaggattataaagtagtatgaatgcccattgtaaatttacaaatgcgtttgcgattgtacgaggaatagttatatcatgttaggcgtatttacaaccttgttattgtttcatgtgaacatgagatattatttgtgtcaagttgacaaggggtggattgtagtggctattcctggttgtcaacttgacaatatttggaatgaattacaatccggaattggaaggctcaccagtgacccttatctggaggcttggagatccttatctggatcttggtttgaagatcttgagccacagtggctatgaattccagaagattgaatctccgagtttaaggaacacacctttaatctgggctacgcctttcatctgggattaaaggtgtggtggaacacacctttaatctgggctccaccttctgctggagacaatataaggacattggaagaagggagtctagctcttgctcttgctccttcgcctgcttgctgcgtgagactgagtaactgctagatccttggacttccattcacagctgcgactgaacaattgttgggaattggctgccgactgtaagtcatcaataaattcctttactatctagagactatctgtaagttctgtgactctagagaaccctgactaatacaccgagcaaaggaagatcattccaaacaagcgaattgcacggccaaacaccaattacttcttggaagggaggataaaaagaccaagtgtagatatgacccatggttttccaagtaacaattgaatggaagtataatatcacccattataatgaaaacctgaatcagtagcagtttgtatagaataaaactgagaagctgaaaggttaatttttaaaaaaatttatttttttgagtgtgtctacaccacttatgtgcagacatctgcttcttccagaagagatcatcagatcccatggggctggattacaggcagttgtggtgtacccattgcgggtgtgaggaagtgcactcaggcctgctgaaaagtgaggcaagcacacttaaccattcagccatgtatctaaccgataaaataacattttaatgtatttacatcaggaagataaaaccagaaactggatggccaagtcaagaaatatcacatatgaaaaatatagagagagatagcataagaaaagggtttttttaatccaataattaggcagattaaacatgattttttctgtgttgattaaaaagattcagcccatcatattaagtccatttgaacccatccagtttcaggcaggattgatgagaaatccggaagcgtgtatccaggcagcaatccgaaattacacggaagaagaggacacgaggtagagcaaccacatagaaatataaaagggaaagaaaagccatttgtaatgagtacttttaattgtcaacttgacacaacctacaatccaccccagaagagaggcaataaataactgttcttactgtgtgtgtgtgtcgggggagggggggagttacacgtgcgcacgcgtgacataaccagctgcctccagttcttgcactgtgactttcccgcatgatggactacatacctggaatcgtgagctaaaacttatcccctctcccctaaggtgcattcttgtctggatatttttatcacctcaagaaaaatgaagctaggacactgctgaactttctttgtgtaacatttggtgttagaagaaaaaaagcatgcagtatggtagttgctaaatatatgtttacaaattcaggaaagcaggaagaatttgattaaagggtaattatgctgggtgccctcaataaactcttttagaattagctataatagagaaataaaaagtaatggattgaataatgtaactaatcaacatgatatatgagatatttaataggtctttacctcctaatgaaaaactgctttttgttaatcaacaaaaaatctcaaaacttggctgtgtattttgccacaaaggaacatcaacagattctaacaagaaaaaaagaatttgctagcaacattctctcatcaagttgcctaaaacacaaaagagacaatagaattcttatacatcagaagaaatcaagaggaaagtatttaatgtctaggatacaaagcaaaggggaacattggagccacacccaatagacactcagatgaaattttgtggcattaaatatatttgttattgaagaataaacccaaactataaagaaatatagaacttaacataggagactagataaagaaaaattaaactaagtaattttcagaaaggggggaattaataaagacagatgaataataaataatgaaataagaaaataaaaaagtcaataaaaaacaaacagtgatgatgtctgagatgaactcagtgagcaactgggaggagagatgtaatatgtgtgggctttaccggagacacagaagagaagggtcacaagcatcacctcgtgcccaagagtcagataatcagacagcacagtgttccaaataatataccaggcaacgtgaaaaaaagctttacccatgatcataattacaataaatgtctctggtaacaaataaaaatctggaagaaaaggcttggaagatgatgaaatacctaccattgaaaagatggtttcatagctgaactacatctcactttcaaaacaaagaactctaacaagacttaacgattgtgagccatgtggaagcgtgaaagcctcttgtttatttaaagatggcatgaggctgaaatcaaacggctgaaaaagaaccacagcagaaagttgcagcccaccctactcagacttgaaaatactagagctcaaaataaaacatttgcaaatagaagctagaactgtgagtagtaaaaattcagaggcaactactgcataatgttaagtggactggatatgcagctcagaggtaaaacagttgctcatcatgagcgaggccctgggcttcgtctccagtgccagaaaagcagaccaccaccaccaacaaaacccattaactatgattaatactctctggatacaagagtggcagtcctcataaaatctaccaacttcagtggtaaacaagacacaatattgcacgtattaatgagataaaggcatttgaaaccttacagcaacagcaaagatgaattagaggtttaaaacatgaattaaaataattttaatgtaattcaaagcatttaccacaatctaatactagaaacaatcatcttaactgcttgaaactgggtaattccaaactgtagttgcagccaactttcttgaaagcaatgggaataaaagaaatataagaaacacgaaatataaggaagtctaatgctttggattatcaacagctcttactcctgggtccatggctagaggagaaagtgaccgagcgagccaagtgggaggaagctggtggagtgtctcactgtaggggaaacttctatccatgatactgttagatccaagtaacgctgcagtgaaaatcaaggcttaaacatcaacatttccctttctaccttccctttgacctttccttggactccccattggacagacaattggaacctagagccaggagacttacagttgtcatcatgtggtcagtgttctctggcggagagcaaggtgatagataaagaaggatgaagatctggaggtacggatgtaaaatactgtcacagtgttccaaggattgaaaggggggagaggtatagggcaaacatcacatatactagaaatcaagaaaaaaacctaccattttttggttaacattttactatctaaaacaactattacattaaatgtaacaatttgtaaggtgcctggatataagataaatatgcaaaacctgttagcatcaattttttttagctgggcctgatgatagaagcctgtcatcccacgtactctggaggatgaagaagatggatcacaaattcaaggccagcctggcctacaaagtgatctcaaggccatcttgtgcaacttggtgagacatcatctccaaatgaaaaatgcacagtattgaggatataacgcttgcctagtgtgcatgacgctctctgggttcaagcccaagaactgcctcccacaatagccacatagtatctacaagatgaatacgatatctacaaaatctacagatacttggagtcagtattaatatttacagtattgtcactgtaaacacatgatggggtaaatcctagaatacaaagttgaaattagggactctctttcacttgctactaggtgtttttaagactgcttttaaatagaagatcattagcaagctgtgtcactgctgatgctttggatgtccaaacatgttccaaacatgccaatgtcagtctttgcataacagtctttttgaaaccttgtatgcctgaatatattttacttatcccatcatattataagagcaatttgattagatacacaattgtgcattcaaagttactttttgtcccctattgctttaagttgaaatatttgaactttaagtgtgtatctctctgcattctgggtttaatttgcatctgtgactcccattttccagatgccatgcccctatttcttgcctcctgtatctcaatatttttatatgtattcttgtgtcttaaatcttccttctgtctggtagagctccactgctgactttcccatttacctgctttgcttcttcagctataaccacggatcccccttcctatgtcatcctagtctcggatatgttctttcttttaactcctaattttgtttgagattgattgtttgatgtgatgtgatgtggtatggtggtgtgtgtgtatgtgtgtgcttgcctgtgtacctgtgtgtacataccacagtacacatgttgaggttagaggacaacttgcaggagctggcttattctttctttgtgagtctcatggcttttgctgaactctggtgacagactctggtgataggtgcctttaccaactgctccatcttgccaacagtgcaatatttgtcccttacctttcctttcacgtatttttagctccccatctcttaatttaataattaaataatttaataatgaaactctgacataactactctaataatgtttctgcttgttgcttttctgtgttataactctcatagctcctttggaaatatcaacaattagactgacagtaagtattgtagcatgtcaacataactatagttaatcactttcacttgctaacatttctctggcccagttacctggggtaaatgattctcaggagccactagtcactgtgattgttttgttgttgttgttgttgttgttgttgttgttgttgttgtttttctcatctcaagaggagtgggtaggcatctgacattgagagggcaggggcactgctaagctttaatagcacagaggacaacagcccataatagatacttccctggtataatggtcaccagtcccatggttgagaggctgcgtgccagctaactgtctagaacaaggtttagaccttagggcaaaacagcattgtaaccttctggcccaggatttgtaaatgaagagttttccgagtctattatttaaacaccagaattatttgtaattctctgatctgagccccttgaacatctgcccaagtgcctagctaactgtatatgctttaaacaacagaatcaagcaatcattgttccaaagaaatgcaagtcacaaatgcaagattcagtgagcttagttgttttcgtttcttgatttttcttttctctacccccttcttcctacctctagtcacctgctatttatatacagcaattccaaacagccttccttctccctacgacttctcgtggcttttgctgttattgttatttgttctttttccagttctctatagacttccccatcattggattttgggcataagcttgtagcatattctaatagtttcataaaacgtcacatttccccaaattaatataatatacttccaaggaaaacaaagcactttcagataaaattatctgaaggtttgtgatgtcaaacaaaagcaaaagaggacttgtctaaccagatataagagtaccataaaaattcattataatcaatcaaaatggcaatgacccataatagaaaaaattataaaaatatcccagaataataagaatttgaaagaaatgaaaacatgatagattaactaaatgctatttgcacaacagattagctatacctttggaaggtggtatttatagaaatgtacttgaattaaaagaaaatgaccaagtaagaacttcacagaaatttataaatcaatcttgataaactatgaatataaaatgaccatcataaagatggaaagataatttataaaaaatagctattgaaaaagaaaaaaaaaacttcaaatggggaaagacattataaacaaaatcaatggacaggcaacatattgggggaaaccatttacatgcaaatgatgagtctttgctctctctttgagtgataatttggcaataagtaacagaaacatggacccagactaggaccaggcaatctgtaaaggatcaaaccttcttggccacagacatgagaagtttgttcaggttcaagggaagtcatagaaatgtacaataaaacaacagcctgtcatttcaccctacagtgtttggcagcagtaacaacactaacagttgcacttggcagggatgcagggaaaccgaacttctacacattaccagtggaaatgcaaatcattaggagactttttggaaagcaaatcacatcatttactgcaccttcaaacacacaggccctcctgacccagcaaggtgaattttagaagtctaatccatacaagttaaaaacaaaaacaaaagcaaacaaacaaacaaaaaaacctagctcttaacgggttgtgaacgaggatgcttattggagtattcttaagaggacagattgaagaaattgccagggttctatagaacttcatgggtccattaaaagggtaaatcagtgctcctcctgctcagacttgaggatttcctaagaggcatttttccctactgtgtaaagattcacaaaagtatatataaaatgattcaaaaattttaaatcaacatcataccctcctgtacgtatctggaggtttcttgctcttatgcctgtgtttgtgtattgtatactcttgactcggaccttgaatgggactcaggaaatatagccatgtacattgtttccccctcccacccattgctctcttgaggccccagggaatggggaggcctgggtgggagtggggtggaggacatcttcttggagacaggggggaggaatgggatgaggaactgtgggagggcaacaactgggttgtgaagaaaataaaagtattaaaagtattaaaaacaaacaaaccatcccagaggttccaaagatccctggctggcaaacaatcctgactggcaaacaacccactgtatgtagactgggtcacaaagggtgaatgaggctaaatttcaagttcctcttgagaaactgaatttggaaaatactgttacaatacttagtagcagaaacaaaagacaaaaaggctaaagcaagagatgacttgagtgtatttagagccaggtaaactatggtgaactgaaggcttgagggaccacagactaaggtggtggagcaaggcagttggtagagagtaagccagcgagcagcagtacagttggagacaaccatctggccccggagacagacactaaagcaccaggccttcacactacttgtgtgttccgccacccctgggtttgtgcatccctaaagcagatctctgtctcttgagctctctggactgtgcaatattaaatgctttatattctggggagaattttttcctgaggctactccttgcccactggtagataagaacctgaggtatttaagttgccagcagagacttgtgtcagtaacaagcacctccaatcccatgtcataatgcgaaatttcaatttgatctaacacgtgactttaaccacattctccccaacttgctgaagacaggtagccgacctttgagaagaggtatagagagggccgtctttctcacatgccttatttatcattcactggatataggttctgacatctccaaagtggggaaaacaataagaacccattttatgtggttgatataagccccccctcagagcacctatataggctctacatgtgagatatttcatgtgaggctcaaacctcattcatcagcatccatccccaaactcctgggggcatcttatgttgcctcttgggctacatctggttcctttccaaagctgagatccccagacaaccaatgtgagcaagagactctcatgtgagtctcagccccttacaagtctcacctgccaggggatgctaaggccttgggatcctttcactggcttaatgtggatgacaggtgagagagccatgcaactagaccaatggatggcgaccacaaacctccctggagaagtgcttctgtgtttcaaatcctgatttaacatctgttgcaaatgtgtgtggtgataattacaaagaggaatttagtgcagagaacctggtgggacatacactggattgtgaaattgggaagagagagaagataagacattgggttagaaggagatgggagagggtatcaaaattaaaacactgttaaagcaagcaaataaacaatgtgtttgttatggaaacatttgtgtgtgtgtgtatgtgtttgtgtgtgtgtgcgtgtgcgaatgcttgaaaagaaaaccacatatagaaattaagcaatcattttcatagtgtgttagtaaaccaccatgagctgtaatggaaaagatcttaaaacgcaatgtgatattgtgcatgtcatgaaatttaaaacaggatcagcaaattcgcatatgacatgtaagtcacacatcttcactttcttcagcagcttgggtgtgctaagaatccaaattgcccaatggagccctgagccctgggtatctgctctcatcgggagactactggctctcattaattgaatttagaaacctcaccgtggcattatcctgtctagagactaaattaaatgcatggattataattcatttactgaaattagatgccatcaggcattggctccaaagtcaaagtctttttgctcgtgggtatagctggaccagctcctaggtgacatgtgtcatagactggtgagccgaagagaacccaggtctcgtgcaattcctgcttcaagtacataggacaaattcaagctggccgcttaacctttctaggccttattttccttgtgtatgtccttagatgacagctaagatcctttgcagctagcatcgttccattttaaataacccaagacttcccgggggggtctgtaaaatacagattactgggtcctgcctccagacaccctgattctcccgagttggccccaatgttccatttctcacaggtatccgtgaaaaatgggggtcctggtccgcaatgctgacgaatttaaaacttgaaaaatgaagtatttgcttttctgagtaaaagtggttaattgcaaagtgaagtaagctcactatacgtatttccactaaaataaatatctgtgcaagaccttgtgggacatgtgtacagtttgaagtgtgtcacattgtcttgcttactgtaattataagaaaggtacatttttttttctcctaagataatgtgaacttctacagtcttagttcccaggagcttggtgcacgtagaaagcaggacagggtatagctcggtgatggaggatgtgcctagcatgtgcaaggccctgtttttatccctggtactgcaaaacaaatgaatagaaatgaagaaattgataagtaaataaagaaatnnnnnnnnnnnnnnnnnnnnnnnnnnnnnnnnnnnnnnnnnnnnnnnnnnnnnnnnnnnnnnnnnnnnnnnnnnnnnnnnnnnnnnnnnnnnnnnnnnnnnnnnnnnnnnnnnnnnnnnnnnnnnnnnnnnnnnnnnnnnnnnnnnnnnnnnnnnnnnnnnnnnnnnnnnnnnnnnnnnnnnnnnnnnnnnnnnnnnnnnnnnnnnnnnnnnnnnnnnnnnnnnnnnnnnnnnnnnnnnnnnnnnnnnnnnnnnnnnnnnnnnnnnnnnnnnnnnnnnnnnnnnnnnnnnnnnnnnnnnnnnnnnnnnnnnnnnnnnnnnnnnnnnnnnnnnnnnnnnnnnnnnnnnnnnnnnnnnnnnnnnnnnnnnnnnnnnnnnnnnnnnnnnnnnnnnnnnnnnnnnnnnnnnnnnnnnnnnnnnnnnnnnnnnnnnnnnnnnnnnnnnnnnnnnnnnnnnnnnnnnnnnnnnnnnnnnnnnnnnnnnnnnnnnnnnnnnnnnnnnnnnnnnnnnnnnnnnnnnnnnnnnnnnntagtgtgcgtggaggggtggtactatgagtggaggtgtggtaccatgcgtggaggggtggtactatgcgtggagaggtggcactgtgcgtagagggatggtaccgtgcgtggtggggtagtactgtgcgtggtggggtggtactgtgtgtggaggggtggtatcgtgcatggtggggttgtatctgagctgagtcagtccccagcttgcatggtggaggactaaccacagcttagtgccttaaattcttggaacttatattgtgcatccttgaatatgcctgtcaaaacaagacaaaatcaaacaaaaagtattttctatttctccccagagctgttgacagatcaaataagatgctttgtaaaagattacttataaattgctaagttttctataataatatctataataaaacttaacaacaatcaactcttcttgggcgtttaactggctcttcagatacccctcctatagcactttaattatttgtgactgcacataaaattgccagaagtttgttctcaataaagtagccaccataaagaatctgctttctctccttcgcctcttgccactgtccacttccgcagtgtagatgttcaaaggaaggaaagaaagaattagagccattccccgtggaagctctgcgtttacatacctgttttacactccaagattctgaactcatagcaattgctgggtgtgtgggtactgccctgctgttccatctattaattgcttgtggccatagcggtatctatgctggtctctggtgctatctagatcatggatgctttaatagactaatcagctgtggccacttacgccttttatcccccacctgctaatgttttcccacccatcctacactgcccatatattataaagccccattcagatccccgtgtttgggttggcctctcgctattgtttaaatcagcttcactactcttctcattaaagatgcttttcctttgtaatttgactgccagtccacaccctgagtcattgtctgcagttcagcccatggggtgtgcgtctaccatcctcaccagagccggtgatgaggcacaaaatatagcttctcatcttgagctcttcaatgtgggatttctctctgaaacaaattctctgacttggaaacatgattattaatattattaatcgtgattaataacattcatataacattaaaatacgattatcgtttccatatcacactcagatggaagcactagagaaatgtgcacatgtgaatattcatcttttcggttactaacactttgaggaagagttgtccaaaatgagaggcatttccatacactgcatttgcaagtcaaatttttctcttaacatttaagtagtagaaaaacaagatttagaagagccactttcatcctttaaagtttaccacggtgtaactgtttcaaaggcacatgaactgttttacctttgatcgcaatgataatctgaagaccctttctatttggggttactatggttacgctgcacgggtgatgtgggagctgcactgctgttttgataaaaataggtattaactaccagccacggtgcttctcatttcataggacctcttgcagaaaacgcagccgcatatttaaagggggacatgcggggtgcgcggaagcgtctccaaggcagcatgatggaacatctgcataaataatggtgattggtcatgtgtataaaaatatttttaattaaattccttctaattaaacagggcatcttgctgaatccctttctgttatttgcaccaagcttagtcgtgaggaagatggctgattagcagacccaagaacctataattaaaagcagaactgttatttttggagaaaagcttcttcaataggggtgacttaattgggctgtctctcataatttttcatttgtcactgaactcctcacttaagtcttcatttttttttaacatgggaaaaatgattactaacttggcgtaattcacagtttttatttttgatttgtgttttcctttggtctctttgatcatgctctctggtcactgttgtgtgtcactatttgatggtggtcttcagttatttgttttgtcagggaggctgtcatccttttgtatatcatattatatattgattttttttttttgtcatctctggccctccatacctctgtatttccaagtgtcaagtagccagacactcaactgctcatctttggtttagtatcctaccttgtgaattcaaaagaaaactaaacaacattctattcaccaaaataaataaatacatcataaacaaacaaaccagatgcaattgacaatggcgtttcctcagtatcacaattaacattggagaacaaagacaacattcaattaacatctgctatctgctaagtagcacaagaatagactcaggcaggtgtgattcccatagtcttaagagttaaaaccaaaggcattaagttcatggagttgaattatctgtgaggttgcagaggagaaacatggtgactctacttccagagtattatatttggaagagaacactgttttgagtctgaggtagagggcaggagggagaaaatattcacctgctttccttgaactccaagggaaagatattgcatctcaaaggaagtctgagcatattagcctacagcatttccccctgaagccatcaggcttcgaaatagtgctggcaggccaaccaatttctttatgtgatctgctgcaagcctgcacagtgttatttaacagcactcgaatgcattctctcgctctatccaattccatgttaagcatactgtgatagcatcagtttaaaagcctctatataaaccttagtctataaaacaccctcatataaacccagattctattctcgagcaaatttactcagaaataaaaataccagcttggatttatattgtgtacctctttcaaagaactcaaatagcttccacacgcagtgtttccgttcatttcacatcattgtctcagggagagaagagccacgttttagtaaaataattgaggtgcaaaggaatttgatgataacctgagattttacagccagccaatgagaactagactagtgtgctgggctttgcattgcttaggtttctggactgtgctcttgcaggacactaacatctatgcgtgcaaaatgtcttaattaacttcagccaacttttagctagctgcaaatcaataatgcttttactctacccatccaaacagcaccccttcaggagtcagcatgcagaagaagcaccccaaaactgataaacacaaacataggggttccatctgaattctcctacacacagagtctgtcatctactgataacagtctgtaactgtgtgcacaaatatctgacttgacacacttgctacaactgattcgatcaccaccatgatcaggcgattttattcattctaagaaacagaggttctaaatacttcattgtttatgtctataaagctcacaaacagcagtgttgaagacggtgcttccaaaattcttggacccacaaccactgctatttctcaagacaaaacagcaccctgtcagtcaagtttgtttgtttgtttgtttgtttgttttaaagatactcagtagtcaagagtccagttctcattttcctattgattgcattcaatggacatttaatgagtgactactgggtagcagattctgagagtgagtctgcgtgcaataaggttaggcctcaggattctccagcctgcagagaaatgtagtcccagccactagcaatgagtttaagagacaaatcaacactccaggggctttgtaaacacaggggagccctgtattagccaagttggctaaggctctgggatagcattttaaaattcccctcaccaggagccaagctgtgcctgtttgaagagacaccctgccagctagtggagccaggagccctatttcccatctaaaagagacaggtctatgatgagcagagggttttcattcccattcagggttccaaatattgtgacctgctcaacattagcaaaggatccctgggctcagatagttctgggatcaaggctagagagatagttctctcctcgttccagcagagaaggttaaactcattaataacttccgccatcctaccctctgcatttgaagctcagttcctctctaaaccactctcttgatcccagcaccacagcaggcctctttctgcataattaggaggatgtgagggatccatatccgagatctgtagttcagaggacgggattctgagagctataaaatttgagatgtggtgggaccttgaaagacaatctttttcaacctcctcatttgcaaacaagggccccaagattcagaaagagagagtaaatgtgcatgcagtctgcacagagttgcaaggaagaaaacttttagcctttctctacttcccccccctcccttaagtcattttacgccaataaggaaacaaacaagtatagatatcactgtttttgacggcaagatctactactggcatgaatagtagtcatggccactactgtttgtccaccactgtatgccaagcaccttgcagaaatgatccctctcagccatttcccagggcatctaaggaatgagtgcttctcttcatttacacatgcaatgcacggggatgctctagtcaagtaactggctccagtttaccaaattaattcacatcctagttggcacctgcccttggcttgggttgacaccagagtcaggtttctatcccctttcctctactccaggagagtaatgaatttcaaggatctcacaccaagatcttgcttgagaagttagaagtccagtcatggagcatcagctgcccagaacagacttagagacagtgataaaggatggccagctacacctcaggatattggacatagatgcagagagactccaggtgtcctgatgatatggtttcaagaacacgctgaaaaaaccatttgaagcactgccacagtcctgtgcgcagctgggaaacagctgtgcttgatggacgtctttggctagctgctcttgggaatggaacagctctactcagtgggggtagttcactctcagcagtgctcaaaggcagacctgcaggatggatgctttgaaagtcagtgtccagccccacaccgtctgttggtgagttaaacgtnnnnnnnnnnnnnnnnnnnnnnnnnnnnnnnnnnnnnnnnnnnnnnnnnnnnnnnnnnnnnnnnnnnnnnnnnnnnnnnnnnnnnnnnnnnnnnnnnnnnnnnnnnnnnnnnnnnnnnnnnnnnnnnnnnnnnnnnnnnnnnnnnnnnnnnnnnnnnnnnnnnnnnnnnnnnnnnnnnnnnnnnnnnnnnnnnnnnnnnnnnnnnnnnnnnnnnnctaagaagatgcttgagtccttgaattggttaagaatacttgaaaatgtgtagcccaggctggcctcgtgatcctcctgcctctgtctccttcagcaaatcctcaatggaggagctagacaaagtacccaaggagctaaagggatctgcaactctataggtggaacaacaatatgaactaaccagtaccccccggagctcgtgtctctagctgcatatgaatcagaagatggcctagtcggccatcagtggaaagagaggcccattggtcgtgcaaactttatatacctcagtacaggagaacgccagggccaagaagtcggagtgggtgggtgggggagtgggtgggggagcgtgtgggggacttttggggtagcattggaaatgtaaatgaaataaatacccaattaaaaaaaatacttgaaagtgccttctgtttacctggatgttctagataagaaactctgtgttgtgttattactgtgttattttgaacagaaatggcgatagcatctacagacaagtactgtagggcagccagtgaacagaaaagcagtggataacctggtgaacagacaacaccgaagctgctcctgcctcaagaattaaccttcagaggttcattcattcaaccaaccaacagaattaatgttcactgctcaccaggaaataccaaggggttgacaagcacatagctgagcaaacaatacaaaggaggcctaatttgtttttaaaatgatgcaattatttttattttatgtatatgtgtgttttgcctgcatgtgtgtctatgcactatgtgtacagtatctgaaaagaccagaagagggggttgtatcacctagaactttaatccagtcctctgcaacgaaagtgctcttaactacccagtcagctccccggcctttgtgactgaccactaccttagtatcccagaaggccattttaagtgagtgggtgctatttcttagggtgatagcacttttaaaaatcgcccctttcacataagaaaataaattcactggtaactgaatgttttatttttgcatcattttccttctagaaaggattactgtagggggccaaaacttcaggactaacaaagctaattcttgctgcagtatctgatgtaatatcacacctccaggatggatttctggctcctcgcctgatcttgtaaactgctggactgcaaagtgtagtttgacttctattattgtactctctcaagccagagattttcccgttgcaaataaaaatccatccatccatctatctatctatctatctatctatctatctatctatctatccatccatctacccatccatctatccatccatccatccatccatccatccatccatccatccatcctcctatctatctatctatctatctatcttcttaaaacacaaacaaaaagctctgggttggtgacaatgtattccttagactcaagaaaagcagatttatgacgccttgctcccagggagtggaaaactaatcaaacagccattgccagtgacaggcacacagagccactgcaggtgaaactgcctgggaggtggctgagacctgggtgtgatcggtacagagagaagcaaaagctgaagactgagattccacggggagaagcacgctgaggatgctttcctggacagtgtgtgtgttaaagcaaggagctttagaaggacagcaaaaagaggtcatggagcatgaaggaaaaccacagaagggcaggcagtctccccaaacaaagaagagatacaaggagcccagagtctgcacaagaggagtcagcaatctggaagtactcaggatggctagggcctcacatacggcatctgtggctttgagaaagggactctgggcaccatgtttcatgtttataagcttggcctgttttatgaatggctttctgcttattctgacctaaaaatactaaacatttactgtagaaaattcaggataattaaaacaaaaaatacccagaagagaaaattgctgttggctcctcttgtgggggctactttgtgatttgggacttattctcccaagatgtggcttaccagactgttgacatggcaccctgatctgaactccatcctagttagcaccagttcctcatgctgactatatacaacagtgcggcctggacagggtcattcctggagaataaggctatgagatataaaacaacacattcagagagactggatgatatggtatgctgtgtgtgatgatagcaccaggagggacattcagagacgactacatcagtgttaagctcccatagccccataggcagcatcctatgatttccttcccccactcccagcccccacacttttttttttaatctctgatacaagcttgcatttgttaagcatgatataaaacatggatttgtatatgtgatttatttttatttttattttatgccagtggtgctatggggcaaaggggctctgaaatggctgaaaatagggacattccagccatattctcactcaggagctctgaagccagcacacccatcatgttcagatcactatgaaccaaggggcccagacatattaatgtgttagcaatataataaatcaccatgtatccagcagattttggcattaaaactttatctctttactttgaaggtcagaagtccagctggaatgagttctttgctaggagtctcagaaggtcaaattcaaggttttagttggctggggccctttcataagttctaagaagactctctaagatcatccaggtttgtggcagaatccagattattacagctacagagctgaagttccattgcttgctaacagagatacccactgctgtccaagacccctctctctgccctggtaaatcagcatctacattttaaagtcaacaaagatctgacacacctttctaactcttagaatgttcctgacttcccctgttattcacacccctctagtaaattctctcacaccagcctaagaaatttcatctcctttatttttattgtataaaattcatttttattctgcctcaggtgttttgctggtaacaatttacaaaatcatgactaatgacaatcttttttttgcatacaaattgtgaattcacttacaagcaataaatgttactgaaaggagaatatttattacatatttaagtgttcagtgatgtaccaaagagcctggaggacaccagggaagttcaagatttggccaagcctcagggatctcaggttcttagctggggacgcagcaccaagtgcatacatctaagaaccgaatatctccatcatttagatcgattccactgaaatactctctttcaacactgtctcatatctcctaagacacatacttcttttctgcatcacgaattccaaaacattatttgtggaacacacccttttctttttaaaaatattttttattaatctttgaaattccatatgatgtattttgattgcacccagcctccatttctctcatctgtagttctaggcatcaaatatttagacttgtgtgtttagtttggaacactcaaagaatccaggaaactagaaagagactgttagtggggaggattaaaaagacattaaggaaggagagtggataatagaatacagacgatatgaatggggagagattgaagacgaggaaagaaatgacagggtaggacaagggaagggattcggggagggctaaaacctagcatgtttggaaagcatatggaaaatgacattaaaaaaagaagctacattcatagccaaaacaaaaaaagaatttaattggtgttaccctacacaggggattatgctcatctccgcaatcaatgatgtccaaattaaaaagcccagtgccaaatgtggaatacctcctttaggtccaagggtccagagatccccctaaatattacagacttttgccatcgttcttggtttcccaccagaattagatggtaccaccatcttgctgaaaacaccacacgcactggttagaggacatggagaaatcgagttggtgctgagcagaaagctccttctcttctggctagccatcacagtactaaaagctgctaggaatgttagaggagagaaaaccatcattagcctaagccggctgggaatcctacgaactgcagtaatacctgccgtagcaagatgacctgagcaagcaatagcggtatgggtgctctgggggcaaccaacttctccgcgagtagatttgaagcctgctccataaggaggtacagctctgctattgtaaatctggcaaaggggagttcctgtttcccagggttgacttactaaagggtcggctaaaggggcatagtagcaaatatccctcaaaattagcatctctccacgtagattagtgtatgtctcagacctcatcaaaggttcttgtgcagtgggtagtggctaatgtagaaactcataactggtagagtgcaaagaataaatgtcagccgagcgctcagccacatgtgggccatgtatatcacactttatcacctcaattttgaggctcgggaacagtttcagaagaggaaatcagaagtattgcaagagctggaggtcagaagggcgtcgagctgaacagtctcatctggacatgacaggattgccacactcatggactccaggcagctgtggttgcctacatgaaggttaaacctatcattgtcctagtgtaatgagggaagaggtttgccagcctctatccctgactggggagctacaaacaattgatggcttttgaaggaataagaaagttttctttaagggagtggcctctggttgactaatcctgctctagtcaccatatccaagagtatgtgggcagcacaaattggaatagatggaattctgtttttttgttttgtttgtttttttgtttttgttttttgggttttttgtttgtttttttgtttatttgtttggttggttggttgattttttgagacagggtttctctgtatagccctggctgtcctggaactcactttgtagaccaggctggcctcgaactcagaaatctgcctgcctctgcctcccgagtgctgggattaaaggcgttttgttttagaagacacaaagttggggaacagtgaggggaaatttcccccctcacaggctcatgtgatcaggattgaccactgcttcagctgatctaggataaaataccgattttaaggtcttctgacttatttgcattcaagagccgtcgtagtcatgtaacgaaacatattcacatgttccaggtgttgctaattgacagatttgagaagggaggaatgttcagattctcagacaggataagcacatgacatcaccctgtccctttgcaacactgcgattcaagtccagggccttgtgaggctaggcaagcattctaccaataaagaatagccttagtccttgatgaattaattcctcattctagtctttatcttttctctctcccaagcctgtgctgactcctctcagtattatgctcatttgcccttggacacattctccatgttggaactattatgtaatattcttcattgtccttatccagagtttgggaaattatgatataccatgtatgttttatatctttttatggtaagaaaacttggtgaagcactcctattcgatgtcccccatgatcataactaacacaatgctcttttgacttcttgttttccttacaattgttccatgtaataaaccacggtattatgtttacctccaagtgatgatttattagtgagccatcactaacttgggctgctctttggagccactggcctttgctcttaatatatttcatgatttgtaggtaaacatttgcctgccattttctgttttaaaatggcaatgtgctgaagcaatcattgtgattggagaactcttgtgtggctggctgagtcatcttcacttggatagagggtatacggcacagatccccattaaactgcaccatggctcattaaaccccattggggagaaaattgggtctttgttaaatgtttatgttctctgctaatgttaattttagaatattcttgctgtagataccttgggggaaattttaaagcactagctgaagtgccaagcaggtctcaatccatgaattcccaaatataagacctaggaactagtacctgctggggttggttattaaatatatttctttgcagcatttacatgctagcatttgattttctcattgcaaaaccttatgaccttctggttactgttttctactctcagagaccagtaggggatgtacttgtggcttttgagcaaaaggtgaaatcaattattctcaaacaccatgcagctatgaagtcaagaagaggattgtgattgtctgtgcttttgttgtgcatctttccattaaagaaacagctccccaatatttaacctttcaaatgaatgccttaaacaaatacagataccagtgatggaattgtgactctagaaataggctcctggggttaatgtaaaaacacaaccatttcctccgttgagagttactgtgagttctgcatatacactcagagtcagtgggttaccgcatggcaaaagatgttacgacacagggagcctttctgggtgaggatccagcatggaatctgagctcttcagaaactaacaaagggaaacatttcctcatctttctcaaacaggatgcttagctagtgtcattctcagtgcatagagaataagccgttatatacccacctctcttaggacagtcactctcaggcattttataatatggctcttcacaactctcccagggtaagaaagacccccaaagagtttctgttcatgtacccattattgtttatccaactagaaattaagacaaatttcaaaatgtcattttattgacttaagtaacaataatttgtacatttgactataaataatataacatatgaaagataaatttattttccaagagaaacaaaacactatgttgaggagagtagcatcatttccttatatttttgcaaagttcttcagtgtaggatatgagcaataaaagacaggggctccttacatctgcccctgaatgccacatgatgtactaatgctatcacatagccttttgtaaactctattttagtaaaccaaagaatgagaatagaaaaatgcaattaacacttccctactgttgtgaagatattctgaccataaagatgttcctgggtatggttcaagaaactccaacaatccttggtctatcctttgaaaccactactctggccaccagagcttgttttttcccaaagagacctggctgaagggattgcaacagtgtgctggcatataatgtcttttcactactacctcaatacctaacacgtggatcactacgaaggtcagataaagttgacatgttttaggccaaattcattcatcaagctttgtagaatatacaatttagaatggcctccacaaagtggcatccaatgaccaactttccagacagcatcattctttgacctagttcagaagggtgggattctgttatatttctattgttatgactggcagaaccccactggcaaaacccattcatgaattgatttcatagccaagtgtgtggagaggggggggtctagattcaaaataatcccagtattctagtctattctcacaaagctacaactgttttcaaaaccctcctataatcacttaaaccatttgtagggggatacatttcacagtactcttttaacaagagaagaatgctacctcatttatacgtataaatgagtaacacttgtcatgactaacaaggattcagctgcagaagccttggacactgctgattcttcatgtgtcatagacaagtgtcatacatactgatcagcacagaaatagcaagtactacaaagagagccagcatgacaacactgagtgatgacttagaatgacaagggaggaaactattgtgtcttgttgtctatcgacctaggcagatcatgtactaggatgccgagtgctggcacattgaaataccatttgaaatttaaattccttgtaaaacatcaagagaatatgggtcagagagctgcttacaaaggttctaaggcatagactgtcactaaatcactctgaagacttcagagctactgaaggagcttgcagagagcgatcatttacagacaagccgttaaaaatacacagaacattatttagcagtcaatacattggcattctgattggtttcaatagtcactttctggagttttttactctaagaatgttttcttactatctttctgattccatacagagtagctagagtttctataggatgatggtattaataaaaatatcccactagttcagtgtttggatttctcttagagattgtaaatttttctccatttgattctaatagtgtgtcgtaagtcttggattcacccctgctggagatgctgcaattcatgtccagcctccaggggcctgagtcatgcattggtacccagcttgcagcagacgatctttcatgactcagaacataacttccctgctgtccctggacacatcctgccttcttcttcttcttcccgtcctattagctcccttctagtctatcctctgccttcaacccttctattttctgcctgattccacccaacctacaacatggaatgtctagaagaaagcccaattggtttctgcactcttgtgatgctgcttcggctttctatcttacctcaccagtacaccccagaaacacagccacctacactcttctcactcatcccatttggctgctcaagctcttttctcagaactctcccatggttccgaagcatctgtcagtcacttggtggtcacactctttccatgtcctaaatgaaggtgtgtgcctctgcgaatgggaatcttctttagcatcagaggatagatatgtgtgtgtgtgtgtataatatacatataggtatatatatatacatacatactaaaaatttggtcttagagagtataagagaaggaattcccaaccatggatgaagcagcagcagcagttaccatgagagccatgtgaaccacaatgtaatacaggcaaaaatggccaaatccgttaataaaatcataggttccgaagatctaattatgtcatctctccttcctatgcactcttactcctgctatctagaatgctctcttgaggtcacaaaaggttcatcttaagtaagtactaattatttttagcctagcttagacttagggctagtctccccaacccagagagatctgaggagagcctgctatgaattacactgtgaccatttcaagaaagtctaaactgggacagtgcagctaagcatgtaaggcactgtgtgtaaaacttagcattgtctgtgaactaactaaatgagttcttttaaaagttccaagctcaggagcagagtgggtggctaattccctgactcacctattcaactcatttgccgtcctgacaaaatactccctcctctaggacacactagctggctttattctgaagctgttctgtttcttcacagggtagacaggaattcgcaaagtaatagctttctcctttgtgtgggatatcgtttatgaagcagggctcagttctttgttcaggaggaattgtgggaatgtcagatcatttttgaacataattggatatacagataaatactttcctcaaaaatagccttctgctctctttagaaagatgaagaatctatctcatagaacagagtggatatcaatgagtaggaactttagaataagaaaccaagccttaagttgcccatgaacctaggaaacctccccaagagtagaggtgggtcacaagctatccacagagctcaggaacaaatatacccagaagctgaagttggcacttgaactgcagagatagaattttctgataaagaataacttatattttatcctacaagatcccagccaaaggagaatgttgttaactaaaacctcagttgaaagctcactactttggttagatgcaggcacttgactcaacctgagatggagaaaaagatcacctgagatgaattctgactctctcatctccacctacagaagctgcctgttgtagcaaatggctcaaaagcactcaggagctgagaggagatctctgtcatttacctggggtgattaacaggaccctctggacttgaataatgaatttcattctacacttgatttttttttctttttggtttttcatgacagggtttctctgtgtagccctggctgtcctggaactcactctgtagaccaggctagccttgaactcagaaatccacctgcctctgcctcccgagtgctgagattaaaggcgtgcgccaccaaacccggctctacccttggttttaaaaaggaatcaggcctgctgccattctaattcatgatcccctccccaccccccttcatttgttttgctgttagatcctagcagtggcttctttgttttaaaaggggcactaaagaaagataaaatactttgacaaataaagcttatctgccattatagtatgtgatacattttatgcctatgaccaggaggaaaactgatcatacaaatgagcgtgtacctcacttcacatgctcatcaaccttttggtttggttttgttgttattgttattgttttgaaatgggaacattcaaaatctaactttcttgcaatcttcaagtacataatacatgattttaatatgtttcatattaagtcggaatctggaataatctcttctgcctctcaagcacaaaggccaacctatcctcctctttaagtagcatgggggtgctgttcctcgcctctgtccttacaacactcttgcttatccagtcactaagcagcacgctacattgcagcatatgccgagggactgggaagatgagaaccaataaataagccatgtataagcactatggtcactgggccatctccacttgcaatgatggatgtgcatggccctcagtgcttggagcccgactccacacctctccctttcctcgccagtaaaacccatcttttactggaactactagggaggccttgagccatctccctatcctgcttctgttctgctgtctgagctttatgtccaagttcaaatcagaatgtgtcaaccagcttactaaagaccttcaattgttttcgactgtggcagacagagcaaccttcacatttcttgattacttgaaaacccttcacactgaattcactttccttccccatccccaaacccaactagcactccatttacagaatacatattgtcctcgtgaactgggagaggaaagaacagagtgaaaatacccattctgcctttttccccaccatggacaggtatcattttgtaatactctctttccctcttggcaatcaattcagtgggtcattttcttaatgagtgctgatcatactttgcataattgtttcaaatgccgagacaccaggaagttttgaggagcacaggtaatcagcttgtggcatttatagctgtggtagattcacaaaggctcagtgctaaacagcctgtagcaactgagtgagtcctgctctggagaaccatgtctatggctgaatgtgctctcgggagcacatgagagccaggatctggttgcctttccatccacagtgctaggccattgaaacaatattcaattgcccgttccttcatccctttatcaaataattactgcacgctggtcaaataaacaccaagggttgcaaattgggccctgttcccaggaagctcagtcccttctataagtctgtgatttgatccaaatgctaggatcataaaagaatgagccagctcaaagctgaggagatcagaggattcagaagcagtctcccccaagacccttaaagaatgaagaaaaggatttcaaaagcatgtctctctctctctctctctctctctctctctctctctactctgtgtgtgtgtgtgtgtgtgtgtgtgtgtgtgtgtgtgtgtgtgtatgtgtgtgtacgcacgcacgcgtgtgtgcattgtggagcacatataagggatgagggaatggtgaaagtagatgctaaaggaatttctgcccttttaggaagggtcgaatacaaaacaaaaaaggtaagaaactgcagtgtgtttagaaagttgcaacaagtccagtgtgactttggaggaacagcaaagggtgggtcaggtgctcagagagaggcatctctggaaagtaagcatggatagaatttcttcacgggggtgggggtaggagaatctgttgtttttgaatgaagatcttgtgttcatgtggagggtgggtttaggaccgtaagtacttaataaatgctttttaaaaagtgaccataacgaagacacacgttgtggctgtgtcttagctaacttgtcatctttatgtgtgtcttcctagtgacagtgctggccattttccatgaactccacgtggacccagacctgtacacactgctgtttggagagagtgtactgaatgatgcggtggccatagtcctcacatagtaagtaccagatcttgattgcattcctttaactgtggttcctcgtggagttaattcctgatatctttaatagcatcttctttctatgacagagaggaaacagccctttgtagcttttaaggaattgtcacagaagatccccaataatgggcacaattcattaggcacctaatatctaatactgttaatggccttcacactcccagattattacaagatactacccagagggtaacagattttttttctcagtgcatatatttagctgattcactgaaggctcctaagatgcacagaaatgagctgcctcttttcaaatcaatgccacttagcatttccctcccaccagttgcttttcagataacaggctgacagaagctctagaatttagcttttggcagttcgggacctagaactcagggtcagagcactttaccttctcagtgcagattcagcactgtaaggcaagcacagggtaccgcccttcccatcccacacggccctgaagcttccccagctgagtgcagatgtgatttccctttgtgctgagaggtttttccccccaagatgagacccagcatgctttctccacctcttctttagacacatagccatttatatttaataaatgccactctggcagcttttcattgtgtcagaggtctctctgtggttttagattaagaccaacattttgggcaaaactgtcagatattcccaaggaaagcagctatctgataattaaatgtgacaacggaattctactcccagtgttaattacttcaaatgcagttgaaaatgtattgtggaataacaaaagattttaaaggcagacctcagagtgaggagagagaagcaggcagcgactggcagccctatcagcttgtgttccagttccctttcgtttgccaactgacatttcttaaagctgccctcctccctccaaagttgccactgagttcagccacgtttacctggccacagagacagggatttctctgtgtcgcaggaaactactagcatgtaagaataagaacaaaaagccatggtcagacacataaatgcagaaggatgctttgaaaacatcaagaacaattaattaggacaccaagagtccctgtcccagaaatactaacattaaaggaatatttgaggaaaaaaaatagaaaaatctgctgagtcccttcatttttacttcctgagctgccaaactgtaagaggctgtgtcaaacaaaaccacaaaacaatggggaaacccaccctggcccgtccaaggcaggcctgtcctctgcccagcactgccactcacagtgactcccactaaaaataaggccttgagaatgagtgttggcccgttaggtaaaagcctgggccactagaaatggtttattttctacctcaagtctatctgtggcttcctaaacacatgggtcagtcagtcacaaaccaaactctctgaaaccatacaaaattaaatctttttatctcgaagctgtgtctctcaggtattttggtcatggtgacaaaacatatctaattctgtgtcttgacaaggtgccttcttttctgggcaggaaacaattgacattctagctgaagccctgcagtccttagctctgctatggtggaaccgtgaggcataaagccaaggagttcgtatgaaaataaaactgtctgagtaagacagtttctctgcccaaggtctgcatattaggatctatagcgtccctactatggggttgtttgactgccgaccagtattgtgtgatggccgagctctggcctctctgtgcaccagcatttcctatgacttgcctcttcgccccttacactgtcttccatgggtttttcttcttacctgttcactcatttctttttaaaattgtctttggagaattttgcaatgatatgcaaattctaccattccctctctccatccctgttcccctactccttctctaattcatgacctcatctttagttttatatataatgtatgttatatttgcataaatacacacacatatatatagacatacatacatgcatacatatatacatacatatgtatatatacatatacaacctactgaatcaatttagtgtggctcatatctccaagtatttaggctgaccacttgggattgaaaaccaatcagggctttcccttgagaaaactgattctctctgtgtcagcttctactgcttacctatagcttttatctaaggaaagggccttgtgaaatatttctcatccacactgggatgccggttggtttttttcattagtcaggtcttgtttaagcagccatactgagatttcataggtgcagcttccttgccatgtctggaggacgttatcgcatagagggcattctgttccctctggctttacagtttttctatgccctcttctgtgattatccttgagccttaagtattaagggttgtgttgttaatgtgccagttgaaattcaacctccacaccccatggtcacttatcctcatttgactcatttgtgagttttaatagtcttcatctgtctcaaaagaagcctctttgatgaggggtaagagctacacttatttgtgggtttaagtatttagaaaacagagattatattagaaattattctaacactaaacactaaattgattcagtgtgtgcgtgcgtgcgtgtgtgtgtgtgtgtgtgtgtgtgtgtgtgtgtgcataaactaaagatgaggtcatgaattagagacagagtaggggaatgtggaaggagcaggctggagaaaaggaatgttagattaaattataaaacagaaaagtagtagtaagttctcttccagtttctatgacttaagcagccatggatagttagctaggttgaatgaattgtactggaactgaccttcaagtctcctccctgagaactaactttcatagtatgagaaggtgctatgcaaggtgccaaaggataaagcaattagtggatctactcagctgtaaagcctacccactactactacagcagccttgcaagacatacatgctgaatgctgcaatagtggcaaaagtggccaaaaccttttatctgagagtaaccatcagttcctaattggacttaaggaccactttataggagagaatcatgcctgctacaccattgctaagtttagaccctacataatgatggtcaacttaaagtagattgtacataatgatctcgtcatgttatttcttgagcactaatgcccatctctatctctcttccaaccatttctacctcccttagggatttctagatcacataaagattttcccctgagtttcttactaacaattcatttgttcctcttttttttttctcctctatactgaaccacacacagcacattgatagtctctgagtggtaggtccaagacctcacaataaaatccctcctcttacgttgttctccatgcatctggttctgttgaggcctatcttctaactctcagcccagtaacttcctttagggttcaccagatcacaatcagagccaggacttccccagcccatcagttccttccagttggcattggatttgcatgcatattcgacttctagatagtaactttttgaaagcagagtatatatactttaagtgtgtaaaaagaacaaatgaaaaactttgtgctttagctttattggtttccaggcttaagaacagtggtaaatgctgggagtacagctcagtgatagagcctttgactagtatgtaatgaggcgctaggttccactcctaccatcaaagttttctttaaaaagaatagctacaggactattttttttttgcaagcatcatggaaaaataaaaattttaaatctggaatgtgaagttggatatacatagataacctttccctttatcgaccaaggttacatttcaagagtttcataaatgtccaaaagtgtcatactgaacgctacagatgtgttttcttcatatacaaatataactatgataaagtttagcctcatagattaggtgaagtagattaacagcaacacagaataataaaacacttacaacaatgcataataacaaagagcccttaaaagttatcaactgtgtggttttggaaactcctttttaatattttcattggatttgaccatggattaataaagtttcagaaaaccaaagccagtggttaatgtggactaccttgataaactcaaatcattggcaagtgtggcccttagcggggtctctaaagacttttggaaacaggcttctgttgatctccccttcattggccatcaaattttacttaaagattacccattccttttccttttaatactttgcattttaattgttaatatgataatagtgtgctctagtacttagctacattttttgattaaagatgcttttctttgatagcctatgaagcaaaaatattataattaatactgtttcttaggttaaatgtgctctcaatttcagacagttaatttataattgaatttgattttcccatctctcctacatagcacatgatgacaagtgctgtatcatatttctatgattaaaaatgatccagcaattctttgtcctgaaataaaagtaacttcaattaacataaaagttctgaaatcagcttatctctgacccacactattatgtctagtatataggaatatcctttccacgtgtgtgcacaccggctcaaaatgaatgatttacctttctaaagttgttaaatagactttgaaaggaggcagaagacagagcaaagagatctggagaaggtatacgtgcttgaatcctgaacaaagacattaatttcagaggcagcatggcagaagctacaattagaagtcagatctgatgtcaggatcccccaataattaactgtgcaatcagtacagttttcccagaaccaaccaaactgctgtaagcaaacagactgtgagctgatgtaagtgagcagcagccataggaatagctcagtaaagggccccaccaaatgagcaggtctctccctcctcacccagctccttcatgaggcactgctccagtcttctgaacagagcaagaacccacggtccattagcccatcatccccggccttgtttgctacagcttatagattctcgaactgtgactactttaggtatgcttactgaggcaagggagacactgtcttacccatgtaagccacgtgtaacatcagagtcataagtggcctcacttggaatcacaaagctgagataagaaaagcagaattattgtccaagtaaaatcgccatgaaactaaatgctagatagaaatgtaacaaaacttagcacaccagaagagcggtattggttttcctgcctacaaagtgtaaaagtcgttatttagtataccttacaaaactatccaagcaagaaataaagcaacacagttgccaaagctctgtagctctataggaagtctttatgtgatagaaatacttttctagtttatctcatcattcctgttgacatctactgtgtctttttttaactagcaaatcttgaaagcttaagaactcaagatgccaagtcgtacccagagagctggagtctgagaaattggagccctcctaggttactgacaaaagagaaaagtgatacaatgtttctttttttattagagattttctttatttacatttaaaatgttatctcctttcctggtttcccctcccaaaactccttatcccatcccctctcttcctgctcaccaacccacccactccctcttcctggccctggcattcccctatactggggcatagagccttcacaagaccaagggtctctccttccattgatgattaacaaggccatcctctgctacatatgcagctggagccatggatccctccacgtgtactctttagttggtggtttagtttttgggagctctgggggtaatggttggttcatattggtgttcctcctatggggctgcaaatcccttcagctcattctctagttcctccattggggaccttatgctcagtccaatggtaggttgagataatccacctctgtatttgtcagacagtggtagagcatcttaggagacaactatatcatggacctgtcagcaagcacttgttggcatccacaatagtgtttgggtttggtgacggtgtatgggatggatgcccaggtggggcagtctctggatggcttttcctacagtctctgctccacattttgtctctgtaactcctccatgggtattttgttccttcttctaaggaggaccatagtatccatagtttggtcatccttcttcttgagcttcatgtggtctgtgaattgtatcttgggtattctgagcttctgggctaatatccacttttcagtgagtgaatactaggtgtgttcttttgtgattgagttaccccactcagaataatattttctagttccatccatttgcctaagaatttcataaatttattaagtttaatagctgagtaatgctccatcgtataaatgtaccacattttctgtatccattcctctgttgagggacatctgtggtcttcccagcttctggctattataaataaggcttctatgaacatagtggagcatgtgtccttattacatgttagagcatcttctgggtatatgcccaggagtggtattgctgagtcctcagaaagtactatgtttagttttctgagtaactgccagactgatttacagaatggttgtaccagcttgcagtcctaccagcaatggagaagtgttttctctttcactacatcctcactagcatctgttgtcacctgagtatttgatcttagccattctgactagtgtgaggtggaatctcagggttattttgatttgcatttccctgatgactaaggatgttgaacatttctttaggtgcttctcaaccatttggtattcctcagttgagaattctttgttttaactctttaccacatttttaaatagggttatttggttctttggagtctaccttcttgagttctttgtatatattggatattagccctctatcggatgtagggctggtaaaaatcttttcccaatctgttggttgttgttttgtcctagtgacagtgtcctttgccttaagaagctttgcaatgttttgaggttcaatttgtcttgatcttgtcttgatcttagagcataagctgttggtgttctcttcaggaaatttgcccctgtgcccatgtccttgaggctcttccccactttcttttctattagtttcagtgtatctggttttatgtggagggccttgatccacttggacttaagctttgtacaagaatttaaaaatggatcaatttgtattcttctacatgctaacagccagttggatcagccccccccctttttttttttgaaaatgctgtcttttttccactggaaggttttagctcctttgtcaaagatcaagtgaccatagttgtgtgggttcatttctaggtcttcaattctattccagtgttctacctgcctgtcactgtaccaataccatgaatttttaaatcacaattgttctgtagtacagtttgaggtcagggatggtgacccgaccagaagttctttcattgttgagaatagtttttgctcccctgggttttttgttattccagatgaacttgcaaattgctctttctaactctgtgaagaattgagttggacttttgatggggattgcattgaatccttagtttgctttcggtaagatggccatttttactatattaatcctgccagtccatgagcatgggagatcttttcatcttatgagatcttctaattctttcttcagagacttgaagtttttatcatgcagatctttcacttgtttacttagagtcacaccaaggtattttatattatttgtgactattgtgaagggtgttgtttccctaatttctttctcagcctgtttatcctttgtgtagagaaaggccactgatttgttcaagctaattttatatccagctactttgctgtagttgtttatcaggtttaggagttctctggtggaagttttggggtcacttaagtatactatcatatgcaaatagtgatattttgacttcttcctttccaatatgtacccctttgacttccttttgttgtctaattgctctggctaggacttcaagtactatattgaataggtagggaaagagtgggcagccttgtctagtcctgattttagtgggattgcttcaagtttctctccatttagtttgatgttggctattggtttgctgaatattgcttttgctatgtttaggtatgggccctgaattcctgacctttccatgacttttatcatgaagggtgttggattttgtcaaatgctttctcagcatctaatgaaatgatcatatgattttttttctttgagagtgtttatatactggataactttgatggatttctgtgtattgaaccacccctgcatccctgggatgaagcctacttaatcatgatggatgatcattttggtgtgttcttggatttggtttttgggagttttattgagtatttttgcatctatattcatcagggaaattggtctgaagttctcatttttgttgggtctttgtatggtttaggtatcagagtaattgtggcttcaaagaatgagttgggtagagttccttctgtttctattttgtggaatagtttgaggagtattgatattaggtcttctttgaagttctgatagaactctgcactaaatccatctggtcctgggctttttttggttgggagactattaatgactgtgtctatttctttaggggatatggcaatgtttagataatttatctgatcccgatttaactttggtacatggtatctgtctagaaaattgccatttcttccaggttttccagttttgttgaggcttttgtagtaggatctgatgattctttggatttccattttccgatgttatgttccccttttcatttctgattttattaatttggatactgtctctgtgcctctggatagtctggctaagggtttatatatcttgttgattttctcaaagagccagctcctagttttgttgattctttgtatagttcactttgtttctacttggttgatttcagccctgagtttgattatttcctgccatcactcctcttggatgtatttgcttttttatttgttctagagctttcaggtgtgctgtcaagctgctagtgtaagttctctccagtttctttttggaagcattttgagctatgagtttcctcttaccactgctttcattgtgtcccatagattttggtatgatgtgtcttcattttcattaaatttaaaaaagtctttaatttcactctttatttcttcattgatcaagttatcattaagtaaagcattgctcagcttccatgtgtatgtgtgtcttctgttgcttttgttggaatttaagaccagttttagttcatggtgatctgatagggtgcatgggattatttcaatattcttctatctgttttgtgaccaattatatggtcagttttggaaaaggcaccatgaggtgctgagaagaaggtatattctttttatttaggttgaaatgttctataaatatctcttagatccatttggttcctaacctttgttagtttcactgtgtctctgtttagtttctgtttccaggatctgtctgtccagtgctgagagtggggtgttaaagtctcccactattattgtgtagggtacgatgtgtgctttgagctttagtagtttcttttatgaatgtggttacctttgcatttggagtgtagatgttcagaattgaaatttcatcttggcagatttttcttttatcagtatgaagtgcttccttatcctttttgataacttttggttaaaagtcaattttattcgatattagaatggctactccagattttttcttgggaccatttgcttggaaaattgttttacagccattttctctgaagtagtatctgtctttgtcactgaggtgtgtttcctgtatgcagcaaatattgggtccctgtttatacatccaacctgttagtcttcatcctcttctatacctaatatccttaggtttggtcatctagttgtgtcctggacttcttggatgtttttggttaggaacttttgaattttgcattttctctgactgttgtgtcaatgctttctatggtatcttctgcacctgacattttctcttctctctcttgtattctgttggtgatgcttacatctattactcctgatctctttcctggattttctaactccatggttgtctccctttgtgatttctttattgtttctatttccatttatagatcttagatggttttgttcatttcctttacctgtttggttgtgttttcctgtaattctttaagggatttttgtgtttcctctttaagggtttctatctgtttacctgtgttctcctgtatttctttaagggacttatttatgtcctttttaaagtcctctatcattgtcatgagaagtgattttagatccaagtcttgcttttctggtgttgatggtgtagccaggacttgttatggtaggagaaccgggttctgatgatgccaagtaaccttggtttctgttgcttctgtttttatgcttccctccttccatctgaatatctctagtgctacctgccctagctatctgactgaagcctgtccttcctataatcctcgttgtatcagaactcctcatagtcaagctctctctgtgatcctgtgatcctggaacctgagccactggttgggcagggttcctgtgtcagagttcttgggagtcaatctgcctctgggaccctgagattctggtgtgaacaagctcctgcaatcctgggatcctgagattctgggattctgtgatcctggctgtgttagagcacctgggatttcagcctcctctgggtgctgtgggactggttgcagagttccagctcaagataaactggaaggaacctgagccactggttgggcagggttcccgtgtccctgcgtcctgctggttgcagttactccaggtggttttggaacagatgttgtgtcctcctcacctctggtcctaagatcctgggtgtgctagagcgcctgggagtggagcctcctctgggtgctgtggaactggctgcagagtttgcacccaaggtcaatacttttccaaagataatttagcattatttagtaagccattaggctttgggtcatttaataaggaactccacttctagaaattatcctaagaagtatttgaggccatgaagttgtgtacaatggttgccaggtggtttagcaagctctgtgcattgtgtcactgaaagtacccaacgagctaaaggggtctgtaaccctataggaggaacaacaatatgaactaaccagtaccccccccccccccagagcttgtgtctctagttgactatgtagcagagtttggcctagtagtccatcagtgggaggagaggcccttggttttgcaaagaatatatgccccagtacaggggaatgccagggctaggaagcaggagtgggtgggttggggagcagggtgggggtgggggggagggtataggggattttcaggatagtatttgaaatgtaaatgaagaaaatatctaataaaaaataaattaaaaaatgatagagaaagaaatatattgatgtaaagagatgcacaatacattttaagtaagacaaatcaacctaatttgttctatttacatctagtaaatagtagtattattagtacatctagactagatatagaattccaaccaattacaaagcaagttcaaggtcagtcttaattacacaatgagactttgtctcaaaaatcaaatcaaaacaaaatactatcaactatatgtggatacctatgtacttatatagtatttctttcctggttagctttctgttgctgtgatgaagatcattaccacaaacaacttaggaagagaagggcttatttgacttacatgtcctgagcacagtccatcattgagggaagtcagggcaggaattcaaacaggacagaaacctggaggcaggaactgaagcagagaccatggaggagttctgctaattggcttgttcagtttattcttttatattggatcacctgtgctgacatgacactgcctaccctccccatatcaatcattaatccaaaaaaaataccctcagaaatatctacaggccaatttgatggagacatgttctcagttgaagtttcttcctctttgatgaccttaccttaagtcaagttgacaaaaacatcaacaacaaattatctatattataattatatgcaaatcacatatttcgttatctttgtatttcacctataattatgaagatatagtgatgtgctgtatgctgtttatatatgcaaattacttatatgtcatatgtaaactatatactattttgatataaatatagtttaaaggttcaaagtagtaagtgcagcattgtgatggaacatgcttttgttttgttttgtttttaaaataactccacagtgcataaatgcctgcaagttttcttagaaataaactaagggcctctttaaagagcaggctcttggagggtaataaatacacactaagtgcctttattccttgtaaagcaaatactgataagaaagttcagtgcagctcattaaaggaaagagaaatggagcagcaattttctccctctaaaggagagtgccgtgctgcttagaagttttgctagaaaatgtcacagaaagtgtgatgccagagaacgcttggcacttatccacaagtgaaattttgaaagaccacactcctaagacccttgcttcttagggggaatttaacatgaaagggaatgggacactgtgagactcaaccatggagctaagaggaaccctgagatacttactatccagcaattcaataacatgtgcccagcactgctaccaattgcctggatttagtcacccatctctgccctcagtgagctgggcaaataatagctatcacaggatttaatgtcaatagaaaacattcctccaacagtcagttcagaagaactgtagaatttagatataaaataggtccctaaggaaatctcattcattccaataccaatcatttttaagaagaaaacaaactccttacagacaagttagacctttctctgtcccccacaacacaaactaattgtttggcagtttctccaataattactgaccgaatcaattagggtcttttcaggtgcagatggaggcatttattaatcctctcattaacagcttttttgaggatgtatgtttaatagtctttattgtgcttcttccaactgttttggaaagccctcttcgatactctcattagctctgggtctctcattggctcctactagaaaacagaggagtgataagaagatatgcttgctgatgagagtgagcagacactgccatcacaacctggagacgtacttctcatgaatctgtttagcttaaaaataagttccttaggtcttgacacattttgctgaaggtgattcaaaagttaatattggccaggaaactgataatcagcctgaatcacatttgttttgatggctgtctagatagacactcttgtgttacataattaatggaaaactaatgcagggttcattttgcccaaggactcctgtccaggcaatcaaattctctggttatttcatttcttaaacactaggtggtatcacatggcagtaacggggaaggttcttgggctctttaaataggaccaaggccaccatactcagctgacagtagctgtaagtgagacattcccaatgtggtactgcgttcttatccactgttgctctcttgggctttgcttagtcctgatctctggttcctgtttcctgactatgactttggatttcttttacccctagctctaacgcctcttctgatcactaggatctgaccttggctttatccagtgactctggcccatctcttgactttcagatttagatctatgacttgcttgctacttctttggaactcatacccatgatggagaacttggcttgctcacaacgcaccaagaatgacagaatgatctatgaaacagaaataaataagttaatgctgtgatttcatattgatggctctttatctcaattctactgaactttaattcattggtatataaatcagatgtatttgacagaaacacaattaagattaatataatcaagggaatccattggcctgtgcttcagggttgagccaactggcgcatgctgggctcaaagattcagcgtggctgtttgtttggtttttgtttgttttgctttgttctcactcatcctcctgattcttaggtgcaagcataagacatctttgctcacacctatagatgacttattctgtgaaacagaaaagactatttccccaggtttgcaattttttggctcaaaacaacacttccttctccttatattttgcatatcaatcacagagcacttggcactgcctacattcaagatctcccctagatcacatagtactccaaggaaattaggatgtagtgattggtcagatctcagtcatggtcccaccttcaggctgatggcttgtggtctatttgtgagaggaaagcggctggaggaaatgtctaacagactttccaaaactgtagcttccataatcaccatgacatggtgctttgaaatgacacagaaaggtccctgtgccactttaagcttgaagaaatgttgtatctcagaaagcaaacattattttctgcatgtgaggctgaactgcagaaaaataacttctgtatattacaaacaataaaaaaaatcacagcaagaatggaagaggctcactgtgtggggggcacaggccatnnnnnnnnnnnnnnnnnnnntcacatttgttttgatggctgtctagatagacactcttgtgttacataattaatggaaaactaatgcagggttcattttgcccaaggactcctgtccaggcaatcaaattctctggttatttcatttcttaaacactaggtggtatcacatggcagtaacggggaaggttcttgggctctttaattaggaccaaggctaccatactcagctgacagtagctgtaagtgagacattcccaatgtggtactgcattcttatccactgttgctctcttgggctttgcttagtcctgatctctggttcctgtttcctgactatgtctttggatttcttttacccctagctcttaatgcctcttcggatcactaggatctgaccttggctttatccagtgactctggcccatctcttgactttcagatttagatctatgacttgcttgctacttctttggaactcatacccatgatggagaacttggcttgctcacaatgcagcaagaatgacagaatgatctatgaaacaaaaataaataagttaatgctgtgatttcatattgatggctctttatctcaattctactgaactttaattcattggtatataaatcagatgtatttgacagaaacacaattaagattaatataatccccggctggcctcgaactcgtgatcctcctgcctctgcctccttcagcaaatcctaccggcgtgcgccaccacgggaaatgcaaatcaaaacaaccctgagattccacctcacaccagtcagaatggctaagatcaaaaattcaggtgacagcagatgctggcgtggatgtggagaaagaggaacactcctccattgttggtgggattgcaggcttgtacaaccactctggaaatcagtctggcggttcctcagaaaattggacatagtactaccggaggatccagcaatacctctcctgggcatatatccagaagatgtcccaaccaataagaaggacacatgctccactatcttcatagcagccttatttataatagccagaagctggaaagaactcagatgcccctcaacagaggaatggatacagaaaatgtggtacatctacacaatggagtactactcagctattaaaaagaatgaatttatgaaattcctagccaaatggatggacctggagggcatcatcctgagtgaggtaacacattcacaaaggnnnnnnnnnnnnnnnnnnnntgggggtgggtgggtatggggggtctttttggtatagcattggaaatgtaaatgagctaaatacctaataaaaaatttaaaaaaaagattaatataatcaagggaatccattggcctgtgcttcagggttgagccaactggggcatgctgggctcaaagattcagcgtggctgtttgtttgttttttgttttgttttgctttgttctcactcatcctcctgattcttaggtgcaagcataagacgtctttgctcacacctatagatgacttattctgtgaaacagaaaagactatttcctcaggtttgcaaatttttggctcaaaacaacacttccttctccttatattttgcatatcaatcacagagcacttggcactgcctacattcaagatctcccctagatcacatagtactccaaggaaattaggatgtagtgattggtcagatctcagtcatggtcccaccctcaggctgatggcttgtggtctatttgtgagaggaaagcggctggaggaaatgtctaacagactttccaaaactgtagcttccataatcaccatgacatggtgctttgaaatgacacagaaaggtccctgtgccactttaagcttgaagaaatgttgtatctcagaaagcaaacattattttctgcatgtgaggctgaactgcagaaaaataacttctgtatattacaaacaataaaaaaaatcacagcaagaatggaagaggctcactgtgtgggggcacaggccatcacagaggttcagaggctctgtagtgaagccttgatgggaaaaaatgaataaggtttggacttcctgatttatcattcagtcttatcagctcttccactgaccttgagaactagtgagaaatcttgctattgacctgcagttcaaaagatcaaaagccttggcccaggcactaaaatccaacatgcaactccatatgtcaacagaagaaggtgttgaagacaaaacaatgttcttacccacactcccctctcaccattaaaacaatccaattctactcccaagtgatactttcatagccagggctgtggaaatcccacaggaaaaatataacaattctttcttaaaatgagctaaacacacaaaaaggagcaagccaggggaagatatagcctcacctggggaaaaccaggaatcagggacagaagaggtactcaaggggcaagcacccagaaggcatggggtctgaggaaggttatcaaatgggctgatgacaactgaggagaccaaagaagagcgagaacagcaaggaaagaagcactcgatacaaaatatggagctgggccagtgcaaatgcaaatattgacgacattaaaaactcaatgcatggcataaatgtcatagcatcaacgaactggcaagtggaagatgaagttgtcaaatgatccagaatgaatgtagcacaggcttaaaacacatgacaggttagttaagaggtgtaaatgatggcataggaagaaatccagaagacatcagtaaagatttcaggagaaatgaaagcaaatgatgtgaggcagtgtttgaagagagagtgaataataatttcctagagttaaagaagaaaattgaaataccgcacagtatttatagcttcttgagtagaaactaatctatattcaatacattttaatttttagttgttttgacatcccctttccctgcctctcagtgtgcatttgacccgacagggattcattaattaggaatcataagaagaagacgtaagaggcctttaaggaagcacaaagagggatggggagaatcacgaatagattaaagtgtagtgagatgagagaccagcaaagacaaagtgcagatcggaagagcaaccagaaaggtaagatcggtttctctgtacgaaggtcaccgagagtcacaatttgcctgagaatagtgtcctcattagaagtaaaagcatcccaggaagagagaaaaatgtgtccaaggtcttctgggaaataagcaacagccaggacccacgctcaacaaaaatgtgatttaaaaataaaagtgaaatatactttcaaatatagcttactatctatatatcatcagctatagatattccaagggatataattaagtagaaataagcagctgaacacagtaaggagtgaagagcaaaggatattaaactaatatattggcagaaatatttatggattaaaatgaggaataactgtggcagatataatgtagatgaacagagaggggaaaattggatagacagtcactccagagtccactgcaatattcaaagacaataggcattaagtagccatagggagagggatcgtgtaggcacagtagagacatagcaaaggcctgtgtttggtagcacttcagatttcactcatcccagcacctctcaaaatggtgcaaaagagtctgctcagaggccatacttctttactttgtggacagttgctgaaaccaatggaagcctactaggaaattttagactgtgtaaatggtagctcatgctaggaagttgggtctgtcttctgcttacaccttgttacaaggtaatagtaggttcatattcattttagccctcagtttgaaaatttgtcctcttgcttagaggtcccatgccatgtcctagtcgaagcccagaaagatcagctattcagtaagagaatgagatacagtaagcaatctgtatatgaggcagaggtaggaccagagtggttataattaacaaaagaaattactgatccatggtgagagtacccatactggtgtggtaggttctttttcttcctggagtcaaactactcaggatacttagcatccactatattaattcagagcaaatttctgccattaggatttcaagagccccaaagagtatatggtacaagcagcctttgctgtacctggtcggcatccagcagcaaatactacccaacgctgtaggtggtatctatggggacaggtagagaccaactggtctgtaggttggttatttttatcgtcatcctcagacaagaaaagttattttccaatgagactggaaagtttgagttcttggcaaccaacacccgaatagacaataatatttgggataattcaaaacgactccgaagtttgacaagataaatcgaactgatctgatcctttctccactacacaaagctttgatggtgacctgcagtgttcagttctgcaattcttctccatccctccatgcccagacaactgacgcaatgtccctttgtcattatgcataaccattgtttctctctctctctggtgtccttcagtgtctgattgggagagttgatagtacttcctggtctctgactctgctgtgacaaatgagtgacatacattgataggactgtgcctagtagttgatggcagtccgtacaaggtagcaggctgtagaagacagtaacataccatgactttgagcttataggatgtaaggttctcaaagatttaagcgcttctagtcacattgggattcagaacatggaatgctgaatttttagtggactatcatagacgtagagactgaaggaagtcaaggctctcataccagggggtaaaaaagacaacctaataaaacggcagaactctatagttttaggagccctacactgagactttttcatcaagaggcatgctttatttgtaacaaactcaagtttgacttttcaacctgcatatcaggatatcttttatttaaagcactcagttctgatttcttttctataattttttttcaaggaacaagaattcaagtcaatattcagtcataattttggaccaaattaaaatccctcttggcctgaagaatataatctgttcatattacttgggttttgtaatgcatttacatggcaggcttattacaggtctgatgtgagttctgccttcctggggcatgtgatgctgagaaaatctgattaaactttgggaaggagcagctgttctgcaatagtggatgagcacgggacccatttttcagaacctgactgcaaggcctggcaccctcaccagccaatggatgataaatgaactgtccctgaatgccaactcctgcgctaatagctttaaaatatcagttgtttatgagaaagaagttgggagctcttatcaatttttctgtcccaggggtccacatatacatcattttttttccattgctgtaatggcaggcagtgttttaaggcaagggaagaaatccattcaccatttagatgttctccatgggttagtaaaatcatgcttctcacttcaaaacatagtagagtgggttaactagtaaatccttatgtgaaatgagacatgaaatccagaccattctttgctgaatttccctgtaatattggaattacaatgcagtttcatctggtatttgtagaggcatggaattcaaaacaaatacatgaacttcatatcccaggccaacggcttatttttcaaataacagttaaacagtcaaatgtgaccaaaggctgtagtgggaattttggcttctctgaaaaacacagaaatataagagtaggttttcattttaatcccaggtgtgggatttgaggctctttcagcctgtccccagcagctgactatgatttgccttgtgctctggcagaggcgtggttttgccagctgtagatagtttctgtgattatgtgatgtttggaattctgggaacttttcagagggcgtataaatgctagggctccaagagtcacagttgatggttggttgatgttgattgctgttggtcacactttgttaagtagctatgtgaaaagaagaaacaagaagaagaaattagatatcctgacagagatcaactttccccatggaactcattccccgtaaccagcagaaagtatctaatgatagcgctgccctctttcccctctatcatttttttctctcctacctggtattagggggttgaaagtgtagaagacatgggtggaaaagagtagaataaagaacccacaaagtaggcaaaagtctggttacaaatgcgttggatgtgtcatatttgagggtgttaatttaaaggtgccagcatgggcagctttattgttttcatcctttctgatttctatccttatctgtttgttttgggggcatttgaatactaattctgatgtgaaaggcaaatattgagatagtcacacatggcctgttcttgtagctgctcatcttcagtctttccttgttgggttcataagaaaaaaaattaccagagaaactgtctgctattctattaacaattccaataaaattcttgatgggaaaatttgatcttggaacgtccctcagctgtagattggggggatatttgacttccccatagactccgtgcactttttcaagtcagttttctcttttcatcaaactgtgagtttaatccatccagagaaagaagaatctatttagaagcaagactgaactgaagctgtggattatatcgcagatcagataaactttatagggaacacaactagaaaatcagattctaagcacatagacctgctcgctaggatggagggccagaataattattatatgggaaagagttgaaatgataaaaaggaacattatagtaattttaaatttaaaaattaaaataaacaacttaatagatgttattcaaattagaaaatacaaaacactcaaaaaagcaaatattagttaactcagaaatgactcggcaggagggcagggcacagaaatcaaccacagccattaacaataataattatcttgctcaaagtagtcttcacataaagtaatctctaaataagaaatgtaaaaatatttttaaataggaggaaaaagagaaaaaagaaggtagaatggaatgaagaattaggagggagaaatattccaaaatatatacattctagaaatgcatgtacacacttcaataaaaactaccctatgtctctcttctgatttctttttccattttgtatctcagtatgaaaaatacctgcaagtcaagactccgtttcccagctcctatgttactaattatgccaatagctaggctctgaccaaaggaataaagtaaaggtagctagccactttaaggaatccacatattctacttaagtaatagatgtataaacaatctaaaagaaaaacatctatttttggtaagagacaaaactgtctcataaaagtcagggttatactttgaatatggctcctaaattgcatgtattggaaacttaactctcgatacaacaacacagagaaatgggacctttaaggagtaatgaggtcatgaatctctgctctcgtgactgcattaatgccattgacacagaagtaggttacttataccaagtgagctcatgaggaaggttgtttctctcattcacacactcaccctcctttgccctcggcaatggttgatacagaaaaagaccctaaccaggaatgaggcccttgatcctggactctccagcctttagaattctaataagtatacatattctgccctcgtgccttactcatcctctcctattttgttacagcagcacaaaatgaacaaagatggtcaataatataacagatggtcccgggagataactcagaagctaagggggttcactgctctctctgaggtgtagagttgagtttttagcaaccaagtcaggccactcaggaccacctataactccaactctagggcattcaaatacctctctggcctcctgggaaacctatacacactatcagaaacatctagacattcatgcatacaaatattattcctgaaataaatcattcaaagggttaaaagaccattgggtcctagatcagtttcatttggaattacaaacaccacaagcgacacagatgttttcatcttttgagttgcaggaaagacatgtgggacacctgggaaaaaaatgagtcatgtgcaccatcataatcaagttgacctttgacttaaccagtgatatccagtttcaaaaaatggaaacagcatgtttctccttctaaggaaagagtgtgaaaccaaggcaatttgacctattagccaaaaagctatcatgttaggaattttaataaacatgatggggcagtgagctgtactattatgagaacaagttaaagaactaactcataccattcctaacataaactgcaagaattacaaaactaaatgcttggaaaattcacaaacaaatttgaagtgttttaagtgatttttttttataatgttattgttttcttgaataagattcaaagcctagaaacagaccaggggagatggctctattggagaagtatctatagtacaagcttgagaacctgaagtcagattcctagacgccaaacaaaaagccaagcacacaggcacaggtctataatctcagtgtttggagttgggcaagggtagagacaagaggatcagggtggctcactgagcctcttgtctacttgctaagctctgtgttacagtaacaagatcctgtctcaaagcacataaggtggagagtgataaagaaatactctgatgctgtcctctggtttccacatggatatgaacatgtatgaatgtctacacacacatatatacaacacatatgcacacaataattttgaaaatctgtgaaaaattaggcactctacctgcatgtgaattttaaaacataagtactagctttggtggaaaacaaaggatggactacaagaagtatctgtaatatttttggtactcttaatatcttaagcacacaatggatgcataataatgtggaaaagataatatgatacaatttcaatataaatatgaacaatgaatttatgggtctctatgtgtagggttatgtacagatatcttcctctgcatgcatgtggtcgtgttgcaaatcttgaggacagtttgattcatatgcttttgtcagcactgacataagttttaaatatgcccaacaaagtaagttctagaaatctacctcaagaagtatttgcttatatcaacaaggatctgtatatactgtagcagttgctaacaaaaagaatgtaatgagccaaaatgtctataaataaagaagatattgaatatatcatgctacatacaagctattaaaagtttcatggtcattaaagagtgtgtgatacagaaaaaaatctctaagacatttcaagttataaagtttctggaaaatgcacactgcatagtaaggcttatacaaaagactggctaggctcatgaatacagataagtgcaatagaatgtctttaagcacttacacatctacattaccttggtctttaatgtagatagtatattactgttatactttgataataaatgatgtaagtaataaatccattttaatgtgaataaaagcatctcctatacttgcctaataaaatttaaaaaattgaaattagaaaaatggctgaatcccttttacctatttctggaatgctagttgcctcatttttgttggcaggtttttgtctactattgaatcaatgataaatagatgatagatagatagatagatagatagatagatagatagataattgatagatgatatatagagagacatgatagatagatagatagatagatgatagatagatagatagatagatagatagatagatagatagatagatagatagatacttaatgagtatttcattatagatgctggtaataggtgtatagaagtatacatggcttttttttttaaataaatgatgagaataaaaccctggaactgatacacacatctctgttgcccgaatcatcgattaaaagttttaatctttggccagccaactagtcctctgaatgattagcttgggagtttaatcagtggctctgagtgagaagagccctaaccaattctgccacagctttcactacatcagagctgtatccaggccggcagaacatttcacatcagtatcccagaacaccagaacacctgatcaaggcagctcactttaagatgcattacccaatttcctgggcacataaaaatgtttatgaggcattagatgtatgtaccatgaacttgtcttagaaaaatatgtttatatcaactcagaatttattgctggcaatggaagacctaagtgctttgcaggccagtcagctaatgtagatgtgtgatggttcaggacactgagcagtaagatgatataggacttactgcctaaagaagggcttaacgaagattgatggcatccaaaaaatgttttagcttccatttgcattttaaactgagtgataaccaaacatacctgcatgtggccaatgtattaatccccagaagtaactgccatggacctctgctttcagtagtatcttgtcatcaccacctctatcttgggccactctctcatttggcctctgctctcctataccttgtgccatcttctatcagcaaagaatcccttctaggcacataaatacacagagtgtgtgtgtgtgtgtatgtgtatgtgtgtgtgtgtgtgtgtgtgtgtgtgtgtgtgtgtgtgtgtgtgtgtgtgtgtgacagacagagacagacaaaagtatgtcttgtgtggtccaggttggctttatctcactagttatttttgaactcttgtttctccagcctctacttcccaaacactaggactacatacacattctaccatggctccctagagatctggctccctgatttacaaatagcagtcattctataaagccaaattcacatcccacctgactggcaagcattcgcaagaactttccagacatggatccattcccatctctgagcctccagagaaagctctttggaatcccaggttcataatgagtttaaggtcatttggtcaagttgtaagaggactaaattctacttacattagacaaggccactcacccagatctgatgatctcagcagacagcaggacagctctgaggaatttcaagttctctttgcacacaaagttttcttgatccctagtctcttcaagtcattgagctggtattttctggaggcttcctgtattgagtgatggggtatttaagaaaaatttaaatttgttgttcaaattttaaattaagacaatgtaaaaatcgcgatccatggcttctatgaaaaatgctaggaaatgcagaaagattgaactctgtgcatcatatgtaaattttaccaaacaatagagatctgctgttaaaaagctactatctctcccctttaacccaagcactgggcctgatattgagcccagaatttcatctgcctaggacatttgggtttgtgcaatgaaagacttaagataatgtttcttgtacttacaccggtcatgatagaagtacaagactgagataacctaacatggcctgtccacgcctggagaaaaccaagctgccatctttaatggcatgcaagaatgtcctctctgataggagaaccctttagctattttaaaacaagagtaaagccatggagaagcccatgtttgctcttctgcaaatccctactcagaccctgcaatctctggtcctgcccactgtgctgctgctctccactggacaagtttgtttcttttctcaaaagtgtattaaagtttttgagccaaatgcagggattattcttaatccctatgaaattgtgtgtggatttacgcaagatgcttggcctctcgtcagaaacttgtggattaataaagagaatttagagctagatgcaggcaaaattaagtaattgtatattgattttgtgtagcaagaagttccaatatttctggtggcttaacagtgaattctgttcagaaacttattctgtttaatattttcattaatggctgaatttatgggaaacatggcaagtttgtttagtcagcaaccgatagggacctgggaagttagtaaaatgttgaattaaataccaagattcataaaaaagagcagcaggctatagaaatagagtatacgtatattagaaaatcctttgacacagcaagtccccaaattattaattatggaattataatcaaattttatatatttcatcataacagcaagattctttaaacacactttatatagtttagacaacctacaagaatattaaatttcttaatgtttaaagagggagtttttaaaacaagtatatatcataattatatttctgccccttaatttttttttcatgaataaaaggccccaacctggggccttatcaatcttctccgtaaattgtattattaataaatgtgtgttaactaccttagcttctataacaaaaagcatcatggggctggtgagtggctcagtgattgaagaatggcatgtgccaccaagccactgaccacagtctgagttccacccctggagtccacacggtagaaggagagagccagttcctgcaagttgtcctgtgactaccacatacactgtgtggcatgttcacacacaagtccacccacataatgcaaaagaactgtataaatatagtacaggagaactctttggcagttttctctacaagagtctcttctcgggtctagagagatggctcggtggtgacaatcacagagtgctcttgcagaagcatttgagtttgggtcccagcaccaatagccagggcatctgatgcctcctgagctctaaggctacccgaagtcacatccacatacaccccctgcctccaacacatttgttcactcagggcaaactggcatattcagagaaaaaggcaatcattggtatgtgatgtttgtggatttcctgaaattcccaggcaaggccacattactagatggaagagtgagtgaatccatgtcatctgcagtcacacccagagcatccttgctgcttgtcatctgcagtcacacccagagcatccttgctgctgttcttggtgactgtgttgtgttgtttgtttctctaagttctgtctttccttcacctaagctgattgatacgagggtgaatatcggtgtgtctaaaatcccatgaaagttcatttactgataagtgacccaaagatcagcattggaaagaataacaaaaggttatctatatatttcttcttttgtctccccctgactaacttgagaagaatggttgaattcaacaacaacaacaacaacaacaaaaatagccacacatttttgtttcatagttgagccatatatcaacaattaaggatataaagtggggtgtttggatggtcttctatcaccctcctaacaacgacttcacggcttctttatctcaacatcctccttggtccttcagctctgtgcagaaagagacacttctcctttgctccgtcacggctcaccgcccaacacagcagagccccttaacctgtcagcctgtccacctcttcaagagttccccatccctggagcacttgcttcttctagctggtacttacttaggtgatgtttgatgagtgagaggtttgggaagcagatgcactgtcacatctgattaattattgcccactaattaatcaatgactggagtggaaagaccagttgtttctcctgtgttttcctcttgtatggtgatttggtgaagccagttacatttaaagaagatccccttttcttttgatgccatcaccagagataaagcctctatacatgcagagaaaagcaagaagcaggctccaagttcacccagagacttaaaggaattaaacaaggagagtatagcatttctgttgatgatttttgtgtctggtttgtttgtttgtttgtttgtgtatatatttccttatttattttggcaaaaagaacataactgagttacattttaaaaagttattttatgagatgaaaatttttgcacatacacaggcatgggcatatacacaaacacacacatacacaactagctctttgtatttttatctattatttttgttggttttcactgaatatagatttttttcaacaagtaattcctccaaattaaatgttttcataggggacttagacaagtaagaatgaatctcatactatgcagttaaaaaataacaataaaaagaggtggcgagatccaggggctagcttgggtaccaggtgctactgagctctgcaaagtctgactcattcacatcacagagcatcctatggaatcacctgctctgacgtcaccacgacaagtccatcactgcttgtaaccaccactgaatggaaggcagtgtgcctgtgctactcaatgatggctttacccatgggaaaatgcaaatattgttgattctcaggctcagaattgcatagtggctctggcatgtccagagtgtctgtgttgctgtttcttctctcatattgattagtgacatcaaacaggaagctgtccctcaggtcattatagcatgaggtagtgagtgtaccaagagtgagtgtgctaacattatggctaatgttctctaaagcaagtgtggcaagcttcaaggcttaaccacacccctcatagccttccaaagatggccatgactcccaaaactcattcctcttgatgtagggtaattattctcccatttttatatattcatattcaaaatgtcgatacaaattcaaaatgttgaatatattcatatttaaaatgtctctggactgtctctgacactccttggcattgtgctaggcagccccacctcttcctgtggctcatagtcccacccctggctgctgggttctaattagccatgttacttcactagcctacgagagcatatgccactgctgatactttattaatgcccgtttcctgtatgttatatactggcaagtgattgatgtatatcatctcaatctccctaagttattatgctgtatatactctttagtcctacttagcagatgagaaagcttgagccaaggaaagctaagctgcttgtccaagtctccatctagaaactgggagagctttgctataattaagtgagataaatggaataaatgttaaaagtaatcaaagcattcccacaagaggaaactgcctggagacaaacccaagaaccacagcatgactcagggataggagccatcaagagacaggaattccctcagtcaaggctaatatgaagcaggcatcagggtcagtaagaagataacggggccaagacttggatgaaggtctaggccacttcctgcaagtcctgggcaactaactttgcctatctaagatccaacaaaacacacatgaaattgtcaagaaaggttagtgagaatagctttttaactataagatatcagagattgatttacttatgttgggaatatcagagccagctgagataccgggaaagacaaagcaacatttagaagtgcttttaactccttttattcccaaactgccaaccatgtgtgtagctctctgtactgagctagaaggtagtggagattaaagcacactagtttatcctcttacacaaagctattgtcctggtaaaatgaagatttatgtgccttcccttgggagtgacatagccggacaccgtgagatgaatttctatctagggcatggcgagacttttcacatgcacattaaaccaaggcaaagcttctttaaagctggggtgcttggctcctatgcatgggaaatgtgtgagcattatgcataaaatgtaaatttctgcaaattttgaaaaccttgttttcatcagagaagtctaagggttgtagtttgtgttgagtaagcaccctttctaaatattaatcattctttgtaaatgcatttccttttctttctataatatacaaaattatacgatttgttacaagttttctctaaaattgagctcctttgttacttttctccagaaattgtgtgatctttatggagacagtatgtcctttcaacttctttgtctttcctcttgtctccttgcaggcgtcccccaccttgtctctccaatgttcatggaatccagggcttagaaaattgcctctgccatacccatggatgagttagatgagtgtttgtgagttgttgagggaaatttttgtgctctgggagattcttttcaccgtggcaatgaagttgattgagaagccaccccactcctcagaatgccaccagcagcgtggcttcagtcctttgatgtgatactctgtggacaccaccatttctcctctcctcacagaaattacctaaaccttctgtgactttcattctctatttgaaaaccgctgggctgaaacctacaggaaattctatctacttgctttttccacttttcaaataaataactgttttcagattatctccacattcacaagtgaacatgggatttcaatttcgagaggcagctgagccttcctgttagatgggaatgtactagaagactcaggaggtctttctagcaggtaagaaatgacttggctatagtgcacacaggaagtctaggaaggatttgaggtatcctgtctcagtgcctgtttggccccatggtggcttctattgcaccatcaggacctggtatggtttgggggacctggtatttttgaaagatcagtacaatttttgatccttgtaaagtgtggtgattttctgtatctaccagaattttaaaatataggatgtccattggacccccaaggctcctgatgagttctttctcccttcagaaattaagatagtccacttctgttattaaaggccataaccactagaccaaggtactttgctacagtctcttccaaagagcttctattctctgcctctcctttcgtcactaaatgtccggatgtgtaaatcaattaggtagatatgttaagcataatcacactgacttcaggcctccattgagagtgtcctcctgagggtaagaaaatgctaggtgttaatgcccttcccccctcctttccgttattccaagatctacttgaatctcagtccccactctgctcagctgtctgcaaatggtccaggattcatcccttccccatctctctgacatcttccccatctctgacatcttccccatctctctgacaccttccccatcgctgacatcttccccatctctctgacatcttccccatctctgacaccttccccatctccgacatcttccccatctctctgacaccgcttaaagggctttcctgttcctttcttatatttcttcaaaagcgatctcactggcctcaaagcctctggtcttggttcccttctctgtgttctttttgttgctctcagagtcctgttaaacaaaatgcacttcttgttgatcagtgcactgcttcaatccctgtcgtgtctcctgataccataggactgagccccagctcctcagcaaggcacctttagctcttagtggttgtcctctaccctgaaccctagccctttgaggattcatagacagacaaatgaggcaggccaggcgatgagaggaggactcgggggatcctcagatggcctgtatttaataatatatttgaaggtggcagatttgctgatttctgtctaattactttcatgcggaaaatagggcccaaactgatggatccaatttttcaagagaaatggggatcatgatgttttctttttcttttttaattcttcttctttaatcttttcttacagtcagtcattatccccttcccagttagccctccaacagttcctcaccccattctccctccccctgtctccaagaggatgttcgcaccttaccagacctcccaactccctggatcttcaagtctactgaggcttaggtgcatcttctttcactgagtccagactaggcagtcctctgctgcatatgtgttgggggcctcacatcagcctgtgtatgctgcctggctggtggctcagtgtccgagagatgtgatgttaaactccaatgtttaaatgttcaaaatactttgttttcttttacaaacacaggaaaggataatgagcagacctaatggaggcaggcaggcagagatgccctggaacttctgaacagcctgagttctgtctcttcacattctaatcgggcaagtgttttgtcaaaactggctctgcaagggggatgaagaggtggttcagtggttagaagcactggctgttctaccagaggacccaagttcattcccagcacctacatggcagcttacaatagaggatccaatgccctctcacagacatacatgctggcaaaacaccaatgcacataaagtaaataagtcctttaacaaacccgagtacatgggctatgctaccactgtgagtcagttctgttgttgtattggtgcaaaattagccactgccacccctgggtggatgattgagcaaaggtatgctttagtaatagggtttgtatgagagagaaagcagccggcctaatcctgtaggatggagtcgttttctgatttctttctgatcacactgagggatttgaggtttatctagagactattaatggcggcagaaatgctttcttacataaaatatctctgagctgctcacctgactcttttctgggatagaacctagaaatacccatattagaaaccattctggacattttctgaagtccagctgttagggggcttctggacttctgcattaccccaagagttccttccccaccatactctctgatgttcacttctctgcctctcatcatctctttggcaggcatttgactaatatctactaagctaagtaataataataataataataataataataataaacattatctaacttaacatcaaaatgaagactttttttccattatgtgttggaagatgagggtgagagagttttatgtatcccaggctagtcttgaactcactatgtgtgtagctcaggctggcctcaactcacagcaatcctccctgcctaagccttccacaatgctaggattagaggtgtgacccactatgcccagatatttttatttttaaatgggtacatttatatcattataactgttaataattatacttgctaatgtgtaatacacatgatgttctgatgatgtatatattgtatgcagatcaaatcagggtaattagcatatctgtcacatcaaacaattatcttttttttttcctggtgaaatgttcaggatctactttttatacacaatgtactgtaactgtcatcattaccaaactgtacaacagaacatcagaacttactccttggatccactgtaacattaacaaacccctcctcctcctcttcctcctcttcctcctcctcctcctccttcttcttnnnnnnnnnnnnnnnnnnnnctcctccctttcctcatccttctcttccttgcccccatctggttagccactattcaactttccatttcttctagatgactcctacagattctacagaggaataaaatcacatactatttggctttctatataggaaaaggttccactgagtctagctacattgtcataaaacacaagattttatctatttttataaggaaatgatactccagtccatatacatgcatctttcctttctctttttgcctactgatgattcattgaatcctcatcctggctattgtgagggaatttggatacctctgcacatatgccactgtgggactactgggtcatgtgactgtcccagttttaagttttagaacatctttcacactgcctcccattaggccttcctaacagggctttgctttgctttctgctttcacccacacttatcatcttttgttatcaactgacctagtgccaagatgatagctctcagtcattatacttgcatctctctcatgactagtagtgctgagcagtttttcatagtcttggtggccatttgtgtaacttgttttaaaaagaaatatcctctttaggtcttttgtctactgtcaaactgtgttaattgaggttttgttattgagtgttggagttcctgacaaatcctggatgccaactgctcaggggatgagtagtttgcatatctcctctcttgttttcaggttatcttcttcactatgctgattgttctcaatgttgctaagctttctgtcacagttcaacataaccccatgttcagcttttatccactgtgctttgagagtcttcaccaaaaagaactttatccactccctatgtcatattgtcttccctgtgttttcattgttagtctataggagtctgtatctctttttgctgtccacagtcatagggtcttctagaggttgtcactgagaagcctaggaatatgctagggcattttcaacttatccagagtcaagagtttggaagagtgaagtttgtggtcagctttgccagtggctaacactaggctgggccaatgctggtagcttctggattagaatcattgcagttctgggaaccaaacctgtatccctcccagcgggaggcaagtatttgactgttcagctatggggtcctatatatgttagctcatctggtaatgatggtctatctatgtctcttccatccccagaattctctgggaaagggcattttacatcagtcacagaaagaatttttctaataccaacacccagtgccaacctaaaagattgctaatatgtggagagaattttaacgtcatcactcatcatctgcagagcatttgtttggggtacttgtgtagaattgttttggtatttggtaatattttaagaaatatgtttcttcactatgagtgtagctctaaggcctagcatgtgcctagctgtacaaagccttacattcaatctgccttcttagaatttgtagatgatagaagtgagtggatgtacagtggtgtattgaaaagatcatagattcccaaactggttggatgaagatgaactccttctctgcatctgtcactgtgcagcctgagaagtactaaatctttcagatacctgctttcatcttagatgaaatgaataccacataactgctgtgaactgatatagtaaattatgtacagcatctaacactgacatgataaaaactcaacaaatggccccactacatttagtgttgctgctgctgctgctgctgctactactactactactactactactactactactactatgattgtcgtcattgtcatcttagtcatctctgaattattgttataggatgctcctagataatcagcttggaatggatgcttttccacgttctgaccagtatcaaacatgagtcttgaattagagacattgcagcaggttgctctgcagtgttttcatagaatagatagataaagcatgccaatggcctataccagatccagcctcagacagaagctagatcaggaaggctccatctgagaaccattctcagagtttggggatgctctaacttcctttcttatgcctgtatgcagtcttggtaagttatcaagggtttcactcgaaagcatatttaactcagttttgaagggtaattttgtaagcctaattttaagattcaaaagagctgtatctgagctcattatagtgtggtagccattagaattttacactcagtggtgaagactatcataccttgcaatgcacagtcattcgataactagtgtataagacatctttgttctacagctaacaggcttctagctctgccagccatgtaaggtaggcccaggtgacttggttttctactaacagcagcatccagttgacaccaaagggtgctaagctttctgtgtgcacagaaggacaggagggcaacagcgtccctgtcaccactgtgactttgctagaagcattaatataatattcgatcaggggaatttcttgcttttctgtttggatgacactagcagctcagcattctgcaaacaactttaccttggccttctgtctttgcagtactttgatgttggagtctccctgacatggagctcctgtgtcacagcaagagtggggatacaccaacaaaactgattttcaagccagagaggcacatttgaatcaacctctgcctggagcctagcccctcttattgctgagctggggctgtctgaaggaccactcaggtgtcctgaatgtgagaattatctcccacaaacatttcagtacatggacataagcttctataaccctttttttaacttcaattttctaagctcatggttttcttttgtaaatcaaagcaagatagtatctgtgagaatgccaagagtccctcctaacacacaaaagagttgcctaattgtggaatctgaattgatagttctgccattcttcttggcagtggaaaatttctaatgttctaaatgtggattatagctttcttacactaataataagaaaaaaggaagaagaaaaaaaaaacaaacaaactcaactgctcctagatgcttattgaatagtctgtttgcaaagacatgatccaattacagcacattcagagagcaatttcccctcttattaggtaatcactaatatgtactctattgtccattggtggactatgaactcaagtgcttggaatcggaaggaactttttgcagtctggttcctcctgagctggagcaatctcttaatcttgggttttgggtcataagaagaaagacacaggatcgacttagaatcagaagacaacacaggatcatatacacagcttgccgaatgatgcatagtgaggatggaaggggaaagatactattgataaatccagctttcaaatgaagaagcagaagcgtagcactggacctaggaaccactagccttaactctcatcaatgatctcttcatcatttgcccttggtcaggactcccaaagggataaagaaaaggaccaagactcattatagtggagcaagtgctcctagcaggcagaaagctaactaaaagtcacagaaaaagagtgcatagcctagagaagacactagaaaacttgaaaagagaagaaatatgccatgttctaggatattggaaggctcaatattaaaaatgcaaattctcctgccttgtcttcatgtggcttctgttactataatagaatacttgtgctgcttacccttagttttcaacttgatgcatcttagagtcatctgaaaggagaaacccaattgagaaactgcctagattagactgtgggatgtctgtgggggattatcttggagttgatataagagagtctagaccattggagatagcacagtctctaggaaggttgtcctagactttattaaaaataagaaaagaaaaggaaaaaatgagaagaaagggaaaagataaagggaaaggggaggaaagaacgaagcccaaattagttaagtttaagcctatgtgagtgagcccaccaacaacgattctccatagtttcaagcttcagggtcctgcttggatccttgccttgaatctctcaatggtatactgtgatctggaagaataaaaccaataaatgcctcatcctctttattgcttatagtcagagtatgttggtcacagcaacagaaatcaaactagaacacaaagatcagaagatttacaaagaactgggttctagaggcagaaaaatcaaaacctatgtagttgtcatccatgatggtcatcatactgcaccatcccagggccaaatatggaggggcaagagagggccaagttcacttctatagcaagcatgctcatgacaagggtcccactctttggataataccattaatccattcatgaaggtggatacttcatgtcctaaccctgtattaggatccacctcttgcactggggatcgggtttccaatttgtgaacttttggggcatattcaaatcacagcacccctaagttaattttaaaatgtaatatagtattcatcaaaataatataaccagagtttctggaactatattacattatttaaatttcatatggaagaatgaatgagttacattgatgtctagaaatactaaaactgaagaataatggaataatacaattcttctaattattgtaacgtgattccagtgtggtcaaatgaacagcatggaacatgcagaaacaagaggtgtatgtcactggacatgtgtgtacatgtgttaagtatatataaaccatctaccaatttggccatgaaagagaaaagatggaaatgtggagatttaggcagccaactattcaaatgaacaaaagaaagagaaaggattaacttgcccatcaagcctcagatgtaaattggtcccagataatgtctgtttattttgactatttttatattttgaccatattcaccccacttgcttgcccacctaattttgtttcctctacctttctttctcctcctctctctccatagcctcaaatattcataccataaaagaaaactaactctgcctttccaagaagctctcaaatgccaatatcttctcagttagggatggattacatacccacctccccaagttacagtgagattttgtctggctgagcttgccacggggttttacttgctgtcataattgctctaagttcatatgtgcacctggcctgttgtgtcctgaaaacattgtttcttgagtttaccaaccaactttggctctctccaggctttctgccctctctctcatgattttctctgagccttgaagggtagcatgtgatatagacatcccatttagagtcgaggatcctgaagcctcatattcccactatattgaactgtgaaactctgtattaattgtcatctagtgtaagaagactttttttatgcaggttgagtgatagcaataagtgattaggagtcattttaatgctatgtccatttagtagaatgatattggtaagttttcctagggcctctaatgtgtctagccacaggttcttggcttcattaacagtgccagttatagggttcatcctgtgtagggaaccttcatttcagtcagacagaggttggttacccctgtaacattcatgccactattacagccagctggatgtatcatgccagacaggtcattctcctagcatgcagagctcacagctgggtgagactgaccatcaatttctcctcggtagcatacacagtaccttctggcactgtgaaagccagactctggaaaggaagcttccaggtcagtacccatttgatttattcgtggttgtcactcaaccacgtggtaacttcaagaatagggtcctctatgaagccctggaggttaaccaagagcaacaacagtctataatgtttagggcaagcaattcaaaatgaggtaacctattcctggtcctcttatttggtaatgtgtgttacctagcaggggaaatgttatttcataatgagtgatgtctagttggggtgttactccccctttataggtttacgccacttaaactcattttaaatttgtgtatattttagaaagtgcctacatagaaagtatgtttctatgtaattttctcaaaaggttagtcttgcctctccatatagttatctgatcattttaatgttaaaaatgttaaaaataaaacatacctgaaacactgcagtagtttctacttagcaaacactaacacacacacacacacacacacacacacacacacacacacacacacatacacatacacatacacacacacacacacacacacacacatacacatacatatatgaaaagacaatactttgaagagtctgattgctatattaatactaaactatttttttacagaatgcttaatgattttgtacttaattttcttttcagtaggttaataatcatcactttcaaaaaattagccacttggtattgatgtttgagataccattttccacacttttcaacttcagtacatttttaaaataaagggaagtgggtagcatatcttttggaccgttttgggctagatattaatcacaagatcctaaccacaacccagcaaccacacggagaggtgattgatcatgttagacgtagcttgcatgaaagcgtgttttgtaccttttcaatgtttcctggagtttcctgaaggagtccaactgagacaagaatacaggcagcgtgctattgggatgctcttgcaatcatcacagctgtttccaagttgtttgtcacctatttcaggccctgccatggtatttgtccctatttttttctacattagaaaaaaatccatattggtccaatttagctctcttcatgtgctttaaagtttctaaaggaactcttcaaatgtgttctgtttaaagtaattctttttgtttattcaaatcaaaatcacgggaatctcttctttaagcaagctcaaacatttctgtgagaggagtctaagaatttgccctgaggggtgtataaatatgcatcttggtgcaagtcaccaggagatcccatacctgtcatctcacactgacagactatttgcaggtatttgagtctgatttgccataaagaaggggatgctatgagggggtgggggttgctaagtacacgcagttctgttgaagagccttacatagcttcaggagcagttactacctgtgccaccagctagacattcacaccacaataacccccaggtacctcttgcaaacataggacatgaaggatccctgaggcgcaatcagccttcatatgtgccaactcttgcttactcttgcttattcacctaaaatactccagtgaaggaaagatggtctggggacaaaggactttaagggtctgtgtctactgtacagtggtctattgaagtagctgcattcatacatatcaggtggattcatggttggagactttgaaacaagcagaaaattccaagttgttgcttcattgctctctttcccctctacctctcccttccccctacctctctctcctccgtctcccactttccctccttcccgtctcttctcaccccctttccttccctttcctctccacctctgtgcacaggactagaacttctataaaagtacttttcataccctctatcagtattttacacgtaaacattggccattgaggactgtcccaactatcccttaaaggcatcacacagtccagttgctttgtcctaacttgcagctcatttcccgtgaagatccactccacatccaccatgccgaacgttctcacttgccttccaggttacccagcacttctagtcatcccacagaacagagtctgacttatgtctttggagcccatctggatgctcatggtttagccccataaacaagtgtttccgagtgaagttttgtttttcccctctgctttgttattgatttctgaagtgccccagacggctatataatgtcaatgctgtgtttccttccatggacatctaccacgatgcatataagggaaactaaatgactaaatgttcaaaacctacatttatttgaaacaataaaacacaacatttattggttgaggattctgattgtgtaattattgagacagcttaaaattaaaaaaaataaataactgagggcagtgcctaacttgtaaagactgctcctggatgtgctgtgacttcatcacttgtactaaggacatattcgtaatgcttcaggaaagcagagagcaagccaaacaaccgagaggatgtatttgaccaagaatcaactcaagctttgtgaattaagggggaaaatgccaaataattcacaagtctgaacaatcttagtggttttctttttctgtgttttctacctctaagcaaaaacaatgtatgtgctatagaagaaaacgcccatttatgacaagcaaaaagaactacattagaccccattatgatcccacatgctcaaagacatacacatcactctcatgtggattcgcttcagccattcccttgaactatgtgtatgcatgatgtgtagacctgacccggataccctgtcttaccacagtgttaaaccacatgaatcccattgtctgttgtttgattttattgtgaggactcattgttgttgttatcattttactttgacaagcaggaatagcaatagcagaaataaaagcataaggggagaggagtcttaaaagaagaaatattctggaaattgataaaaatatccttaaaaggacactgactaaaagaggacacaaattgcctataggtgaaaatggctaattgttttgcaatccatcctgaaccgtttcatttattatatttcctagaagctggttgttctctatggctgagtcattttattgtgttctattacaactttagtgggattaaacatctggctagggcttgaagagaggctctctgatgtgaggtggtctggtctgtaacatggtttacacctgtctgtgtaccttaagtttcctagactcaaccagaagtcagatgtggacatgaactcactcctctagacatgtctatcaactaataatcacagacatagaaacagcccatgcctgaactcctttgtcttccactcttttctccagcttcactgaaattgtcccatctgtggtggcagtcagtgtcctcacttggatgcctactccttcatacacacacagctcacggttatttctcaaactcttctcttcccctgtcatacgaatctcttctgtatccctattttcatttctcctatcagacatgcctcgctttcccttcttaaatggtctgctgcctcgtccctactatctgcttggcaaccggtgtattttcacagccagtgctaacatctgggctctgactcttgacttgacatctcttctagggcctgctactaacttccatcccactgtctcagccgaacctgcttcttcatgcattttatcctattgaaactgtcccttgtataatcgtggccttctctaagttttcaaatcctgtttgacccttgccctttgagggctgttggcacttaattcacttgaattctttcctgatctccatctctacctggctttccatagactctcgtgtattttgtctaccaaatgtttctcctgatagaaagcaactttaagtctttgttctgagccctgtttctctcttattgtttctgtttttcacctcccctcttcgttcgatctattttattacttacttgtatgtgtacgcacactttgtctgtgtggtggatttgggggccagaagacttgtggaaactggttctctctttcaaccatatgagttccagatatcaaactcaggtcattagggtgaaacatctcacccagatcatttgaaaaaatcattttattatttaatacatataggtattttggattccctggaactggagttacagatggttgtataccatcatatgggtgtaggtcctatggaagagcagccactcttcttaaccactgagcccttcccacattattacttgtttttaatgtagtatggggatttgaaagcaggcttcttacataggccaggcaagtgctctaccactgaactgtgttccctgtctccattactttttaaaaatattgtatggtgaagagagccagggctgtgtgtcttttgttttgttagcaatgaagttactacctatctcctgcttgaaggacccatggcacctggcatgcatggagagctcttctccatccatcgaacgctgtatgtggtgggcacttcaattcagagcctccgatcttctaaccctaggagctttcacatgccaggccctggccatttgtctttccccttctctttatttcaatagggttcatttaataagagcattgaagcagtaaaagcatcctccttttctctctggccctgtcttttgttctttatatctgtctgaacctttctttatcagttggaatattttacaggcaacctcctcaacacagatgttccaaggttgaaattttcgcttttagttttgcacttctgagaactcttgatgctttctgaacgtttcttttttaactctcctattcccatttcatgaatgcagtatcttctcttgcctgggagaatattgatacaaaaaacgtgggtaccttaagttgtgtttgctgtcttcaggttatccccacctcacccactggctttcccttctagtctctattttcctctcacgtctccagagaggttaggtttaactaacattcatattttaagactaaggtataaaaaagcctaaaatggcttgggaagtgggagaattctgagcttgtcaactagagcgcattgcttacacactaattggaaaatctttttctttggggctgcctctggacatcagcatgtgtgagttagtctgtcttcacagacagttcttctgattagagccctgttttgaaggataacattcttagaagtctgaagaaaaggccccatagttctcaatacagactctgacttcatctcaattatttagtttggcatcccacatcttaccccaggtctgttttaatctagaaccaattggtttaatttcccaagaaggtaaatcctccaaagtgtggggtggggactgagagtaactggctgtgcactggagcctggacactttaaatgaaggcataatgctaacttcatcagcaagaggagagaaaattcagaacattctggggatggctagtgggcagctctctcaaaaactgagctaaaggcaaagcccatggtttatgaaagaatgaggccagaaaaaaaaatgaaaccaatgcaggaatttaaaatagctttttatgtgtatggggggaaatgaatcatgtgaagagttctttgcaacattgtctgtaatagtaaaaaaaaaatgaaacaagcaaaatgcccatctaagtagaactgtcttatgaaatgtgttaattgtatatgaatggagtcaatctagatactcatttggaaaatatctatctatctatctatctatctatctatctatgtagctatacagatatatagaaatacatgtgtatatatctcccacactttggaagatatactttcttgagaaattgaactaatgattgtttctagactgaaagagacatagggggaagaaatgaagggcagcacttaataattggggatatatatattttagttattattttaaaaagactctaaagtggctaattatacccaaaccacattagaatttaatatagagaagtatggaaaagatcaacagtactgaaatcaggaagaaggactcaagatagagtcctaggcagaattatctatttatttatttgcttatttatttatttttactttatgacttctatactcctcctgacaatatatattatgtacaggtaaaattttgctaaaagttattgacaacattgttaccttgctgcccaaataccaggctgagtgagcagttggaagctgcaattgaaaatccatggattccaggctggctttctccatggagagagaattggtcccctggctgacctttctccaagatgctttcattctacaactccagatcatgggttctcctttgcagtctttagggttgtttgtttatttgtttgcttggttttgttttgctttttgtttgttttaagtttttagatcttgccttgcagcacttttatttacttaacctgttgtggtgtgaataatgtaaaaaaaaaaaaaatcttgcttagctctgccctctgacctggaacaggaaatggattagatatgaggtgattactgagcactgcccataagccataatgtgtttgtgacaacattggcaactggagagttaaccctctggatatgtcttttgttctagaaaaaagaaactattcaaatattcggtcaaataattcagatatccatcacccttatgggggcaaaaagcaacacttttactcctattccatcctcccatctccaatccccccaaatcctgcttcctgtattttcccatccttatatcagggcaggtgtttctcaaccagcttttctctcatgtgcctctgtctgctactgtgcctatgaatactctattctgcatctctacatcgttggttgaaatgaatgatatcccaatgtgcttaacttgcttcagttagatgacatttacttttcttctttctgaagcttctcttgtgatgggtaatacttactaaggtacatatatggggagtaacttactttgctactcagatctaccaatccagtgttagtttctggattttgtccggacctggaaggatattttatatgggtataaaatttagaattgacaagcattttttcccccataggacatttggggatgttgaaagttcaattgtagatgtttttattactttaaatatgctctgggggctgcagagatagctcatcagttaaaagcacttggatctttctcatttattctgcatgcctgacattgcttcatgcagtacctatttttcacatgtagtctggatggcttcctcagagactgacctcctattttcctttgagctataaaaaccaagttcatttcattgcctgtattttactctctagatttttcttcaccttttctaaattggctagagttatattactatattttacatttaattttatggtctgcttagtcatttcaaatgtagattttagagttttcaaattgtattactttttattgcagtggctctttctctttaaatgtgtactttttaattttctgcttctcttttatacttgttcctctagtataccttcatatttcaaatagtttgtaatgcagtgatatagaaagagaaggtcatatgtttaattgattagcttatgggaagcttattgaattgtatagactttggctcagattacctatggtgattttatttatttgtagagtttgtttataataaagtttataaaattgaaaagaaggaaggannnnnnnnnnnnnnnnnnnnnnnnnnnnnnnnnnnnnnnnnnnnnnnnnnnnnnnnnnnnnnnnnnnnnnnnnnnnnnnnnnnnnnnnnnnnnnnnnnnnnnnnnnnnnnnnnnnnnnnnnnnnnnnnnnnnnnnnnnnnnnnnnnnnnnnnnnnnnnnnnnnnnnnnngaaggaaggaaggagagaaggatggaaggaaggaagaaagagagagagaaagagggaaagaaggaaagaaagaaagaaagaaagaaagaaagaaagaaagaaaggaaggaaggaaggaaggaagggaaggaaggaaggaaggaaggaaggaagggaaggaaggaaggaaggagagaaggatggaaggaaaagaaggaaggaaaggaaggaaggaaggaaggaaggaaggaaggaaggaaaggaaggaaggaaggaaggaagggaaggaaggaagcaaaagaaaaagaaaggaaggaagcaaaagaaaaagaaagaaaggaagaaatgaagaaagaaagaaaaagaaagagaaagaccatctagttacttaattcttcaagtcagttaaacaaagcctataaactcacttcataaaacttgtcattagcatcaaatggagtttatcattctagatgttagttttccctttgtttcatacttctaagcttctgttttaagtacagctaggtttctaagacattgatagagtagcagtagagcagggagttccactttggtttgagtttgtgaatgttaggaccacctctaaagactgtttgtaaatacattgctcaatactccagttagtccttagtgatgcaaggtcacccaaaataaggggtcttaacagtggtttctatgcaattcctttagcgagtgccaaagatgttatctgcagagttgtctaaagctgacattaccaatatgaagtctactggcctcaactgcccagactcccatcagcccacagactgcacagtccatgcaatgtttgatctttgatgtcccattccaatattttaacaaattacactctgtgggtttaaattttccatttctcattaaaagaagaaaaaaggaacaatctaggaaattgctattagacagtggtggacctgggcaggtgtgaacagcttcaggctgctggtacttcagacagcttgacctctgctgagacattcagcttgcaggcacctgagcttgcaatttctgctctaaagatcaaaaagaaaaaaagaagaagaaagaaagaaaggaagaaagaaagaaagaaagaaagaaagaaaaaaagaaagagatcagagcccaagcaaataaatacctatttgaccctattaaatatgtaaagggctgattaactactgtgtgaggtgcttcatctacataggtcaggacacagagcaagcctgctgtgtgagctctgaagacagagctggccctggggagaacatgtggctctggatgggaccacacagcactagccagatgcagaaaatgtgaatcagttggcttgagatgagcagataaaggttatttcctcttcctgttcctcttgcagagttgcagtgtctctttagaatagtggctctcaacctttctaatgctgtccctttaatagagttcctcatattgtactgacccccaaccacaaaattatttttgttgctatttcataagtgcaattttgctactgatattaattgtaatataaatatctatgttttccaatgatcataggcaaccctatgtttggcctggaattgttggccttaaggggttcgtcatccacaggttgggaatcactgctgtaaaagcttagcgttgaagtccttagtgggccttcacttgatactcccataaacctgtgggtaatgagtaagaagaggacatgtttctaggcccaatgggttccttctctgctcttctgcaagaattcagctagatctcaactgagaggaagtgctgtagatcctcatttcatcccctgatctgacaggttagctgtaagagtggctagtactactgtgagagattgtattgtccaaatagagtgtccccacatatttaaaggcaagtttttaaactgcagcttgcatattttcatatctaccccacagcacccctacctcctcaccacaccttgaaggagtcttcttctttaaccctaatacttgggtctcccaagcaggactccggctggtggccatgctgccccagaagtcatctttctccagctctcccacctgccttatccacagtgtgatgagtgtgttttctacccatctttgtggttacttctccacacagcctctcattgagaggttttgagttgcttaagagtgattcctacttgctttattcttctctgtattaccatttccagaattcagcattctgcttggctacaacacacactcaacaattccataggatcattcattttctctctctctctctctctctctctctctctatgatggagaaaacttgatgggtttgcttctaaacgtgctcacacactgttggtacaaagatccaataggttctcgacaaggtgcatgagacttactcctctggagacaatgatgcaagataaaccatgagaaaatgtatgtgagagcatgagaaagtcacaaaaatagttctgcaaggcacatgaaactcgggcatgcactctaccattgatctatacccctacccatgtgatgacttttaaagtatattctctgatgacacattactacatctgtacaattctgtgaccacaaagaccaaccctggtgcaatgtgaaagatactgtaatggcatacgtttcctgaggatcaggaagcattcaggggcatcttgaccactagctactatagcaccaggaaagctctttgattctcatttatattagataagtggctgatgccaaaatgctagcctgtgctttcaaatactaagatggcacagcctgacttgtttgaatagaagtcaccatttttgctgtttaccagtgctagctgtgtatagttccaatcccaagagatagatacacacgatccaagtgtgcaaaatgccaggcttggtcacagacttctttccatctttgtttttgataagccagtagtttcctctgaaaaggtgatacctaccacttacaagaacttgaggttgaaaatatttttgttcacatgatactaaatggaaatcttggcttttaaagctttatgctccgcacagtctaccatcattctcatccgcaagtattgaaagtgtcatttggcatgcttagtttccagtaggattgtctcccaccccttctacctctttgttcttttgctttgtcaaggtggcctttgttttgtaacccaggttgctattacagtcttccaacatctgctttgcctctccagtgttaggactgtatttacattgaaagcctggcatgactgtatcttcaatgaccttcaaggatggagttaaaactaaatgaatgaaaatggagctttgtgggcagctccagatactcttgtcaaccccactatacaggtagattaagcaatttaatattgcagaaatagcatcagatatcattccaactggagtggaacagttagatcatctcagatccccttcccttatgccggaatttcttagactcttttaaaatcatttgttaaaatatgaactgagtaaaatataaagctaatcagtagctagttataaatagtataaagtaccatgctttaaaaaattggaccttctagaaaataaagaatttgctaaaattaatctgttgaatggtcgggatatttttagcaactgacgtggcacagctggcccttctccatagagagagcagggcctcttaagggtcagactttaagattcacattgactcctgaagcaatgtgctgacctggaggcctttggtgtgagcctcggctgcagctttggtcaggagcctgaacagcaaagaagctctttgccccaggccaggttacctaacagctggtcctgtagggaataagcctgccactttctgtagcaaagggttcaatgggcctcttctcactcctcagaaacatcaaataatacagctccaacaactgatgctttaataggacagtggtcaggacaaataaagtctgtagaggcagttattcttaaaagtaaaggaaaacatgggctaagaattttcaacaaatggaaggacatgggaaaatggctgtacagtggctagaagggcccttccaggggagtctctctgagaagaaacagcagggcttcaagcctcagccagcagactgtgagtgcagtgggcatgggtggagggtaggcaaagggacagtgtggacagtggaaagcaacgggtgccgagtgaggttaggaatcagaatgagagccaccagcagaactcttgaaatcacacctccatctgacacagcacttggcaaaatacgcagaagcaggtttcaatctgagtgattctaagtgatggccagatgacagggttcacaaataacctcctaacagttgcttcctggggctctgggcctgtggactggtaaatatgatcacctgctttgttagctggagatctgcttgtccttggcattgactgcagtggaattttaacagaatcttttttgcttgggaaaggccggatctagaggtatatgagcagacagctgtttgaagaattccattaacaataatcagacctcatcatccacatctattagacaacgtgattctaagaaccatcggagaaaaataagggggactcgtgttatagctccctcttcacaaatgggccaaaggaaagggtcacatataaagccatggcataggcactatagatcacactaagacctgtcagtcattgtacctagagaatccaacagcttgttcagcacacagctgcaccctaagaggcactgcctaaccaaacagattgaaacctgcccttccctcttcttcgtgatcctaatgcatgcactgtaatagaaaaaaagccaagatcccatattaaaaatgcagggagcactgcacaattttcttccccatctctaaactccggaaacagaggtctatccacttggatctataaagcttatgtgataaaatatggctgtgccttgtctcgtctttgaaatcacaaacctcttgagcaaaggggccatattttatctcctagacatctaccaacccaggcccggctctgaactcatactaactgaggcttagggcctctttgttcctcaaatcaaatgcaaccaattctctctagtacacataattgaaagcagcagtctatctgaaatctactgtgctgtatattttccacttggagtaagagtgtgaatatgtgcattcagaaagtatttaagaccaggttgggaaacgtaatgtaaatgtacagttttcaaaacagtctttgaaagtgagccagcacagtgagaaacagactgtggggagagttaagacctggtgtctatctgctggtgaaatgaatttagtcaagccacatgactaaatttcaatctccagatgagctattgttgaaagtcctctataattctaaattctgaattatttttcattcgtggctagagcaggtcacgagacacttctcatctcaacaaattgattttggtttatatatttatcatctatttccctttattgccggcacctctaaaaccttaaatgcttagtgcgttctcagtgaatactactgtgtgaattaactgggactccatcaaagggaagacattttgaaaagtcaatccctttctatcattatcgaagtaacttctccctcaggttcttttgtgttaaaaaaaaaaaatgacaggtgaccaattaccacagacagcattttgcttgcagccccgctgctcaccatgtaactgtgttccattacattaggtcacactgaactttaccccatgctgtcttgagcatcagtccgcccttggagaatgagagtggtaacccactggtctcttcaagaagctttagcctggcaaaagagaattggagacagctgaagcatttataggaaaaagcagttcagccttccatgtgtcggtacccatgctgtctcctcaccttagcttttcttcaccaggtgaggtacttttctcaccctccccttccctagctgataaccagaaggttgttagggtttttcgtttgttttttacaaaaagaccagctctcctgttggactatgagttgagtttgagaagggtaacctcaagtgtatccaacaaacaagaatgttgccaatttccacacatttattactatttagaaatatttagaaagctatgaacattcagaatccagttataatattaccatttgtactgtttatttgctcttccttatggaatcctagttcatccagaggacgcttctatctgttctctgatcttgttgcccccatcgaggatagcggagggtatggctgtacatggtgggttgccaaccagagctgggatggactggggagttagttctaggagtctgcactagtgtcttcaggctccatgttttccgtgtctgtcatgtttttctgggcatacaaaagccacacgagccatcgctgccccgcttagagagaacggatgaaacattttgagacacttggatctcttgtccctaagtttttattgatttgttgtaattttacccaagttattatatatgctgtttctcttaacatatgggattgtaacatctgagaggacctgaaggaatttggattccgacttcctgtggtcagcaccaatgacaaggcaactgtgaagacatttggagcactgtttgccttcatcacagagtctcttgcatgtggggatcagacatgggcagttgttgagctcagaagaactacagattcggtggcttatttctaagtcacatctcagctttgtattagggacatccacagtaaaggactcctgattgctcacatgtttggcaaagcaagggaagaccgttctcacgggaggacaggaccaaccacttacatcttccaagaaaaaaatccttttgatttttgagattcctgaacattgggttattcgtcctgactataagtcaatgctcatagtagcaacaaaatagctctaatcaattgtttggtaaaatatttataaaactccaaacatgattatgctctttgagcattcagcagggacatgagacaggggtgttgatggtgggatatcttcacttcaaaagcttccccatgaggaacatgtcccaaatgacacactgcataggagcatcagcaagcattctctcagatcactgaggggtaagcagttgaatcttgtttacagagaggtgtccagaccaccatttcatgtgggagttttatccacatcacttttagcatctgatttggcttgcaatacaaagcctgagataaaaacaaacacagggtatctgctactccaaagactagcaacatagataactatttttcccttgttggtgccagctagaccacacacatagaacatcaaactcccttttctcaaagaagcagagcagcacacctagtctctctggaaaattggtgtgcctttaaatagatgatggcttacttataatatttataatatgtagttgggcagctgtagacattgagataaacaggaaggaggtcccagcagcagccattcctggagctagggtacatgtagatttagggtaggtgggtagcttttgaaaggataaaactgaacagaccacaacgctctaatctatcaacccctattctgcttaaaatgaaagcaagtggccatcttaaggcaacccacagccccaatcttttggtttatcctgacttagaggcatagcatccttacctggcaaaagacaggaagaacaccgtcacatttggtcatattttgtgatgcctcctggaaacagctgtgttgtctgtgtttgtatggatacaggtttttaaaaatgaaaattgtcatggcaacagctgcagccctttattacagagcagtggaagtgacgcagatatttgtggggacatctatgctctcagagtaatgtgcacctttcactacagtggattttttttcccactaacatttctgtttaaaaaaataaaaggaaaagatagaagaatatgctcaaagaaactcaggaggaaatcgagggcttggagagtaaatgaatggggtggaaccttttatatgcatgttaaatcatatatgttgttaaatcataaatgctgttaacccaactgttttacaatgctgttggatgcagccaggagtaggtacatttgctttgcatgtaaccctgatacccaaggtgccaactaaacagaatcactgaataacaatgtcagtgataattagggtgttcactgaacctagtttccagcctctttagcattctatcttccttgaaactttaagaaacctctacatttgagattatagaaaacaattttcccccattttgtcagtaaggagtgggtagctaagagtaagcttaaatgtcctcttaagtctgagagactttcacggactcatagtgaatgttcaggcactctccctttctgaacatttgcttgagttagaatagttccaggaaaggggttgctgtgacctggaggaaaagaatctatgtattgtttcatattccctaagctagattttgcatcatctcgatgaccccacatgccatcatgcctttgatggaagcagcagttaatcccacaggaactgttcaactatgaaggaaagagatactacatctactctgggtaacttatggaaaagataaaacctcaataggctggtggcctctaaggctacagatgaatacatcttgagagtgtggtaagaacatctatcaagtccaatatccttcatgcacgtgtgacacgtaaggaaatacagggctgtgggtgcctgtgagctagcaggatttgagaagagattagaatgcgtgttgcccactaatctctcacatggtccagatcccttaaatgaaagtctgtgctttataagccttgaagctttagtgtgtgtatttctcatccagagtcatattttgtccagactttcccctaaccaaactgtgttgtgccctagtttgtttcccacatcactcagaagaggagaagcccgtggggaaaagctttgctcggggctgtagaaaacagattgcaaaaaagactccgtctcattctgttctagaaaatgacagaaagccaaagtctttttccccttctaagttcagccaccagagattgtttggtttgtgttgtggacaggacagtatattacagagctagtgtgcgggaagcagagtatgccagctttctcttttacggggccaagcctgttctctgtccaaaccaaaacaagcagaggtcccagaaatgtaatctgggtgtcagaatcccgcccataggttccgtccaatgaagtctccgctgctgcttcgtggttcatgttcgttccttacagcatttgtctggacagtcaagggtatgggtaggtttctcgtcagaggttctccttggccatcctcactcttactccctcactccactcactctgcccaaggagctcattcaccacacggcacgggaccccagccgagaagctccagaggaaatagaacactggtcactttgtcttcactaagtcacccaacgagaaggatctgtggatttaaatccaggagcaagaaaggtaacatggaaagaaatgcagtcacaaagaaagtgagagttcactgcttgaaagcctttcacagtggggtgacctcaggcaggtgattgactggggttgtagacagagaaaggatccccactggcatacaatgtagtttgaatgaactatgtggaagcccaaagaatatgaatctataacaggatcttcttaatagctgagcaaaaggaaccaagctggccagccttcagtgaaaaactctgtgggtgggcctgggtcagagcctgtccctgtctctgtctctgtctctgtctctgtctctgtctctctgtgtgtgtgtgtgtgtctgtgtgtgtctgtgtgtgtctgtgtgtgtctgtgtttctgtatatgtgtgtatgtctgtgtgtggtatgtgagcatgtggatatacaggccctattgtattctgagaaacaaattatacatttcaaatctcactgtctagggtgccctgtgcagttacatcctgtctagatgtactcaagtgtgcttggtgatgaaggtctaaagcgccttgctactaaaagagtctccatatggaactctattgaactctgatggaaaaataatggtctaactacctgaaagcttcagtagcagccaaggatagatatgctacttgctgccagctaaacaaaacattccacctttcaaacataaacattttgttgtgcctgggggaaggtctggatcaaagctaaccctgttctatttctgtttcaaaggttcttctttcttgggataatctgttgggccacttttcttttcaaattatttttgctggttcactgctaaataaacacagagaagaagaactaaggaaatgtgaagatttaagttaaaactaaactatatcaagactcacagtgggaattatctcacaaagaagcctacctactgggccacctccaactacccttttctttaagcacagacttgccaaagcattcacagagtatgatcatcaaggttgaaagcacagcacaggatctgtgctacagactggcaaggggtcgaacaccagtggtacaaatgactacatgattctggctgcattgcttaagctgactcaatttccctttggaatgtgtaaataatactatgtctgctataggtttattgtgagaactagcaagtaatgtattcaaaatagtagtcaggattctggcttgcaaaattccctcaataaatggcagctattgaaaactaaaatgtagaacccccaaatccaggagaatttcaccactgaacattttgctgaaatggaacatgtaagctttccacatttagtgatcgcccagtttactaacgaactatcttttcatcttgtcctggtttattctactgtagtttgcaaaaccaagcatctccttttccttcctctaacagttaacattctttttcttttttttctgaaatccagaatttcaagagttgaaggttttcagtgggactatccagagccaggactctccctcctcaaccactccacagaccagacttatcagaccaaagtgttatcagggagctgtcaggacaagcaagcatggcttgcatgctgccctgttctctgggatgtcactgtactggagttcaagtgctggcactattacgagacgatcacacttttcctgtgggccaaattactcagaaaatagtctgggtgctgtaatcttctttcataaactaataagctcttaataatgatgtatgttaccactgattgccaaaatgagcttttcataaacaaaaccaggcatttgttatttctcagcctgcgagctctttacagttctgcacatttttttttctcttatttaggtggcattctcctttcccctgctacatcacctgtttctagttggatgctttcgaacaatggccctgaggcatttattttaaactgaattttctaagaaggcagtaataggtttgaataaaagtctaatgaatacacttaatccagaggtgatagtggggtttaattattaaattctaccatttctcccaaagaatttgcaacttatgtataacctttgtcccaaccagaaggatagtggcatgcaagctcactagattgtagcatagctattaaaggaatcacatggttgtgtggttaaataaaagtcccactcaataaattcagagagagaggtggggtggagaatacagagatgcaaagggagaagaggctaccaaatagcggtccttctatcttccggcttccagtgggagcagcctatctctggtacttgtgagggttccttctaagccacaattggtctgggtcttcttaggagatttatgagaaggcttttaagtttgaagccatctcaaaggcacctgcatataacaacagttctaatccccaaagtattatttcaagatttagtccttaaaaggaacaatttctcttggcttcccagtgtgcatgaatatgcaaatgcatgttcaaacgtgtgtgtgtgtgtgtgtgtgtgtgtgtgtgtgtgtaaaataaagagagagactgttttcttgatatacaatgacagtgactcttacagaaatctagccacatgaaaaaccattcacgtgggaaatgctatatctcatatattcaggttgatcccaaaaatgcctggttgtggtagccttgtggatttttcatgtattgacataattaatattaatctcaaatccatgactacaaagtcaagctgatcagctgagatgtatataccacccacaaacctcattctctaaggcacatatggacagctgtcaggacccaccattattttctcatcattctgtcattaatgtcaccttagtctctcctatggagtctgggactcagagcataggttccctgctgagctgggggcctgtgaaaggtcacagctaaggcgcagagttggtgctcctattaccaagatcgtcttgtttcacatcttgtttaacatctactcagcctctcacctcttgctccccactctgccatcaatattgtgttctaatttccgttgttcttagggcttgtgaactccatgggcaatgtgaagaaaatgaaggaatatacttccagatcaaaagcacgaggccagtgacacagtttggttcccaccattctcaaactcccagaatcactgatatcttgacaccaagcaggttgttgacatgactataactcaattgcttgattctaacttgagttttttttccctttgatttctttccatcccaactatcactaagtcttccaattttctattttccagactccaagctattataggccgatatacaaaactaacccttctgcccccaacttcctggggaccaagcagtagcttatgcctctccacggtctgtccaaacttaacaagtgaagtgtttgcctttgtgctgagtctctgactggaagttttagtaagacgcaatattgcatggtataggagagatctgctcacaaatctgtgtgttcttctaggctctgctgttgaaatttaaatagaatttacagaactgatgctgacaatccagtgctggagatgacttaggcttctgcagagttcgtactttctagaaatttctggatttataatttaagaatattatgtagaatacaaagaacccttttttaataagcttttttttgatcatcaggcttcaagttttatatacaaaaaaattaaaatgtgtgggtcctggcaaaatattgtagtttaagatggtaacaggtgcttctaatccaaacataacttgaactcaagtaaaattctctgcagctctaaaaagatggatgtagagatttccttaaattaagctgtgatttgggacccagatgcacacttaattgctaataaatgggaaagcggtggcaggagagatgatatgagggaaactgttgatcacggcaaatattttccaggcgttgtcttctctgtcagctgtctcaggcagctgtttataatcagagagggagaagtaaaaagctcccagattaggaaagcagctcattgtctggaaaacgtcctttgacccagctagaggaaagtggtatttcattcagccacttgccagctgtggcctcagcacacagtacttgtgggactcaggcgccaacccaactgaacacctgtgtttgattcttcttatctccatgtaacatgtgatgagtcctgaactggcagtttgcaggagagcaagcttcagtgagttggtgtcctcttcccttaattgttgttgtctgcaattctgcaaaatgtcaccagacactgttctcaaatatattttctttccaggtataacagtaggatttctgtggtgtgtctatgtatcttggggatacacagctggaaaccccagattccagcagaacagcaggaaattcacctctgtttgatttgcaggactatggagggatgtctttagtgctcagttattgttcaaaatgcacctgtatccatttgtttgatactatctcagtagttctatatgtctcattgagaaaagagaaattcagcttttggcctgagcagattgcttattctattctagaagattctaataaagttctaacatattaatggcaatccctaatggtccccatgttcttagaaatcattcttaacttttactgatttctttctggtgaaaaaatgataaaagagctagcaatcatctcataatattaatgtaaatattatcaattattaagttaacctctgtgggtttttctttcctatattctaggtgttaagtattacatgcacacacctaatccccatcctgaaagaaatacaacttaaacataattttatctgtgttttaaaaatgaaaactcagcaagataagtaatttctataaagagacaatagtaacttcattttgcaagcagagtgaatgagagatgggatggaaagccagagttaatgttgacaggaatgtcatgtgatatggatatagtttgtattgtcaactatgtactacaaagaaacagtctttattaagaaattctagcccattggttgtcaaattgaagtggatattttagctaatgtgctatctatttattgtcccttgtaaatggtctctgcctcaattgtctgaaggttgtttcggcggagtcatttctttgcacattctcagttggtccatccagatgtttcccttctcaggcagtctgctagatggtctccatcagggagagctgagttgagaagctgctgttccactactgtgcgttaagttggggaaagaatgttacctgttctgaatctgttagtgtgttaaatgagaatgctttcttcattagattcttgagaggcttaaagaagatgaagcgcataaagtcacttaatctcattaagccatggctgcctcacctacaaaatgaaataataacgcacctgcttcaggggttatggtgggggttgtatgaaataatgcttacaacatgtttaacaaagagcttgacaagcaaatgctggtcaggagagaggggtatcgtaagtcctctactaacctgacatggaagaggatccaactccattctctgtcttcaaacctggatattatctttgtcttggttgtacctctttatgattatatttctttataccagacttccattgtgagtggctatcaacctgcttttcaataccttccctatctattttgaccccaaatctcacatatcacaggacggttggagctctgattttattaatgagggtgaacagaactgaaaagttgggaatgggcaaaaattcccattggggcctgggagtccccatctcctctatatccctccctgaaatctctcattggctcaaattcctatttaatgcttcaaaaaaagttaagaaaatggaaatttgaagagggtttgcgagctactttcatctttaagtctatctaaaattcacttttaatattgagtatgagagaaattttctcaaagcccacagactagttcaattctaacaagacttcaagacttttcaggctaaattgcaaagtaatctaagatctcctttcaaaaaatgtgcctatattacacacacacacacacacacacacatgcatgtgcacttacatgcataatccttttcaaccatcttgaaactcaagagttctttttgtcaccttgaagttgggatttagtagaccaggactacttaggaaactgtcaagggtgtgattatgtgctgaacttcctgactgttcttgatgctattatcaatctgagccggatgaaaacacacacccttattgtatcggttattgagagactgcttgttccttcatggttgtgccaacctttctaacaggaggatttgcctgggcacaggttctccttccctggcagatgtggttaagatagaaaacaagtcagcaaccgttcagtgaagagtttcctggggccatgttaccgacttctgagggcatgggtttccatcatagtaccctggctaggaaatctttcatttctctgtataatcatctccaacttcagagatctcaaggcttttgtagaaaccagcccactttcttttagatctaagaatcaggacattttgaaatagactatgatctaaaatacctcccagtgatattttactttaggactttatctgctagaaacaggagggatgaggtcagttgttcctctggggccacaagtcgttcctctgcagggtcacctctgctatgcttactgcagctgcttctctgaaatccatcaatcctctggccttcctgtgccttcttcatcttcctcctcactacccttgccttctcggggatcttgttcaggtgttagcctccagctattgagagatctggctgcttcagtcttttgctgttctgtgatgtcagtctgtcacttgcctgactttctatgcagtttcttggaatattctatacatctttcctctacctccaagctcttcagtggctgggcctgaacccctagaggaaaatcctaacactggcttgaaaggcttcccaggagtcagctgcatcccctctctacctgcctgctacccttcacacattcctccaggcatactggccttcttatagctcctctgaccctccttgaatgttctgcacacatggccccaggcatactggcttcttagtggttcctctggccctcggtggatgctgtgcttcagagaagaggatgcgcttcccacctcatttccctcaccaccatcttcaggcagcctttctgcacagcacctattcaccctccagtggacacttccttcctcgtaggccaccctagtttctgttcagctgctgtcatttcatcgtgtatttgttagcttcactgtatttatgttgtcttctccactacaacataagaacggctgtgtgttgtccctgttgcatccccagagctttgaacaatgtctgcacacagtaggggtgatggatatttgttgctggaatgaatcagtttggcttgacacacaaactctacttccagcggaattatccttgtcttttcctttcatggatgacattagaatagcaagatgatatttgtcaagggcctaggtatgattttgggctcttagcaagccatcattaaatgatacttcagagggcaaaagagttaattaatgatcctccatggcacagcccattgcaggcccctttagcccttgtgaaggtccccatggaaaggccattgggaagaaaccctatgcttctaactcaagctcagtgaacttctggccaggaccccttattattaagacagctcctctaacctcccagggtgtctggaatgcccccaattcctgaaaccattatgttttacagcaggttctcttgacagaacttcatcagcctttggcagaacataagcccgaataatgggcaggcagacgccagaatgaattccaatgtgtacacacaattcttggccccataaaaatcaattccttattcataattaagcaagtcccctgggaaagggcacgttggtatagttattaaaagataaataatagataaggatccacttgtttcttgctctgttcatctttcttttcttagtacaaagagctttaaacatgaagtaacactgtaattaattcttttctcctgcctggtccctgcctgtgacttacaagcccaacaaaatgggatagcctctgagaaagttcattgccgttctgtgctgtattgctcttttaaaatgtgtcccaaaatgcagaatgacaacccaatcctagacagggagaaaataaactgtgagcatctgacattaaatgtcgcaagtcacaagagtgcttttctcatgagccttttctcattttccagatcggtttagagacttgcttaaacatgcaaaaaggctgcatagtaaagagggccgcatcttccaactgctcaagtcaatgaaccagccagtactaagtgttgggaaggatccacttgacctcacagagttgtgttgagagataatggtgttgtcccttctcacaggaatgtttcctcacacatagctgagggagggaactcccctgaatcactagactgctaatcatcctttaggggagaaagttaactctctctctaagtactgtcaaagaagggcattattggtcatagatcctacaagtgtggggcacgagcacacagagttctggtgccttttttggcctatagaattaatagagcaggagccagttggagcaggacctgtagcctctctggtttggtgtatttgggaattaggcgaaataagacagcaagtgccatgtttcttcacctaggaaacttatcgggaactttgagggcaagagacaaggtaaaggcactgaggtcaagcagctgctgattgagggatgggaataagcaggaatatgtatagctggcagagaagatgagggttgagttgatacatgacaggaaggagttctcaacagagcatcagctgagatttctgggagaatggttcaataggaagcagagtgtgactagagcacatcacaggaagacccagaccaagagccaggcataccctctgacacccagtaccatggggtaccagcagggggacctcactgctactcatccctttaaagacctttctgtgtggagaagaggaagcctgctttgaatgttaaggtttaaagttggacttagataagtttaaatcaagaaaagtgattgactaatagagtttgaccaagaaatcaacagaactactaaaccaacacaaaggtggattctatatagtacaattagagcagtaattgagggcaggggaagacatttcatatttatgtcctagttaatcaaaaactcttatcaatgaattagtgctgatagtttgaatttctttgttaaggattaaagatttggcagaaaaatggaaggttcttttaaatatttatggctattttaatctgctgggggtctgctccagctagaatgggttgaagtgagacacagtgttggacacgggccaaaaattgatgatctccagtcttttaattctctaactgctctgtgttaaaatcccaactctctcatactgttgtgtgcttcatgaagcactggggaacttaattctttatctctcttattatttgctttataattctctgtgcttgaataagcgctggaaacttaactctttataaacttactttataattctctggccattaacatatactatatagcaccagggaattcactagaggatttactgctagcgctcctttctcttttgcccagaagcttctcccctccctggtgaggtgagagagaagcttggagcaattaacttttattgaaccaggaaaagaaagtcacactcatgagagaaaaacttttacacaagcaaatatgcacagacacacacattcttacacacattcagacacacattcacatttttgttgggcccaaccatctgtctcatcaacttaaatacttagaactcttatacttaaaatgcatatgtagttttgatggatagagcagaagcccctgtaagcaggtttcattgtgcaaacaccagagcagaaagaactcactcattctggatgaaaaataagctacaaccttcattgcttacagaaagaaaaaaaaaaacttctatctttttattgagtataaaaatcaaaatcaaaaagcaaaccaaaccaaacaaaaatctgtctttgtctgttgcaggaaatgttaaaaaagacgattggcacgttcctgcactagtgcttgcccaccaactctctgcggctagcccctgtgccaggtgatctcagcccacaaactcctggccctgcaaggccacaaggctcctgctgggccatctcaaaaatgcccctctcccccgacccccgccacccgaccccctcagtgagttccacttgcttccatgtaacgccccacgcacccctggttatccatctcaacacctaattacatgatagaaataagactcttaaacttatagttaaccaattagatttatatatcaatttaaacacaatttacaagatgccaatataataatttcaaagccaattgataatgataaagctttaacccaattattctaaccttttaataacaccacaacagtctccattctggttctctctctcctcctgagacctctctgtctcttcaactcctcactctgcctcccttctcctgtctaatcacaagcctcccactgccctaatatgattggacagggaaaatcctgtaatacttgtcagtaagaagaaacttgctgttaagaaaacaaaacaaaaacaaacaaacaaacaaacaaaaactctgtcacccggtaaggtaataagaagcctgtctgctgctctctgctctggtctgttctgctctgttctgctctgctctgctctgttctgttctgttgtgctctgctctgctctgctctgctctgctctgatctgctctgctctgctctgctctgcgctgccctgccctgctctgctctgctctgcttctctattactgtcgttgttcctagttcttgtatgttttcaagtacatgatcatatggtacttctaaagttcacaataaggccaaacaaaaattagaatcataaatagaataaagagttacaacagagatgtttacatgtgttttcataagactagttatctaactaaatctttattatctgtcactacatccacaggttcattacgagtttaatacaataattcttatgtcttaagttaacatgattttgtcaagagacagatcatctgcctagtgtctcattagttttgagcttttgtatagataaaccagataatattttttttttggtctgagcacctacaataaattgtctatacccagttttatgacctttagtaatcagataatggtttctcagacagaccagaaagaatgtttaccctgatcataaatctgtttcatgcatactttctgtcttagtataattagcccatgacacatgaatgtttacagagcccaaactgcagactatattatagagggctcaaaacttacttgtataaacttaggaattctatagaatcattattaagaattatgaaatcatcagtttgtctacatagctttgctaaaaaaaagagtacatcttcgttgatctgaagaaaatctgcccaataggtaggctaatgcccaggaattgttatattaatttaatcatgacagaaaaggcatatcagctgcaggaagcaatcctgagatgcagtctctttgggccttgcctcttagagatcacccatcatggaccatgtaaaaatggtgggctatcttcaggaaaatcacctgctagcctttagcctatcctaggtggctcctgacataatcattttaacacacacacacacatacacagagagatattatatgtatatactttatttattatactcatagaaaatctaaaggggatacactatgatcatttaacactttttaaaaagctttcaagtgacattgatttaacattaataaaagacatgaaagtagatttaagggtaaaaatgaagagtagaacgttgtcctaaagcatcatttctgttgcaggaagacctgcaacatgaggctatcactggccaggtagtttctaggagcaacatattttaggggatgcagtgaaggaagaatatcaagaatgaatgattttggaaacccagagacttgacttaattataccattttgagaaatggtaattcagtaggatccagaatggaaggttgccaaaatcatgggtgggaccaatgcaatcctactttccatcaaagtcatgggctggaccaatgagatatcactttccttcaacgtcatgggctggaccaatgagagctcactttccttcaaagtcatgggctggaccaatgagatctcactttccttcaaagtcataggcaggaccaatgagatctcactttccttcaaagtcatgggcaggaccaatgagatctcactttccttcaaagtcatggatggagcaaatgggatctcattttccttactatgtacactctcactatcactcaggctcaagtctcccttaccatctcttcttcctttcttttactttcatctccccctcctcactgcctgcttttgcaccatgaatttactatgccacagaatactctgtactaaatacatcacatgtaccaaagattcttatctctctagaccaggggagagtcaaaaaaaaacctatgctaaagttttcatgggacatttacttttacatactttcttcagaactatttcagatcagagacagggaggggaggaggagggagagaaagaggaagggagggagggagagaaacagaaacagaaatggtgaaaagaaagttaccatttgaatcaggaaggaagattttccctaagaaatgattatctagttccttccagatgccattttaagagctttcaaatgtcaatgcatttaattgtcatagcaacactatatagtgggcactgttataattttatagaaattggaatacaaatagtttaagtaagttgatcaaggtcacatagcctgtgagacagagccaagatctacacccgatctcaaatccagatactcactgctccctcagccaccaagcctttttcatttccagacgactatattgtagacaaaaataaagtccattattgagaaatagtagacagagtcttagttgtgcccgtgactcttaagtaatgcactgaaaaataaagacccttactagttttgttcatcaagttacagtacttcatttatttcacatttcttagatggaaggggctgtgcacatttatctcccagtttctgctgagcagccagttccagaaaagggtaaatcgataacctggacttatttccaacttataaaatgaatatttaaacactactgggtatttctggtcataatattttcaaagttattgggtctatctacctcaaaactctaatgatgagacctgccctacctgcccccacaccagattgtagtatacacaggcctctcaaactgttctgagggacagcagtgaacatattaacagtacacttcttcttaacttctcttgtcctttcaagatgtttatccattaataatttagccatcatgatttggcacaggggtcaagtcacaagatttgaggttgcttgaacaatgacatttctcccttaggttgaaatttaaaacaacaactttgatgtactatctaaaatcatgagctgtttccagtttttaacaacccccccaccccagctgctgtacccaattcaaaagtttggtgtcatgactggaaaccagatcccaaagacatgccttttgaggagcaaggacctaaaggatgagtcctctagaaccttggcagtgcacagagggtacctcccgaggaacagctggcttttgcagagtatttcttgtgtatctctcctccctcctgcctcatcctcccccaaatccatgtagcactgataatgagattcagcttaaatagagctttgtggccttcttagcaccatggagaactctgtccagctttctaggacacattgtgtcttgacacatttgctaaagaactctgtgatgaacatgacaccctttgagatccacttttatgaccatttctacaggatgcttctttggtgccttgtctctccaaacccacttctgtgactagttccttgcttacaacctcaaggttaatgtgacaggaggtcaacactcttcctgtccacactgggaagtaaggcttgcttcaaatcccagaactctgctatctggcagtgtgggtatatgcatttctcagcaggatgatggtaatatggagataggcaatttcattgattctttatttgagtgtacaatacaagcactcattgaacagacctctaatcaacactcacataggaattttataagtgcttcagaaactcagttatggaggaatattatcatctctatttaccaggtggcggaactgttatgagtatgatgacttgccctaagtcctccaagcaagaggtgccaaagctttgacatgagtaacaaggcacaaacaagggagattctcagagttgcattgagcatgccaacagtacccacagcatggctccatctactcagtgcctaatagacatcctagagggatagttcattttaagacttgactaagttttgcaagactctttcacttctttctttctacatacttgaggtcatcctatcatccttagcatagacttgtacatgccaagcaccaggctgtgtcatagccatacaaagaggaacaaggcccaggtgagactgaacagagcttgaactgtaggtgaggaagctagcaggtttctttaaggaagcccacgcatcgatgcttgtactcactgcttccccgacttactcctgcacgcaggaaggtccagcccccatcccatctaagcaaaggctctgatacccaagaaacaactctcttaaggtgaatgcaacagtgctgctcaactactttcacacgatgattatttttgtttgttttttgcttttgtgtgttttaacaaataagaaataaaatgtttacattatgaaccgactagctatgtgattctattctcctttcctcggccactttattttagaaaaaagggaggaggcagtcaggaaggacaacattaacccccccccccgatattacacacagataaaagattaaacaaaattatagtacaggcataaaatagtggacgttgtataagtgtgcattcttaaaatggaaccacagcctctgagaaatgcaacgtcacccaagtttccctttgtgcatggcttcctgtgcagactccctgagttccagccataccacacagcagctatgtcgtgaaggtgccctgaactcacctgcctcactgcctttccttatattctctttactgcctggaatagcttctccccatcactgtctgttgatccaacatcaaataccatctcctttagtctaaaacaatatttctcctttgtaaatggtttgtatctatcacagcaccaccctcagcactgtgcatgccatccatctcttaggattttctgcttagagatggcttccatgtaccagctgttatttaattttgtttccatcctgtaggcttctccacctgtctccagcaccctgtgtgtaatgcttcacccagcatgtagcaggcacctagtgattatattctggaaagacttatgactaacaaattcagtagagtacctccctggtccaagggtttattatgcttttctcttctaataaggcaaacatcacatggagttgggcaaacacaggctctctcatgtcttagtagacagaattaggacaacatctccccaaagaccatagctcaaatcagtggggccagcacaatgagttgaggtcatacacggggaatttttgttaatgtacactttctcacatacataataaagaaatatatttagcatgtcatacttacaattgtgtatgtattcttcagtgaaagacttcgtaggtgaataaaagtgaaattggcttaaagaaaagcagaccataaatgatggtataaggtgtcaccagttgatactgtggatatcaggaacaaccagaaaaccatttctagggagttagaggtgggaggggtaaagagatgccagttcaaggggtctgatccactgctggcacaacctccagaactttagagttattcacaaacctccattgctgtagatagatagatagatagatagatagatagatagatacatacatacatacatacatacatacatacatacttttatttgaaagaaaggaagaaatacagatagacaaaaagaaaagaaggaaggaaggaaggaaggaaggaaggaaggaaggaaggaaggaaggaaggaaggcagacaggcaggcttttatttgaaagaaaggaaggattctccctttcatgcctcttgacagaaatggagagttgtgctggtgaatgtcaaggtaaactgagccttcctcgctccagcactaggttttcatcagccctggggtttaacaccttgcaggggattggcaattacaaannnnnnnnnnnnnnnnnnnnnnnnnnnnnnnnnnnnnnnnnnnnnnnnnnnnnnnnnnnnnnnnnnnnnnnnnnnnnnnnnnnnnnnnnnnnnnnnnnnnnnnnnnnnnnnnnnnnnnnnnnnnnnnnnnnnnnnnnnnnnnnnnnnnnnnnnnnnnnnnnnnnnnnnnnnnnnnnnnnnnnnnnnnnnnnnnnnnnnnnnnnnnnnnnnnnnnnnnnnnnnnnnnnnnnnnnnnnnnnnnnnnnnnnnnnnnnnnnnnnnnnnnnnnnnnnnnnnnnnnnnnnnnnnnnnnnnnnnnnnnnnnnnnnnnnnnnnnnnnnnnnnnnnnnnnnnnnnnnnnnnnnnnnnnnnnnnnnnnnnnnnnnnnnnnnnnnnnnnnnnnntaatcctgtgtaatctcaatcagcctgtctggggtcccttttcctctccacaaagctacaaagtccttttcagaattcactgccaaattcttcatttcttcaccctgactaattttaaagacttgatgttaaaattaaaatgacgaaaaataattctaaaatcgaactttgctagtctcctccaatccttccaggtttaacacatctgctccttttaatgatatactgtaaggaggccatagctataataggacacactttggccctcttattagcattctggggtttaaagccttcattttaaaaaatcaagtatagcatcctcaaaaatatctaagtaagccaatcatgatggttcatgcttacagtctcatttggaaagctgatacgggaggatgtcgatgagttggagccagactgggctacatggtataaccctgtctaaaaacaaacaaagaaattaactaaacagactgcctattggtggggtcacatttctcgtggagatctgtctgttggcaccataagaactagagatgagaaatgaccctgggtgaccactgctgtttatctctgtgggagagcggggccagggagttaatactgtggtgttcggcaggccaccaggactcttttcccacagggttacactggagagagaaatgttttgtggcttatgacaagatcacggcagaatattttgtgcatgctgtgatttgtatcacccatttgtgcacaggccataaaagtgcagtttttatcagggacatttgttgaatatagaacagcgttgaagacatatggccactaaataattcacagttatctatcttctcagcagatcccatatacacctaccatgttttaatgcctagtttgctcagaacaatattctttacggctctccctatataaaaatgtttactgactggcagtactatatggataccatgggattggggctggaagacaaggaatgcttactgctttccctgcctctttccttctccattggtttatctcaccagcacccagcctcattggaaagtgtgcttctccgagaaggtggtatgccattctgactgtcactgacaatgctcttctcttgtcttttcagctctatatccatctatagtcccaaggagaatcccaacgcgtttgacacggcagctttcttccaatccgtgggcaatttcctagggatctttgccggctcctttgcaatgggctccgcatatgcagttgttaccgcactgatatcctttgctgttatatggaatccggagacagtgcagagcagccagcatacatgaaatgtgcttaagctgaatgaccccctcagcagcttcaattcaatacagcatgctgagcccattccagtggctgtgtgatcccatgaggcactggatcagtagcagtagtagaggaaacaggttcttcctctatccacagccaaacctaccactgttgagaatgccttctcttagatagccttagaaaaatctgcacctatggaaagttttgggcatggggcatcaagactgactacaggaaggtaaagagaaaggatggaagatacaaggttaaaaacagaacagcatcaagtacagttgataaggcaagggcattctgctgttggtctacttggctgatagggtcagccaagacaacgaccagtaggggtctaaataacttcctaattgtattgtgggggtggggagtgaataaataatgcctgctatatgtgggtttcttttttgtcttaatcattagatggagctatggcagaggtcacatgctgcctgcactagactagatggtgggaacatggactgagggtgtaacacgtgccagggcttcaggctcctccttaaatgaatccatcctgtagcagttataccctctctttacacaggagattaaggtggtaagggcctcccatactaactctgggtcccttaataggaacaatgaacatgatgatactactatcacttaggatttactgggaactttgtcatcccattaagaacctaagcgtttgtttgtttgtttgttgttgttgtttatctcagacactttgtacaatgatcctggaaggtagatcctgtatctacagctgaagaatccctaacaattaaacaatttgattgtggccatactgctcaggtgtttcagggctggagttccacagcgcagactaggtgagaaagttgaaatcagacccccccactcccaggctgcggagcagaatgtgtggccaaagaagtgaacaggctgataaggaaaggggacagtcacggaggccagaagtctgctgggggtcaggtcacatcggcaagaaagcatagaaacagatgcgacaaggaccaagggaaagtcctccaggacagtgctggggccaattggttggcacttggtggctttaaggctctatagataggctatggggagagacaggtgtgcacagctgtctgtctacccctaacctgtccatcttgtcaatcaatggtgaagtagtctcttcagtcaggcctgcaggctctagacttggattttaactcagaactaatgacttcctggaggataaaggaagagatgttctatagcttgcttagatacagagctaatctgataaccaagaaagtgttagctccaccctcccccccccctaaaaaactactaaggattaagagaacactcctgaggagctgcaaagcattcctcctaagtaacaaaggggctgtggggtgtgggaaaggacccaggtaagcccatgttactccacataaagtcacatccagttctttaaagatagatagtgcatgttatggagggaaaaaagcctgacctttggcctctcctatggaatatttatgttcagtgtttggcttgaccacacacaccttgcaggaagggtgttttacccaaagaagttgacctaagctactaacagatttctccatagccctcagtatgtgacagtgctcttctgagcgtatcattctatacaggtgcatgtggcaatgtgcagacagataacgccctcatccaatttcccctcagagaattggaggcaccaagtgggctaggtctatgactaccagagcacagaattttgactcctactattcttgtttgtttgtttgtttgtttgtttgtttgtttgtttgagactcctaccattctgagtctcggtattctggtcttctaaaactgaacaaatcattgtccacatacccattccatttctctctctaaacttggggcgagatgtattattcttattgccaagtcatatgggacagaaatgaggacgaggctagtacactgctttgtagtcacacactcagtgtgtgtggtcaaggcaaggcctgaacacaaatattccaccccagaggttaaatgtcaggcctttctctccataacatgtactctcttttaatgtcgaataggtttcattattttcttctgaaagcattagattataagccaatcatacctcgttattttttaagagcattttgtgcctaacaaacatgttaggaatgtgacaacgtcccatcattgcagactgttaactatctctccataacccattttctgcccagattgggtcagcatcctttagttagttagttagttagttagtattagttctaatttagaatttaaagattattgtctaaatatcacctttgtcgaaatgaatgaaatttttgccaaaggttattttatttgacttaaaaatcaaagtaattctcctgcatctatttatactaggagaggatgagcgttccctcctcattatgagtaactgccttccctgctctatctccagccctaggggagagggtgccacagaggggcctgcatcaggctacatcctagggtccaggaccatcacctcctctaagggactcttctgattccaaggcatgatcttttgcttgcccttcctctctctgccagtgtttctgaggtgacactccaggggccaaaccacattcaggagagttcatacccacagcctgctggtatacagtcttagtagagactctttggaaaaaattgaatttttgtgaatgtgttcagcctgcagtggagcatggacgtcacgctaactccttgaggcctgggtgctacccctactcagatatgaataaacagactctggctctgcaactgtcgtcgccaagtcctttcctcttaggcaacaaggagattgagttataaaaacagttgttgatttccttaacacaccttgtcacttgaccaaatttaccaagctccgtgagttcccgatgctggagacaggcctgtttttcctcctttcttggagtgccttcctgtctgcagaggccgccggcttaacaggtcagtgctttatgctacaatgtgagcaaggcctgtgaatgtgcattgttgtgtgtgtctcggtgtggaatcttcccagccccgcaggagagggaatgaagtctctcttaaatagtgaattgaatggattctatcaaaatcagcctctgccgagctccctggagagaaataatgaaaaataattcatccactttgtgcaaaatagttttaacaggatgatttcaaaatgttcttgtcttccttttggacaggaggggatggtgaaagggactggccgatggttatgacggatgacattacaaatgaaaggctgcattgcactaaatgaaaggctgcattgcactgtgaagggacacacacccagcctcgctagggagaaagagtcagtagcttctgactcccagcagcaggctcgggtgtgggcagcctctccatccagagtgtgcacatctcacacacatcggtcttcataatctccgcaaggctgcctggacaagtgagaacgccaaatgccaatgggtggctctatagtctagtgtcacatatggcagaaagtcgacagagccctccgaggttgtagagttgatctagggaaaactgtcttaagactcatgggctttagcttctctgctatggattcctcaaccaaacttggtctgtcactgtgggggctgtactggggtagctataccaactggcactttacatgtatgagagtcaccagagctcttcagcctgactctacttctctaatggttcagtatctggcactgatttacctaccacattttaactgtcaggaaatctgtgggactcacgacaacaccattactgatagtaaaaatctgtgttcttgggatattttcaatctaatggatgaataacctaagcaacaattaaaatggacactcattgaggatgctccacaaaccactgtcccagatgatttcaatctacagaaagactcaaaactaagaagtgtcccaatccactgtgtgctgagttgtgaggctgagatttaaagctagaaacttcaaatctaaactcttaggcagtcccatgacaaatgagcctcccctgtggcagaccaggccgacctccagcagagggtcattgggtcccaggagcctgccttgcccatttgctgttggtcctctctggcctgttactgcatatcgttttagcatgataaccagttgataaactgacctgaaacactgcaaagcctcatgggttctgtgttcccacaggcttctagccagaaatctgccttgaaagttctcatgatactcaaatcaaggtgtcaccactggatgccaccttctgggcactttatccaaattattgcaatgcaaagactgttatgttttcacgttactaaggagtttgctgaaatgctgtgcatttggggcatacaatagataatatcatttaagtgaaatgacctcttaaatcacagttactcgaaaacattgtttcccctttcttctgtgccttgttatatagttaacttgtaaagttatctacattatgccaacaggaacaataactattaaccttctaggaagattagggagtatattctaatacagatgcacacacacacaaacacacacacacacacctaagacatgtacatttctatgattgaagattttctatttcagagtctattcaactacatcttgctttagaaaggacgtctaaggttagagtccacaggaaacactctacgatggttcttcttaccttgctctttcacagacttctcagcctgcatgtcatgggacctcttagttaaggataaacattcatgctctgggatagagattttctacaaaattagatggatgtgtgttgttatagtttgccaataaacatgactctgagctctctggaactcttactggatgcctaaggacctcacagatggacaatagccagtatgggctttggtagtaggaagaccccagtatctatgactacactcagcagcagggtttcctgagcagtaccccagactggggcaatatgcctaagagacatttgattcagaccaagctagctatgagcatttcctactgccaaagaccaaggctggaaggtccaaatcacttatgtgtttatttgttatttaatccttgctgatttccaaactggatttgtaacaactcataataccagccattcacatcatggggcctcttagttgaggataaacattcgtgttctgggatagagtttttctgcaaaattaggtggctgtgcgttgctatagtatagcatgggtatggctctgagccctctgctaatcaaagtcaaaagagagcatgttaactaactcaggactctttccttgtcaaagaaagtcacatttatttataaagatgtgcaaacaattttaagtgggagttaataaaattttaggagtttttatcagttggatcatcatattcagagtttgaacagcagaatggaaatgtcttagttaccattctgggaaacttggagacttgttcttcatatggtcactccccatattcactgccagtgaaatctgaggttctgataaccaacgcaatctaatctcatctcatgctaatgggaccatcctagactagaagtaaattagtatggtgcaaagataaaacctagggatgttttaagaatacttacctaatgaatatggagcagtgaatagagtggtgtataaaatggaatgagctaaggaatgatggagaccagcagtcatggtggcttgcttgcctggcacactaacaacgcggcacgcaggatctggatattgtacccataagccaccttttcccagaaagattccctgagcctgagcatcaccaagtaggccctcaagaacatcaccccggaagctggacagtgagccttccatgtctacttcatttcttttgtaggttctatgagttggttttcacataagacttgctttgaagacaggatttctgccattttgactataacatgtttgtttttatcatagacatcatcattgttaacttgcttctatggaaagaaatttactgtagaaaatgttaaaagtatacatttgtagaaggaaacaaacttagaaatagcttgtatcattacttcctatttatagccattattaatgttctactgtgtccacttaagaaaagtaataaacagctaacagtttataacaattgctttttatgacattcaatactatggtatataaacttaccttagcttattctaccaagcctttccattgtttacaggttttaatactaatatttttgaagtactactccttatagctagttataaggatttttagttacctgaaaacaatttctgggctaatatcttaagtttacgggagctacccttactgtctttggtaatagtcagtcttcccttgtgctgcagctaacatgggcattcactcaaaacatcaacctattaaacacactgatctgatcactgggttctgtttccctctgcactcccctcttactgaacaaaggcatcctaagggcatgccgctgtttgtcagcatctcatctatgccaacccaccttgtaagctcttggtcctcctttcttctcagtcaactcctcgtcttgccaccttttgttctcatttgccctttatcaagaaaggtaagctgtcgtttgtcatataaacttcaactcgtacttgcccttttattttagtgtgtgtgtatgtgtgtgtgtgtgtgtgtgtgtgtgtgtgtgtgtgagcacatgcatgttcccttgtatgtatgtggtgctcatgaatgtaaaggccagaggttgacatacgtaccttctttggttgctctccaccctataatattgaggcaggatcctccatgaagtcatcactcactgatttagcttgtccggctggccagtgctctcagggatcccattctgtacctcccagatggtggggtcacaagtggaccacaacccgatggtcatttccgtgagtactggggagggatctgcactttggtcctcaaagtaggccctttagtcatggaattgaaattgtctctccagcctccttttccttttgaaatatgttacatcttgtttgcttctgtcatgtaacacggttagtgcagacatgttcaagttttgagttaagtttatcccctttctataagaccttcacatttctttaatgataatatatccttcattgtggtagtcgtttggctttattggtggagtagaatagggaactgatttttttcccagacagtaagccacttgttctagtgccccatggatttaaatctgtctgtgtactcgtgtattaattgtgtgtatgttctgggactcctgctcttcacttagcttttgatcttcagtcattaaattatctcagcttcatggtttatcttaatatccaataggtaaggactggagagatgactgatggctcagtggttatgtgcactgactacccttccagaggacctaggtttggtccccagcatacacatttcgctaacaaccatctgtaactccaactcccgaggatccaatgtcctcttctagcttccatagatgctgcaagcatgtggtacacagaaaaatgtgccttcagaggcaaaacaccatatacataaaataaaaataaatctcaaaaattaatataggtatataaaagtatatctccaatagatcaatctcctacatctacgcctcattttaaaaggccctctgctatctgtagtattcatagttttataattctaaatgaattgaaaatgatgttgtttcaaacagaaaataatttgagaattatatctctatttatttaagtctttttacggcccttagtaaatttttatgattatcttcatactagacttacaaattactttttaagtatctctttagctattttatattgtggtgttctacaagggatggggacttgcttgtccatacacatctagatctcactctcttacttcatttactctttgtggttctgaaacacagtactgacctgatacataggttaaaggacagatgttgcaataggctacaaggtccacaaagtcacgattgaagcatcaaaggcactcagcctgtatcttttgggatgtgtgtgtgtgtgtgtgtgtgtgtgtgtacatgtacacacaaatacttgggtcagagatctatatccggtgtcttcttcaatctctttaattcaatctcactgaatctacaacttacctacttgactacactggctgaccaccaagtcccatgggttctcctgtctctacctcctcagtacaaggattacaggatgctgctgtcctcagttttgttttgttttcttttgttttggtcttttttaaaagatctggattctgaggcactgaaatcaggtcttcagtctacatactgattctcccaagccttttgaaactttgaataagtcagtatagctcatcggagaagcaaatttctctactgtgcatccccggctccatgatagagtaggaagttcctctgtacctgacagaattcctagagttcctttctggctactggtcaggctatcccagaacagatccatagaccaagttaataatcatcatgtatttcattaacctgtaatttggtttccatatgtgctaagctaaaaattaagacatgtggataggaaaacaacctagtctagagtagaggaatgtaggagtcatatgctagtacatctgattaccacccatgctcacttccaatgatagcaatatatcaatgtaatttaagaaatcacacacacacacacacacacacacacacacacacaccactccattggataacagagtcttaagcaaggtgtttcaccctcccttacaaaaataattggcagcttctgcagtcaggtccaccaaacccttttcctgggatgcaaatctttaggagagagatagggagatgtataagttctggtacctgtcctttgcaatagcagaacctcattctattccttcctgccaatgaaaccctagtaatggtttggtacattttctcccctgagacttaccgtgtatccgtccaataaattccctctggtgaaagtagccagggtctgttttgattgctcacaaagaagcctaaacaggatcaaggaaataatgatctacaagccacccacaagttgatgacagaccaggaaggaaatgaggttcaaaggccccacagccttgagtcaagagtacttggggccgtcttatgccaggtgcatacttaagagacaaaccaacaaacaaaaatcaagctttttaaagatagtttgcatggtgcgcatgatccttgttatttcagcttcgtattagaatcatcacaagccctccagggggaaggggctttctcacttccatgtctccaacattctcttcagttgttactaatttgatgatgatcatttgatttatttccaccatctttccctttgattttttttttttttttttttttttgccacttcaatgtctgccacaacctcatctcgggtctcttggaaaccacctgcgagcattcaatagtcacacagaagaacttggttttataggggacaagtggcgtttagacatgcaaatgaaggctggcatttctgttccttggaagtttgatgctactggaaataccacaacacgtgcagttggggaatcttacttaggaagactggacaggtataaagtgcaaatgtgaaaagccttctgaggagaggagagtgcacacattgagatgggcagtggggattctccacatcacagcgagaagagcccagcaaggaagaatttgtgaggctatgtgtgtctggctttcatagccagctgtggagggagcagccactgtcttcgggctcttcagctgactcacaggaactgggacaagccattcttttaattggctcttatctcttcactgctagagcaaaagggtttcattagtttccagggagagactctgtccacatactgaatgtgacttttgaggaaatggcagacccagacatgttctctccaagagatttctggtatacctgtgttcctgtcttctgatcagtagaggtcttccccatgcagggacctactttctaaaagtcattaggttactaagccattattttagattgaatattgaaaataattcagcagcattatgtatagcataatccctaatgaaattgaatcctgtcataggagctgatgttcagtttatgaagataaccaaaaagcacagctggaaaggtgatttgaaaatttatttttataatctctttcccagctgagactttgggggtccagtttttgccagaagcaaactttcaggactgtcattaaataccaacgtgagtgatttctaatggccacactgacacggtgtctaatgattccctgctcctaggctcagctaaaagaaattcaacttccagttttagattcccagggcctattttatagccatggagaaaggagggagggcattggcataccttgctctctcacacacaatttaaacaatatagcacactatttattcagcttagaatggtttctaagaaaataaacttgtaaaatatgaaggaaaccagctttgattgctaagcaaaaccgagggactttgaagtctgagcctagagaataaaggttctgggacagatacataggtaaacaaccatgcaaaggttaatgctagtcctgatctggtccatccactgagagagcaccaaggggtgcaacgaagatgctctcggcacatccaaggagcccaacagtgaagccatatctatcctgtcacccgcatgtcctagttggtctgcagtctcaggccctaattacgctgcctggtgaggaagaggtgacagatgtcaggtcagttcctgaaaggcttttgtggcgtgaagagggaacctgggggaagtctcttctctttcacaataaaccaagaaactagatctccgctgcagcaacttttcctgacacgttaagatttcgcttgatctctgtgattgggcttgttgcttctcatccttaccatctcacagactggcgaaaaggggttgaaaagttctaaagaaagctttccacttagaaatgaatgtgttccatttggcttgcatctgacatattgtatgactggactgggatatcatatttatgttgctctgtaactaaagcaaattgcagtgagggtcttaatttgaactgtttttttaaaaacaaacctgtctagcccctcttggctcaacactactcttgacttcacactgacagaaccatctatatatatatatatcaggtagacaagactcctgacaaataaggaacagtgtttaccaagagattcaaaatgttaggcctccaggctgcaggaacaagtacccatggttcccaaggagactagttaccgacacgctgaaccaagggcaagcataccacagtgcaggctcagtaaacaggtgtagcacacatttccagttgcagctcatcagctcacgcctgcactttctcaaaccaaattgcccttcatatcaatatccaaaccacctgtacaagtaactgaagtcgtagataatcttaccctgacctcttcgctgtgagtgttctcaggcagtacctcagagtgtcaggaggcagagtgaaaaaaaaaaagatgaaatgagttctcaggcactatattctgcacggaagtataaaaattgtcagactgtgacacaaataaccaacatacaggtgatggaagaaaaggggagtcaaagatattttcggatgcgtactttagtggcctcctgcactaaaacaggatggggaaggacactctcgatttcttttcctggtgctatgattaaatactctgacagaagcaatttaaggaaggaaggggttagtttagctcccagttcaaggtacagtccactacagtggggaaattaaggcggcaggagcttgaaacagctggtcacatgacacctatgggcagaaggctaaagtgatgaaggcacaccagtgctcagcatgcttcctctaactcatggaacccaggagctcctgccaggcagcggtcccacctagtcaagcaggtcttcaaataccaattaatacaagcaagataaccccctagagccattccccgcagcccatctttcagctgattctagattctgtaagattagcaattggcactaactctcactgacaacaattaggtgacttaaagagcttcatgaccctacccacatggaacagccacttgggaaggtacaactccagctaataggtgcgattactgattagaaattccagctatcctgctataacagtgttcattgaatctaaggaaatggacgggcaggtgagcttttggctgataaattaccaaaaccttaggcaaaatatcaggaatctaagcaaaaaaagaaaaaaaaagttctcttctcctcccctaaccttcaagttaaactgtaaaacgtagtcacataagtaagaattttcttgcatagatagtcaggtgtttgggggtctggggggttgcttagaagaactttgaaaactgcaatgtgaaataattccgaaatgcatattctgtctgtgccagagaagtcaggaatgagaacctaggttcatgctgttttccctcttaagttccacagattcccgaccaatctgccagctacccagctgccaagcatgggcaacgagacagtaaatgtatactctggaaacttagattccttcatattccctgaaggagttttccattctgttaaatctttgactttcagttccaggtcctctctcagttgtagcagcaaacctgtcggaacggcttctttttatgagatcagtgaaggaatgcatagcctgaaaaataacccatcaaccttgaggccctcagagtactgtggaagaacgagacacgttgttttattttgcttacagtccttctgtgttccggtaatataatcaatacttcctgtctaaaaatgcactattctccaacctcataaacccctcaagtctgcatttcatgtcaaagaaaatcatgctctgtgtgacagacatttatttctatgcttccctatctcaagcctttatcgacttctaatgagaaaaggatggggcatagtgttatcactggctgagtgtataggtgataatggacttgaataaaacagttgaatataagggaaaaatagacccaactactaatcaatcctcataaaacatttatttttatataaggatataaatcatcaccctgcattctcttttcaaagtaaataagcatttccttagatagagaagaattaatttgagaaacaagcatttgagtccctagtgtcttcttgaaattattatgggttggagacaatacagagagacaagcagtggacatatctcctggggatgaggaggtggacaggaggtcagcctgcatttgtaggaccccatgcatccacagtccacagaccttgtcacagtgtaaggactgtgttgttcttaacacagaacactttagttaaagatgcccagaagttactacctacgatagtgcttgctaaattttctgactcttacagacacacatatatatatgtgtgtctatcatatgccacatggtttcatttcttgttcatagagttcttatatttcttaacagtacacaaagatgcttgtaaaaattatgaaagtttcatattttcctccaacttttagttgtcttatcccaacttaaaaccacaactacagataacccttcttaatttactgagaagacaatgggatttagtagaatgcaattaatttaaattgaaccaatcatccaatttgttcagtgtctgaacaatcacctaagggtcccaggcctcttcattcccaatgtattattactcattttacataatttacagttacaggatcatgaaccttgatcatgtaagcaagcaaattgatccggaggtctctgaggggggtccagagtataagtaacagaggacggtgtaaatagtgtttggttattcaaaaggcagcaattgttgcatggaaactgacctccctggaaataatttacataccaacagtatcattatttttaccaaatagctgtttcctgaatttccttgccagtgaatttgaactgaactgtgtgctttgtggtttctcaaaacagttcttttaactagtgtctgaaagtgttggttctaatttttgttcaagattgcataaatgagtccctgcagccaagccttttgtgaccttgcccaccactggaacctcagtgggcagatgctgaaaggcgattctgtgcacaaacatgagtcagacgttcttactttctctgaactgcttcctgatttcctccagagtcgcatttaatggctgcttgtttttccaaaggtaatataaatagaatcaacatattttatataatacaaaatgaagaacatttttccctttttattttcttacttatttgagaattccattcaatgtattttaatcacattccccaccccccaacttttctcagatcctccatcaaacccttacctgcccaacattgtgtcttcttctttttttaaaaccttggattccaatttgtgctgttcttatattcttgaatgtgtagccttctaccagagcattcttaaagaaaatccaccaccaccaccaccaccaccaccaccaccaccaccaccaccacccccactcctggcagcattcaattgccaatagctcctcacgcagttgtgggacttggtgcccatctctcctttccatgctagactttcgtatggctttagctggcataggtctcttgcatcccatcaaccactgtaagttcatacatgcagctgccctgctgtgttcaggaaaggattgaaccttgtagttatctctgcctctttcagcccttgagctttgagagaaggggttggcatatgcacatcccatttaggggtgagaaatatgcagtttcttattctctgcaccttgaccagttgtgagcctgtgtgttaataaccacctactgcaaatagaagcttctctgataagggtttatatgcacattaatataggcttatgaagataagtcactaggagtcagtttaatagtatgttcgtttagcagaatagtaccaagttctcccctagagactatgacctgtctaggaatgggtttcaccttgtagagcaggcttaaatcaaatcagagagtgattggttacacccattatgttcatgccactgttgccccagtgagcatgtattgttagatcagtcagtgctgtggctcccagagttcatagctggataagacagatgactcctttctcctccagtaggacgcatgcacaggaccttctaacactatgaaagctagtccatgtggatgaagcttgagttctctgagctctgtgattcagagattcagaggctgtcttcagaaatagggtcgaactatcaaatcagtagcattggcaatagtctgtaatgtttagaggtctataggactcatagaccaaacaggccaaaagaggttatcccactcctgaccctttcctgtctgccctcctttaccctgcctgatccccaacctggctttaacacttcctgttccattatacccctttaatctttatatcactgggttttaccccactctcttgaaagccctttactaattgcctaacctctatgggtattcccaatagagcacacatacctgaaaattcaaatctaacaccagcaaatgatagatatatgtgacatttacctttctgagttaatgttgtcttgctcactataaaatttccttcaaataattttgtttttatccctttggttttgacctagagtagacacttagtgagttgttttcagtttcatccacttacccacaagtttcctttttctgagcagctgagtaatatagtccattgtgtaaacagatcatgttttccttacccattcttcagttgatgggcatctagactgtttccatattcagctattgtggatagagcaaccatgaattgactggttggattattaagagtaagaaatgtctccttaacctgttttcaatgttccagtaataagggggtggggggaatatggcaacaaatgacctctaagggcatagaatgtactaagcacatatgtcttgtcaaaccattcagtggaaacagttgtattcgtcctttgaatgagtttctctgacttattcatccccttcatgtctgctttatttcttctacttctaatacttataggaaaactttatatttactgaattgtattatatgcttagttgggaaagcagcttaatgtatagaatattgctttatacttagaacaacccgaaaaacatcttggtgcaatctaaatgtgaaagctgaatcttcaagatgtgaagtcgttggccaataccactggtggggagcagaccgaatactgaagtaatggatgttgttgatatgtatatagtcatgccaaggaccccaatgccgcagacccatggaaatgacaacgccttactctagtccatgtggggatgttgagagaatcagccacaggctccttattccaaatgttgagcccctaagactgcttccctataagacatcccagctgagataagctagcccttccttcatacgctgtgcataataaacagtttcccagttgcaagtgtagaaggcattctttattagagagaaggcaggctaccaaaccacagcttctctgtatgtgtacctgacattcctgcatcctcactctgtcctcattaagttctccaatccaagctatgctggacctggcaaacactcattttctaaccatgttcagaaacagataataaaaaactgggcgaggcccagacctgaggtcctctgggctcctgataggcatggagcaagcgttcttttaccattctatattttactcaccattggcatcagatgctagctgattttgattatatttatttatgcctaactttgtgaaggtaacagtccacttactatcaatctttcttttactaataagctctatataaagctatgaaatttcctccaaataattttggctttatcctattggttttgacagagagtatatgctttatgatatttatttctaagaaagttattataactttaatattattgaatattataatttttctaatatgatctcatcttcaacctcagcctcattaagaaaagtctacttcaagccgggcgtggtggcgcacgcctttaatcccagcacttgggaggcagaggcaggtggatttctgagttccaggccagcctggtctacaaagtgagttccaggactgccaaggctatacagagaaaccctgtcttgaaaaacaaaaacaaaacaacaacaacagcaacaacaacaacaaaagtctacttcaaaatatctaatgggcacttttagttgcctatatcatttgttaatttctgagcctatgacactttgataaaaatgatatgataattttatagcaattaaatgataggcattgtttcctttctttggaggggaaattttactgaactattagatggtaaaatacattgttaacttaatctgtgtaagtaattttttaactcaccagtgttgcttcttttaagaaaaaagaaaaggtaattaaaggcctcaaaagtcctacatgataattgttctctgaaacaaaaaattatttcatagaaccatgttgattcagaaaagccagagaagaagaaacagaaaaaaaaaatgattcccttaacattaaattcccttaacattagcaagaaacattgattaaaaataagaaataaagaaaggaaacaaaagaaatgtgttgtccccacccaagaatcaagaacaaggcaggggtctcatctgagggctacccaaggttaaggccaagctgcagcaaatgtgaattgaccttggtcaaagcttgcttcttgaagttcactgcaaggaccggactatctcctgacaatataaaaatgtagagtttagggccttactccaaaattattgtatttttgtaagataccctgtacttgctgatctggaattaactaactgcgtttggttgaattccagaaattctcctttctcatgcagattcttaagctataagagaacttccagaaggggtaaggagtcttcttgggtttaaagaggacaatgacaggtgtgatggcatattccaggactgctgaggacagcagcaggaggggtgagaaacaacagtgctcagaaaagagggggcgggttcctctgtccttggcacagacatagcagaagtccccattctccttgtctcttttttttcataaagcagtttttttttacagctttaatccacaagcaatcagcttctttaaacaagattattcaatttcatttttgattaaaatacagttataacctccccccagttcttctctctccaacctctctcatacccgcttcccactaaaatgcatacctttttctttaactattagatacatacatatacatatatatggtaatattatataatatatatagtgatattatatagtaatataattaaaatatatataataaaataatatattttcatatcatataaattgatatactaattctggagggttgatgaaatgtgtttaggaatgagtaaagcatagaactcaagtatatctaccttccacttgatgaaaaagatcctttctatagtggaagatgaccattagcctgaacacatccagggatgaaaacgttcatactccattgtggagtaacacatatgctctgcaaaagccatgggactggaaataacaagacatgcccaggtctgaactgccctacttctgtggttcttgtcctaacctctttctagtcctaagccacttcttcctgtcgcaaaccccggatgcaaactattccaatctcatagagaactaaaaaagagaatgagtttagggctctaggatataatgtctcctctgccttgatgtcttcatagtcccagtcctaaaggggaagatgcaagctgatactgtttctaaatggcaagcatgttgttgcagatagcaaatgtgaacttcaggactaggcagcgctatgagaaacacatacaggaagtgggagctgcagctctgaggccctggtcctgactgatgtcactgcctggctgccctttctttctctgagaggtgtgtaaagctggcctgcagatgctataaaaggcaagcagtgaagtggggagggaggtgggacatgcctgcaaaagtagggggaagaaccactggtaaggtgcagccaagcagaaagcagaacagagaacaggagacgggggtcctctgtcctcctctgtcctgtttgctagtcccccctctggggctgcaccctggcagaagcagacagcacccacaggagagtgtggcgtgtgatctctggagccaggatcattgtccagaaggaaggtggatttagagctaagccactgattgttggcttgcacaaagagcccttggcctcttgtctcttacatgtcgctgtctgaaacagagctaaatttaaggctgctgtgcagagccctacacaacagtaacacaagaactgcctaggttacaaataaaatgtgcattagaaaacagaaaattgtccactctgaatttgttctatgatgggattttttatggatactacagttcctccttgcttgtgggacatggtagaagaccccacttgtgcctgagtcctggacatcacctaacccactaggcatagtaggagattagtaacaacaatacaaaccaagtggacaattaaaacaataagctaaaataaaagctattttaagtagaagcatttctagaattttccatcaaatattttcagatcagaatggattgcagacaaccgaaagcataatgtgaaacttccaataagaaggggcgcttaggtgatagagaagatggtttcaaagtgtgtttggcttataaaagtcattctaatcatagtaatttatgtgatttgattaattaccagcctatagaattatgatcatgtatgctgatagtaaaggccaaatcacctttgttgacttactttaattataacagcaagcttctgaccacgtgaccttcatggcttgtcatgcatacgatgtagccatacacaccattctgaacatattttagtagggacattgtgtgttagtgttccacaggaggcaaggaaataaaagacagtggaatgatagaaaaccctgctcagaggatgaagggaggcagctcggatgtgtaatccccatatcacatatcttcttccatggaatatcagaaatgacagctttcagatagataggggtctcttcaaaccatgcatagatggcctaacatagggagaaaagcaaagaaagttggggaaaaattgcatctcatttgtcactttcaaggtgaccaaggtgactttggtccctcatccattccacagagagaaatattcagttatttgccaatagcactcacaagttcctggtgcttctttaaggattagtgtggccagagataagctctgtttctgtgaagaaggcaggaaaatctacaagggcagaagctattgggcggcatggaacggggaagccaaagagaagggtcaagaatgatgaaatagtcagtttaacaaagtggttaggggcagtttgtctgtttttgtgacatctgaagagatgccctgtcttacttcgtcctgtccctcccttaggatgcccaggcaccacttgcataccacttggaagagtcagggcaaagtcagaaacagggagaccacagtggttcccgatctcctctctgggtacctggaagaggaagtcaggaatggatctgaggtctaccttaaccttgggtcatctgtgccagatggagagagtaaggctgagaggaggaggtgaaatctgggacaagtagactctgattgggtatgagcggcaagagtactgtgtgggctgcagtggagaaagccttcctctggaagtcttcctctgaagtcttaactgccactctttagtcaaggcagtccttaatgaagcagctctctgagaagatccttgcttgttcccactggtctatttgatggtggatgtaaatgcatacactttctttggggtgaaccagggattatatacgtcttatggaaaggaatacccaggaaggggaggctattggctgaaggctctgtactatctagatacttcattatcctatgtgactgagtgcccatggtcatcattgtggtgcagtggttacctgcttcagggcaggtgcagagacaagtcgggaatggctccacttctgctgtcaaatctcttcgatgcctggggtttgagctcattcaacattatcagttcttatacagatctggaagcatggtctagcatgctctatataaaactcaaaggaaggagggaaccacaagggtgttttgctatgagtattcccaattctggatgctcaagggccttgggcaggatgtgtagtcaggaggaagtgtgttaaaaataaggccagagggctgggaagagggaaggcagaacagggctagactctgggagtacattacaatgttcttggcagaagaatcacaggacctgaaatgtttttgtaggatcactgagtctctttgaacagaatgtgaaggaccaaatggggaggtagggactttagctagaaagccattgctgtcatccaagctagaaatgatgattgcttagaagaggacattagggctagaggagttgaaaagtggttgggcttggttaataaatgcaattgatgctgtgtagtgggagaaggaaaagatgagcccaaaggactgcagggaaaataaagacactgtgctgaacagagggagacagcaagctgggatgctgagtcatcaggagcctgagcctgtgtgcaaggagacagcgattcagcagccaagaggagagagagaaaactagctcactgtaggtgtctgccatgctgagcccctcccggccctgcaaaggatcttgcccattcttattctcagaataattcactacccaccacacccaaaggtgcatttatccacatcctctccagaatagcaatacattggtcaagtggtttcccagtaaacaggggttcagtgaaccctcaatcagaggactcccttgcacacttgagatagatgcaccatgatatttttaaacaaacacagagaaatgtttcacatccaaacaatatgaatggtgattctcctaccccctcaacatcttaccacacttaagcattcctggtcctggttgattttttatagaaattctgtgaagagttatgttagatttctttctttatttttctttctttctcttttttttctttccttataatttctcaagacatgctaagaagctaaaaacttaccaaaaaatctccaaaaacatttattagatatataattcttaacaaattttcctgcttggtttcttttctttatctaaaaatttaaaacataatgttaaaaggaatcacaatgcaaataaatggctatgtactagtaatatataaacatgttttaacaatattttatctaatatcaacttgaaaaataaccaccatgtaaataaatgcatgcagtttacatatgaaaaagctcagccctttaaaatcctttattttgagctcatttgaaatgctagtattcagctcacatagctctatactcttaaggatcatcagcatttaatttatgagtgtttttagatggaaaacctctgctgctttaaattcagttcagtccccttgttctgagtcgaggagtacttatctcctatgcttttacccaagcccccctctatgctcaatttcccataattaatctaatctttaatctaaagtagagtgcagctctcaccaaagtccacccagcccagggacactaagagagtggcagagccaaggaacaaataacacattggtcctgttgttattctctgaccccacatagcatgtggcatgtgtgatttcttgtagtgtttaaagatctgagtaatgtgactttaagaaatgctccctgctgctggccaaggatgggctggagggaagcacactggaaaagaccacagccctaccaccttccagaagtgaatggcttggtcagaggtgctccttggtgctcagctgcaaaaagagtgtgccaagcttcgccagagatgcaaagaggcacatgaggtctcttgtctgatacttggcaatcagcagcattggacagagcaacaaaagccttgtccaggtcttaggttggtgactcatagatttaatactaaattatggtactacaggaacctttccaggctccccaaagcacacagtggaaagtagatgtgccagctacagaaaatgtggctaaatagttggcccttgatctgggaaacccagagttgactcccatattttctttcttcacatgtttctaagagtagcttttctaactcttgactacaacatcatttctctccagaaagagactacttccattcttagtaagtctctactgtttaatgctttcctatatgtttccattctatgacctctttaaagcaagtagcaagatttacctgggtttcattattatggtattatcgagagttttgcctctcctgacagcaagtccattttctagccctgcatttgacttgggaaagaacttcggttttgactgctcttcttttgggtttcaggcatagttgctgttctcttctgtggagtcacacaggcacattacacctacaacaatctgtcatcggattccaaactgaggaccaaacaggtaaaggaaaaactcatgactggctttctctctttcttggtgtcgtggctctgtagccactctgacagtgcatgtgaaaagcatttccttagtaaaggaagaaagtacgcttaaggcttcattgtaggttagatattgatagatttttttccctctaggataaccattaacaattctcttggtaagcaaaaatatagctataatagtctctttcctccggagagatggaagcatagattgtcagtcttgaagatgaaagacctgtagtctgtaataattcagtcacttacatctaaagccattataaaatgtgtgactgtgggtaattatccaaagaggaaaagaagaagaatgtggaagcaattggtcaccaattgaatgtttttatttcaactgtccattgccacatgagcaaaatgtgtttcccttagtctgaggatatattggtgtgtgggtatctgcagaaaatcatacatagactccttctactaagccattctgtgccaagctcatcctgaatagcaggaatgcagagactgaatgtggcctttacttcaaggggtaaacaccttgagaaggctattaatgaggtcagggcatataagaagcacacaatccacagtgtactagatagtaggacaaaaatatctcaagagcatttggggaacgtactataaggcctgctcccatggttgtggctggagaaatcagcttgaagtttccagagacaagacccaatctgaagcaaggaaaagaaaagtaaagagataccaagtcagatggagtaaaagatggagagtagttaaagggatatgtgaagccaagggattggcacagtctcttagggaattcactgatgctctgtggatgggtttacagtggacttacaggtagagagaagctgagtcaaggagacacaagtgaggaatgagacaatgcaggcagcctcaaactaagaaggatcaattgtatgtgctttaggaagggagctgaactccaccctaaaacatagaaagcagtggttctcagccctcccaatgccgagaccctttaatacagctccttacgctgtggtgaccaccaatcataaggttattttcttgcctcttcataactaaaatgttgctgctcttatgaatcgtaatgtaaatatctaatctgcaagatatctgatacgggattgtgacccatagattgacaactgctggattagagcaaccagcaggaatcattgcctcaaagctttggagcccagaaaatcaaaatcaacctctcctccctctccctctccctctccctctccnnnnnnnnnnnnnnnnnnnnnnnnnnnnnnnnnnnnnnnnnnnnnnnnnnnnnnnnnnnnnnnnnnnnnnnntccctctcctcaccccccaccctggtggttttctggcaactttgttcctgaattgacagattatcccgatgggtatcttgctgtccacatggttttcccaggtgccagcctatctccaaatttcttcttttgataagatcctcaattatattggctcagggcataccatactccaacacaacctcatctgaactagttacatctagagtgaccctacttcctcaggtcaatttctggagcactaaggattagatccataacacataaatctgggggaggggtgtataactctgctcaaaaagggattattaaagtgacaaactttaggataattggtgcttcactttaggatgctcattctggtagatatgaggaaaaagtacctagacaaattagctttgctatttaatggcaacaacaacataaactggttatccaaataacatcacgcaggatgcatttagtttccatgtctataagtatccactattttgtttggcagccttggtgatctttacgtggaaagaacttgcttgcatgtctgtggacttgttagggtatgtgttctgggattcacttcaccaaggcagctttgccagggccaggtatgtgtctgtcattctgtgaataccgaaacaagtccattttgatcatcagcttgtaccacctttcctaatcatcttatatggctcagtacaacacaggaagcaactgaccaacatgcggggagtaaggcttacagtactaaatggcagggactgtggctatagggcatgatgaggaactggactcagtcatgagtctacccaaaacacaacaaaaggcagagaagccagagacttctcaccacatgatgctggacagtgggcaccaggagagtaaaacaccatcaagcaaaatctgaaaccggccaggagttcctgcaggcttaggtaggactctctgcagcagcagctaatgctggctttcattcagcgctgcctgtcacatctcaatctcagcttgtcctcattgtgtcctctggaacagggatttttgcagggctacccttcccccactctctctttacttcaggtagatgttttagaaacataataaaatgcaattcctcacctcttgacagccctcaagtaaaacagaaataaataagccaaaatcctgatactaatacccacacacctccaattccagggtgttttaaattgtaaagactggtagcggtctgttctcagagggcttaagggaaatgtcttgggctgtttttttttgagagcctcttctggttctctcagcatttgtattctgggaagctaaatcctgtttagggacttgcacttttaagtcatgctatctagactgctcagcagcacttcaaagataacttgtctcagggtgagaaggcagaccagcacctaggggagacaaagccaaaatcagggccccacagccttctgttctcctctgagtgtcatgaggagcactcgctgacaggcttccagctcatcccgcagcactctccctccttacagaaagaggtttcttcaagcttattctttaacatccagataactgcacacccttgatccttgatccctcactggcttctgcctaggtgaagtaggggcttaataaacactgattcttttccactctcttctgtctttccttcttttctttgatcagtatctataatttctaattcacttccctctgataacatatgcatacatgtatatctatctatgcatgcatacctatgaatatatatggggtcatgtgtgggttatccattctcatatgcagtctctggtcaccattctggaaaaaaaaaatgagagcagacatactcatccatgtctgctcaaggtagcaagagaagttccaattccacatctgagttggagatgcactatgagttgtacagaatccccaagatatgagttacagatgtggctattacatcgccactaaacctgaggatgctttgggaaatataacatggcatcacatggctggagaacacagtatcacttcccacactgtgtccacattgccaacaggaagagcagttgttgaacctctttgcctctctctccaggtccatgtaatgggaaagtaggaagttaacaagggaaactttgaggggaatcatcataaatcaatgttatattataaaatctaagggtgatacatttttaaaggaattttgtctatcaactttgtctatcccagctaatcaaatagctttgtctggaaataaagccttctgaaaatggtatgttgtttgagaattcaaatgccttttcaagaattatattttcactttaaaatatgttttgtaaaatgactgttttttaaatgttaagtaatatttttttccttaagcctgtggcatgaaaaaccactcagcctttccatgtcttaggtacaaaggaacataggggccccatgctatggccatggtaaggagtcacacagtcagttgggacacaccttattaaggagctcataaacatggcacaattcctttccctgaatggatgtggctctttgattctctgtatgaaactctgtcatggaggccagcacattttgtaagccttgcctctggtcctaaacactaaaagctaatagggatattcaaagtgagcatccacacatagcagctaccaagaagatctgcattgaaccactcacaagaatcccagcctggctctgcccttcctccctccacactcttccccacggcagacctgcaagctagttatcgggccaaacttccagggttttccatcaactaactttaccttgaaggaagctaacttgcaaaaccatatatttccaagctattcattttttaccagaatttctagatcctttcccatacttcccacttaaaataatttctagcagatacatatgcagctaaagaaattacttactgttcattaacacacccgaagtactcattaatttgtatatacctttctacctaagagatagctcctttgactaacactaattgtctttattcattaactaccattttaaaaagcctttttaaccagacaccactcaagatacatgtaatataatagactaaaagggtcctttcgtagacaagctttatagtagtcaggataaatggcactagattatgaatacagtagtcatgaagccagtagaagaacaagaaatggagataggattggagtttgtaatttttcaataggttagccagaaaagtccttggcaagacagaaactttaaggggatgaaaatgggaactatcttaaaatttggagtagatggctttagagattgagaacagctgataagaagggcaaaaggacaaacatggctagaagaaagggaatcaaagagagtaagagaggcagtaacaaggaccaagtcacagagcatctgaatgaggtagagaagcaggagggcaacttcccacaggcctgtaggtgtacctgactcaatagcagaggtgccattcattagccagggaaggctgtgagattaatcagctgtaggacaatcaggaacctttgctgactctctaccttggggtgtgcattacacagtgaaatggagttgtagtgtcactagctggacatagtatagtccttaccatccaggaaaaccctctaggccaagcatgcaatgttgaaagtcaatagcctgtagctgacattgagagatcgtggcaagtcttaggtcacttgggatatgcccttgaagagaactatgaaaccccgtctcctcctcatttttctttgcttcctgaccacagggtgaatggttttagtccattatacaactctgtaatatgttgctctccctcaagcctaatgcaacatagccaatcagtcctgagctatacctccaaagctatgagctaaagcaaattctctcactttaaaagttaatggtctcaagttagttgtcatggtcagttggaagaagtaaagctgggacagtgtcctctcctagaaagcaaagggcggcatgagctcattaaggaatgtagtgagttcttccaatggcgatgaaatatcaaggaaagtcgaaacttgtgttaccacaggctggcagagtggtagagtcaaaaacaatcaaaacaggtctaagacaagaagaggaaagaaaagtaagcatcatggtgtataaacaagcctttcaaaggaattccatttcaatggagaccagcaaaatggattgggtagctagctttagggactagtagtccctgtgtgtgttggagagtgatgtgaaaaagagatgaccaatcagaaggtttgccatgtcttctcagatgtgaacttcagcctcagactgtctgatgccgtggatccaatgatttgacctcttattaaatgcttgtcattagtaggtaggagggtatcagttactatcacttgttcaacaaggcttccatgattgtcatagagaagtgggtatatgcttggtatcttagtcactgtttcattgctgtgaagagatgccataaccaaggcaactcttgtaggaggaagtgtttcatcaggggttcgtgcacagtttccgaggttttgttatcattgcaggaagcatagtgacaagcaggtgggtgctggagcagtagctgagagctactttgtggtctgtaggcagagaacgagagacactgggcctggcatgagcttttgaaacctcagtgcccaccatgagtggcatgcttcctccaacaaggccacatctacttaaaaagaccatgcctactaatctttctaaacctttcaatcaaccccagtccttggagaccaagcagtcaaatatatgaccatataggggggccactcttgttaaactatcacacttggctagctttttcacactttaaactgatttagacattaatttttcttaaatttcctctataatttttgaaaatctatcactttaagggcatgttcccttcttgaccatgatatggttgggttagttgtacacgctttcaaaaggcagattccttgtcaagcattcataggcaaacaatggcaccttcattatagcattctttccagatgcttattttatttccactcccccccatgatatttttagtgtttattgccattgaatgggaaagcagcaatgcaaatccaaatttaaatttccaataaaaagagacaatgggagccaaattgaatgtgctatgcatgactttgcaagaaaattcaaataaaggacttggaatatgagagaagcaagatgatatgacaaaaggatgtttgaccgagaggccacaaagtggagtctgctgctgatagcaggaccctggacactcgatccatgtgaccttccattttctcactttaaaatgaatcactaaactgaatgtgtcgtcaaacacgttcctaacatactatccagtggaccactgatcataagttacacacacacacacacacacacacacacacacacacatacagttccttcttttaaactacagttggagagggatagcttgcttaaaaatgataatgcatggagatgagataaagggttgacgttgccaaattgacttcatgattgaggtaatcaaaattaacatcattagttcccactgggaaggaaaacttcatcctgagaattaaatggttctttgtggaaaaaatgctgagcttgaaccaaagtgagtggttgcaatggctttcccaaagcctgttggcatctgcagcagacgatagatagcataaaccacacactgccagcatccaggatctcaggacttgatcaaaagacttttcagtgttttcattttaagcatgttctgagcatgtactaagcatgacagtggttacatgacagacaacctgggaaacaaaggcatataagacagtgattcccctaaggagtttctaatatatgttacgtccatatatgatcgatctatcctatattagcatcatcccatggggcaagtgttaacatggaaggaggcctaacatgtcctaggagtgagaggactgaatggcttactcacaacaagatgatcctgagaagctaatttagaacttggggggagggggctgaagtttggttctaatggtaatcacattacatagagatatacatggcatagaagcaaagggaattaagtaagtaaacacataacacataagtcactaagacaaaggagtcaacatggtatgtgggagtcataaggcttcagcgaagtagggagaggctgctggtatagacaggagaacagggaagagacatgtgagaaagaaacaaaatgaggagatgagcccagagggaccttgtagttctcactggactcttctgaacaacactatccagttaggttgatgattgcttaagacctttagacccatggaagataataatcagattgatgacattattgagggaagtttgaagggtagttatgagcaatgtggttattgatcttaatacagcacttcgttgaaataagccactcatccaaatactatttaaatttacttcggccttttgagactctggactccacatctcttaggatggttggtttgtaagaaaggcttatggaaattcatcatttggcttttgccttgggcttaggcactcaataaaaccttactgaattaataagtaaattaatgaataacgggattatgaccatgaacattctaagataaaaattagaaaggagaaacaatatgtgctaattaatgatttctttaactctgatagcatgcattaatttaaatttaatgagctggatgcataaagctaacatctagggtaatccagaggcatggagagaaggctcaagatcagttcttttacttactgtgtctcctgcagtttggctctgccttattgatttgcattacagtggtctaggattatggttttgtgcatttttcccccttcaatacactaacaaaagcagtcaggtttcatgccagttacctgttctgagacagttgagggagagcgagggggggagcaacaatgcccgcgcttccctgacttctgagaagatcaaagatatctacagaaagcatagacttgcctttatttttgactctaattacatttcttttgtcaggatccctaccgcttttcttcttctcttcattcagggcacctttaaaatattatcctaggagggctgaatttataaatgatggcaaagtgtttaaatttctctgtagtgagctggtgattcctttcaatgaaactcattatattgtacaaaggacatttagtagtttgactaataagtggaccctttcaaatgctaatgacagtgaggctcccacatcaaagcaagaacacactgtactgtactttcagtgcccagaatgtctgtgaacccctagtccagaagccttactccacagtcgacataacaacaggggccacagatggccatttggaaccccagtgagttcttccctctgcattccaagcactggatcccagaggacaaggaggataaaggcaatgaagacacaaactaggagccatgctcccccctgaattttttcatggaaatatttttttctcctgtggaaagctatagtcggagtgtaactactcaaatgatctccctggtctattaactcccatctgtgtttgttgataatacataacctaccattgtagttgggatttttaagattgaaaaccaaagaggctgagagctatgtaggctattaaaataaacttttaacttacacacacacacacacacacacacacacacatacccctcaccattcattcatctctcctttcacctttagacaacaaaacataccatcatcaatgcttaaatagcaacccataaatatttataacccatactcttgtttgattatatctgattccatgcaaaaatgagaaaaaatgtatctgaatagagtttaatccatcaactgtcctggtccctatttgatgacattcaagacagatggttacccattattaccttaaaatttctaaggatggtagtggcataaccccctttaatggctcattatatttttatcatcctacttataggtacaggtatgaagggctttagtatcataatagcatttgaggatgataaatggaaatgactgtaatttttctacacattttaattaaattttattggtgcagcacagaaaacatcaaggctgagtgcatatgcccaagtgtgtgtttatggagaatatggccaaatttcaagctgccatttccttgatggccttgaaggacctagagaatgtaattaacaggaagcctctgtctcattccttcagggaagagactgaattgcttctagacacgtgactctaaagtccaaaaacaatcctatcagagaaaatatgatctggagccctggatataatgcctgaaagggaatttggttttaggaaggtcatttgaacacctgtgctgtttgacaccaaggttggggctggaggggattggaatcccaacttgtctcaagggagaagaaaagacaagatagtgggtctgctcaggacagagcaccaggtaacgagctttcactgtggctgtggggtttgttgttgttgttgttgttgttgttgttgttgttgttgttgttgtcccaagatgttaagaactatgaagtgagacttttcttccccattcatattgtgccttgcccaagtcaaagtgaacattcaaaatcaaagtagcaggaaacaggtgcctggtggaaactaaagaaaaagaagttttgatcctgttgtcactgtgagaccctgtggtcgcagaactttacacttccacagagactgatcaaaacagggtcacagagacatctgtctggatagggttactttggatttccataaagatgacattttgctcagctcttgacttgtctttcttgccctgcctatgattctgaggggcttggacacttgagagcagatcttcagaccactaggaacaggcaggcagggagggcttcatggccagcactttgaatgggaagtggcagaaggtccatcttctgagatctgactctgccagtttctagatagctaaaaggaagttctatatatagggtcttttctagggtgggaagagaaactatgtcttaactttctatgtcctaatgcaggtcttctcaaatggtggtctgtaggctgatttcagagtgatccatttttatgacactgtctgtactcgtttctggcataaattaataatttatggcaccatcttagggaaacaccatcattctttccttctgtgttgatttattgctgggctttttgtcttgctcttagagcacaaggttgaggtctatatgagaattttgattcatctaagtattcaaagaatggaaagtttgaacatatccagagaaaagtaatctgattttaagggaacatttctttcccttaaaattgctactaggtgtgtcctggaatgactgtgctgtttgtagaattcatatatgacatgctttaaggagtttctctacactaaaggcaggaaacaccacttaaagtctctagaacgttcatagcctataaaatgtgtttggacctgcttgctgatttgcctgagttctagaacacccaaaccaggaatttgaattttattcataattgaagttcaaatatttataagttaatatctaaagaaagagccttgagaggcaaatccaacatagcctaagggccagcatccttttgtgggatgaacttgaccacccactctcttacctgctggcatacctgtacagtgacaatattgactgatgcttcaggagggggggtaggatgggagtagaggcagaatagtttcatcagaaatgtaagtttactggggactaatcctcttcaggatcctagaataagaagaaaataaaagtagaaagaattggagcaagtgtccaaagaagagaaagggattacttctgaaaaaaataatacacacacacacacacacacacacacactactgtttttttcttttttttgagaaaaagaaaattattagaaagaaccatacatggcaaagtcaaagaggcaggaaaatatggcttaagatgccattaacagaaataacaggtgccccaaggaataagacagttctgggattacaagtgacaaaccatgctgagtgtgggtggaagcttggggtgacatctggacaagctgggactcgctgcagttctgtgggtgggagggcaccatcagctcacagaggcgggcaatgcctttaggatgacaagggatatctcacctctcttggaaacagctaaggcagtacacatgggaaaatgttgttcacaaatcctgggtacctggatctcatgacctggacttatgatttatttagtctagactatggcacaaatgcagcataaggtctacttaagtaattctaatgaatgacagagtggagaaactagaagatgctggactctacatagaagggttgactggggtccttccggctggcaagtggaaagggttttgagccagtcaagcaaagtaaaaatctctgtgtgttggtaaggagtagctacatactggtgggctttgggcagcagtcctcaatccaggttacaccatggaaacacccagagaattttttttgaaaacccatatgattgatgccactttaaagattctgatttattgggtctgaagtacagcctcggaggcagaatttttaatacctgctgatggggggacatgagagtcattaagaaacttctcctttggggtttctataaaaacttaagaaaaaaagaaaactgctgggaattttatattctgtgggagtaggtggagactaagcgacaccaagatttgtataaatgcatatatttttgtaggtaggatgattccaagagatcaccaaaataagcattctacagttctcagctctggaaaggcaatgctactgccaaagcccaaatccacagaatcctttttgaggtgacttgtccacctactcaaacctcacttagaggcttcactgacaagtcacagacccactgtagcaatcatagcacgtgcaactgccctactgtaaaaaattaaatttatttttacacactctaactttgtaaaatatccattggtttttatttgtaaaatatttgtcatttactgtctatggaagtttcattaaaattaacctctgtaactcttgtgacttcaaccactcagcttcatgctactagctcttgttcacagaccaggaatctggaatttgagagcagggagcattagcatgagactatatagtaagtagaaacacaggagaggttggaaatgattctattcccactgctgatggatctttcctctgtcttcagtttgggaatcaagagtttctcccagcctcacctacacaaatgcatttggaaaggtgctcacagttgattctacagagaccccttcttatccatatactgtgctcactattctaaacctggaagatggtaaaatctgtccccttcacctagaattatttggtacccccaacaaacgccatttcttggactcagtactcttgaagcttcagtgactgaaatctaatctgcaattttgccagctgagtgtggaatgtttcttaagtgataatgagtgcaattagcattctatccatatgtgatttaggacaatgctttccatgactttttcttaaaagcgaaggcactgagtttttcagaactacacaaaaatagaatcttttatatataatgaggtaaatgttcaaagaagacccaagtgtgtgtttaaagttataattcatgagaaagtgttctataactttgtgttgcatatttgagaatctttaacgctctcaagagccctcattctcaagatattttgttgcattcaatgaatccccctccacaaagagcacctttgtctgacaagttataagtacttggaagccctgttgtcaccaaaggaatgtattcaaggacttgaaaaaagataacgaaaactctgttcccaaaaatcatatttaacatataatgccaagaaaagtcactccgtgaactctgatgttaaggaaaaacaaaattttaaagagtgcaaattcgttaataatgtccagttgggcatgacaatgtatttcccctgtgtcattggctgagaacagtaagctgtagctgaatcaaggtttctacttctctttctgctgagaaacaatttgtactagcacattttgtgatatgaaaattatcccaattccatgacagaacattagtattttaagctgtctttaagactttctctaatctctgtgttcgtaaatggctcagttttacatatattgaaaaaagatatacgtaaaataatgtagatctttccgtgatgcatatgtaagttatatgggataccttgtcagcgctgtaagggcgtatgagccattgagtcttcccaagcagtacttcggtcacacattatgatgtgagtgttgacctccaggagttaggtatcagatctgtctttcaaaatgaaagtggagttgcttttctattgttgacacaaatgttctgatgagtaatggattcaaagcaatgttttttatcctttttcaatacctcagctgaggaatgtgagaagaaaatccttgattttaaattgcattgaaaatttcagcttatgatgcaagcacacaaaatctgactttataaaggtttttattttttaagcaaaatgttacacgtgccattagcctcccagtgacgttagtaaggatggtgactcaaaggaactgtcaaggtaaatgaatgtcatttttctcaagatatttttttctgtcattgtctactatcaaaactcattgaccagtgttgtcatatgtgaagccaggtaagcccttaagccaataaatatacccttaaatcagcacataggacacgggtgggttccaggccccaaactctgcactgttgctgtttctgagagtaagcaggaacagggccaccatactacagaatttaacatgagccaagaattgtcctcttgaaatactcctcacattggcttccaagagcatcaggacctgacctgaggaagggtaccacagtgctcctggaggtatgtagcacagggtactgtggaaagggtagagtcttcagcaaatttgggctccaggacgaccattttgataaaaaaccactctaagatattcgtattttacccttaacgctcaaaatgtcacaccatgtttatagctccgcggaatggaagatccacgtcatttagagtcattgtagaaattgtttcaaagatcctaaaagaacctatgtgtctcttttaaattttacttgtgtatctttctgacttcaagatttccatgaccccagaaacatcaagtttatttcctatgagctggtcttgactctttatgtattgaatgataactgtactaatcttcaacatatacagtatgggtttattctgataaatagaactgtttgtaagtgaatccgggcaaggtggttattatgctctggttgtaactgtatgaactctctaataagaaaaccatttaccatagctctgtgaattattacgacttgtgagatatgactcgatttattcataggcgcttatgttagaatttgcattatattttagacaataggctaggtggattgcacccagacatttattgcattacagagagatctacagtattattttttgaaaaatatacataataactcttcataaatgttcacctcattaacaaagaaatgccatttcactctagctgcaaaaacctttccctgacagaggcatattcacagcaatggcctatttgaattcttttctccaactctcagacatgtttttttttttaaatcccttcacctccaaatgattcaaaaatatgatatttaaaagttggctgtggccaatttttttcacacttatagatctctgccacaacaaaggtcaatttgctatgttttgcagatgctttgctcatctgactatttcaatctttcagcctcggtaatacaatttttcataactcggcacattcatccttcgcaaactttcaactgggttggattcataggtatgttcattccaggactcagatatataaatgctgatttgtcttgtgtcctgatatcagtcttctaccaccttccacacctaacgaggcagtcaggttggaagggagccctgggatgcctgaatcttctggtatattagtgtgtctgtcaaggaggaagggccaagtcactgtaattcctggaaatttggtgctaagagcaggaccatgttctactccttcatcagtgtgttactgtgtccaattgtttgccccagtaggcttgtacttatgcctttgtagtgtaaatgaatgagcctctgcattccttttataaagagcaagcctggccagcaggggcactaggagtaaggatcatcttggctctgctaccactggcaactatagggggcctccctgtaccactcctcgcccatcaccactcaccctgcaccacacacactcacctttttcagggacattaaaaagaagtctgactcagtggatgtcacaggagtccttgagaagagagctaaagactaactaagtgtggaaaaaaacaaaaggccctaggaagaatagagccagggcagatgggggcttgtctgggacagctgtcttttgatggataaaggctcatcatccttatggtgatctcaaatatgaggaatgaatgagccagaatgggtgagaacatgaccagactccaagttatagggctaaaagaaatcttgttactcaaacaagctcatagcatcaactggaaaagcaaagcccaggcagctccaaacaataaattaaaatacatttcttttctttcctactttctatcagactttaattatttttataaaaattcaagcccacaatactttatagaggaaaacctaagtttcattttggtttggttttggttttggtttttgtagttgttgtttgcttgttcattctacctctagaaacgactgctattagtaaatgcagggggttttgggatttttttgttttgtttcatcataggggtaactgatatatcttctcagaatttttctatatagctgcattttaaaacaaaaaaaaatatgattatactatacactagaagtttccaagtatggttagttggttgggttggttggggtggttgggttggttgattagttggcaccctggttagtttttttgtcaacatgacacaaactccaggaaactgagaagagggaacctctattggaaatatgttttcatcaaattggcttgtagacaagtctgtatggatatatatatatatatatatatatatatatatatatatatatatatatatatggaagggcctataccattgtgggtggtaccaccctggggcaagttgtcctggtgtgtttaagaaagcagcctgagcaggccataaagaacaagccagcaagcagaatttctccatggtttctgcttccatttctgcctctgggttcctgcttgagttcttgccttgacttctctcagtgaggaaccatgatcaggctgtataaactaaataaacactttcttccccaagttgcttttcatcaaaatgttatctcagcagtaaactaggacagctggggtttgtgagttgtttgttttgttgttgttattgttcactttaatttgtttttcatgtttccttttgtggttttggtttgtttgtttgagacaagatctcatgatgtggacaaggttggtctagaacttacagagatcttcctgctgcagtccccactcctgagggctgagattaaaggggatctgccagtaccataggcagttcataatcttttatgaacaaggcttctttacagacttagaaattattgaggttttaccaaagaactttgattttgtgaaccatgttcaggggagctagctggaattaactcccaactcaggtttagcaacaacctgaagacatcatgggtgaattcacactgtgcaatcagctgacaccacacatcagctctctcccactcctcccaaagggccaactgttaaacatttaccataataggaataattacagtgatcaatcttcccatattagaaagtttaaatgaggatttaaaaattttaggtaatttatttcaaaatgataataatgaaaatattacatgttaacataggcaacacttcctgtttaaatttttgcaaatctacaaatgtctgatttatagaaggcagctgaattctatctgcttcaacggacattaaattatgatgttacaagttacagtcttcagaaacctccactagactctattcatgacaatgagtgcaaagatgaagtgtagctccactgtatagggtcttgaaaatcctgtagtccccacagactctgcaaaggccttagagagtcccagggtcactttcatatgataccatggcaaacattgacagtcagaagacaaccttcaaaaatgagttctctccttccatcatgtgggcttgtggataaaacttggggcatcaggcaggcttggcagtgggtacctttaccaagagttgcttttagtagctgagccctcttaacagcaccatatatatatatatgcacttttttgtcccaatggatttttatataaatcttcattaaaaaggctcatgtcatatatgctaacagttaccaagatcacttgcagttgctttctttgcttcttttttcttcttcttcagttttccacatattttgtcatctagagaacaagagaataaaaaggaagcaagatggaacccagtgaaagttgggctaaactgcctcttttctgaagtttttgggatgagtactctatgctttgtgtcttactggggccatttcctgactctctcagtgatggtataggtcaggccaggaaatgctaactccatccagaaagtcattccctatcttcaaagatgtcataaaggaaaggagttggtgctgcacacagattcaccttatatgaagcctgtacttttgctccactctttcactattgctcccactcttccttccccatctttagatatgcatagtctcctttaggttttgttccttctctctgaacttgtgctcttatccagttcacattcctatatcttcatagtgttcgctcctctgagctctgagtcatgaagaaagtacacaatggcagtaacaaacttctcatctgtcaggcagtctggtgcctaccatactgttagtgcttaaatcacaaacctttcctttaaactagcaagaatggtctgtggctagagatgaacacataaaaggtcatttctcctcctcagcctcctccttgttgtagtaggatatttccctaggtcagatcttaggaaatgctcctagttgatattttaagccttacaaaaagaagtggagggggaggggggcgcaagtctgtgccactaagtagctgttttggttcctcttgattatcaacttgattggtctgaaaagtgatgagattagtaaagcatgtcttttcgagagatgattagatcccgcaggctctgacctaacgtacaggtgaatacggtaaatccatagcatggtgacattattgagaggtgaataaggtacaggtgaatacggtaaatccatagcatgggggcattattgagaggtggtaaaagggagaatattgaacctagctggaggaagtagaccactgagggaatgtccataacactttatcatgccatgacccttcctggcctgttctctcctctcctnnnnnnnnnnnnnnnnnnnnnnnnnnnnnnnnnnnnnnnnnnnnnnnnnnnnnnnnnnnnnnnnnnnnnnnnnnnnnnnnnnnnnnnnnnnnnnnnnnnnnnnnnnnnnnnnnnnnnnnnnnnnnnnnnnnnnnnnnnnnnnnnnnnnnnnnnnnnnnnnnnnnnnnnnnnnnnnnnnnnnnnnnnnnnnnnnnnnnnnnnnnnnnnnnnnnnnnnnnnnnnnnnnnnnnntaatgtaaaatgaaatgaagaaactgttattttcttccattctgtggtcctgccaccatgatgttctgtcaaagcacacaggcccaaacaaacacaaccccggccctataaaaccatgcaacctttgctgctttaaatcatttcaggcatttggtcatagtaattaaaaaaaatacagctgatggatggtgctctgtttgtaaagtccccagtcatagaggtttgcccatgttcagtcatgagcaacttccaggatgtgggacttagaatgctaacatgggaaaagctcaccacctggactgatgagttcctgtggtcattacactaggctgattctgttttcttatctccaaataaacaaaagcaatgttaaaattcatcatagtgatataacaactaaggttacagaaatcttactctgtacagatgggactgactttatttaatcctccaaacttaatacatccctaactaatcctcaattcgtgtactaagtcatatcacagtttcctgctaggtaaaaggagatacagaagtacaaaaatgtcatgacaaaggtcgcagagcctatagtgacagagcacagagctgagtgtgggaatatgagtcctctcaaagaatggagtcacacttgacccttccatgagggcttgtatttcatgcaaagcctaccacagaaggaggcaaaggacagaggcattctctctagccctctctggctttagtcttcttcttattcctgtgcactgagcatctactttcagtaacatttacttacctctacctgtgcccccaggaagccccagtctgctcatacttcctgccaggtcctagctattagcataagatgccttgctctgttttactaagcctgtctcccctctgcctaaaccactgaccactgcaaagcatcctcagctggggcccctgcagcctctactgcttagggtctgtgaaaagaaaggtcctaactcgagagggagatgggcctggtcactcactacacccggaagagcctggaacgtcatgttaagatgatgagttttcatctgatagacaataaggagctagctctccaagatctacaagcaatggcatgagcccatctgtgttttggaaaactaaggtggaaaatggacaggagcaaggcgtccatagggatggtgactgtctgttataagatacccaacatattcagataaagttctgctaagcacatgaagaccaagacaactactccatcagatgagaaaaaaaaatgtgctcaaggcacctcaaaatcttcagttttgagctaaggctccctgatttttacttttctgaaacagcagaaaaattctaacatcaacacacacacacacacacacacacacacacacacacacacacacacatgaataacaggttctaagcattatcacctatcctttgaacactgtaacaatgttagaccctgctatgcttctaacattctcctgtctgtttaaaacaccagcgtgcactaatacaatactgaaccctaaaaagaagcactgggctcacattgcatgctgtctgtgagaaatagcaaaacccaaaatgataaaaatctccaaaaggccaatgacggcttggaaatgcactttcaaagcatcccatcgctgttctcttgtggcttcagaatcctaagaatatacatctaaacctgtaaggagagcatttcagaactgcaggcagcaaaacctactctaaaataagaaaggagcaccccaaataaccccgactctttctacaaagcagcccagctttaaatgaatgcaacataatctatggataagactacatccccaggggtgccagaggccccttgccccgcaggaagcctaagatccatttcaacacacaagatagcacactttgccttcagaccaccttttaaggcttgcgaagttcaggatccttaaaaatggctcccaactcttaatatatcaaagactgtctgcattaatatctttcaaagacccaaagttcagcaaggaataaaaattgtttttgaatgtgcttcaggaattaatattataaaatatgaggtttctttccctctcaaataaattgaagatgaataaattgttctcagtgtccttagaaatggagtctgaaggctagaaacaaggataccaggaggaggcagagtgtagcagagctgcgggaacctatgtgggggcagaagagtgcttttactctcttaaatgaagcacatatccacttccttaatactaaaatgcaggaagtaagtctactagcttggagtcatttcccaaatcattgttttactgtgctgctgtgaccccagagtggtgactgctacggtgactgtcttgcttgccctctctgcttggacacagtacattggaacatgcacgtgcagtccttctcagagatgagaaaacaagatctgggaactttcctccacaatgctttcagccatgcttctggtctgctcacagccttggtcaagcaggtatttctatagcttgagactttaagtttcttgctcgtttacaaaatccagcctcacatccgcgggccagatggtttcagtggcggttttcttctagctgcttctctttataaagacaacttaattctcacatatgttgagaaatacgaaacttgaaaaatcctgctacttgaaggggagcatggtgatttctaatatcttggttattttctcctcgtctttgtagcaattttaatctgatcacaaatatgctgcacgtatgtagcatttcgcactgcactgccttcttgagtcataattcaagcatgttcctatcaattctaattcttcttctttctcatcgttgggcaagtaaagctacttttgatgccatctgctctttgcttacaacctctgggatttggtaattttgttctttcacacttctgccatcagtttaacttggattttaatatgttcatatttttcttagatatgcagcatattttacaaaaatgttatcgatattatctaagtggtatgcttaaaaagaatagaggttccctcagaaaatgctcccaagttgctatgacacttgcatgctatttcccagcatacacaaagaactgcttccaaagccacccagagaaagagcatgtgggacactcacatgctgcctccctattctaggggacacatcaaggccaacggcaagatttgaacatggtgtttaacttccttgagccgctaagcctcatctgcaaaattggtgaaagagtccttctctcacatggggagggtgtttagcttgctgaagctttggcctccttattcactggaacacaccttttcaaatctgagttaatttaaataaagttcataaaaataaagaaataatgttttccatagggttttaaaacatgatgactagttggtaagttaactgcatgtagagttagttcataactaagtctagtttctttgacatctggataatctatgatcctctgtgttcatcctggtaaagaatgttcactgtacattaattccacagatctgtgaaaacgggggagctttataaagttcaaaggatcactgtagatacaattttagacattttgttttcaaactataaatgagggtagttacatgagtcctgccaatcatttacagaacagttgttgacacaggacaaagcgatatggccacagcacactcatgcctgtacaacaaggcatttgctctcactccttactccacagccagctatccctgggtccttcacctcagctggactgacaatcagctgggtggggcagctagaaaccttgaccttctttcttccttcagtcttggttctccccctcttccatctcagcaggcttttacatcccctccttgtctttgtcagtcctttcttccctggtgtcttcagcctctgagccaaactggttctctctccttgatgctgtcattacagataagattcatttttgtctctgtaactcccccccatgggtgttttgttgcgtattctaaagaggaatgaagtatccatactttggtcttccttcttcctgattttcctgtgttttgcaagttgtatcttgggtattctaagtttctgggctaatatccacttatcagggagtgcatatcaagtgacttcttttgtgattgggttacctcactcaggttgatatcctccagatacatccatttgcccaagaattttataaattcattgtttttaatagctgagtagtaccacattttctgtatccattcctctgttgagggacatctgggttctttccaacttctagctattataaataaggctgctatgaacatagtggagcatgtgtccttattatcagttggaacatcttctgggtatatgcccaggagaggtactgcgggatcctccggtagtactatgtccaattttctgaggaaccaccagactgatttccagagtcagtctggaagtgttcctctttctccacatcctcgccagaatctgctgtcacctgaatttttgatcttagccattctgactggaatgaggtggaatctcaaggttgttttgatttgcaccatccagagactaccccacctggggatccatcccataatcaaccaccaaacccagacactattgcatatgccagcaagattttgctgaaaggaccctgatatagctgtcacgtgtgagcctatgccagtgcctagcaaatacagaagtggatgctcacagtcatctataggatggaacacaaggcccacaatggaggagctagagaaagtacccaaggagctaaaggggtatgcaaccctataggtggaacaaccatatgaactaatcagtaaccccagagctcatgtctctagctgcatatgtagcagaagatggcctagttagccatcattgggaagagaggccctttggtcttgcaaattttatatgccccagtacaggggaatgccagggccaagaagtgggagtgggtgggtaggggagcagagaagggagagggtatacggaactttcaggatagcatttgaaatgtaaataaagaaaatagctaataaaaaaagattcatttttttaccttctcttcacttggtttctccgagacagacagtccattcctggttttcttcttactttctgatcttcacttcctactcttctgttttaataagacattaaaatctagatccagaaagaactgccaaatcatgtcttcacagatgctaaaaagtagaatattaccattaaatttcattgtttggcttaggcaaaggagacagctctttttactttttatattgtttccatggctataaagaactaaagattaaaaattaatacttaataagatggcaaatagataatatatatgccatcaatactttgctatcctctcattagctccttgcattagatgtcattgcatgcacacagttgtcatgactgtcagttactcattgggaacccctacatgttagatattgtagaaaattaaaagttacccttcattgaaccccctcacatgtgcaaaaagttaatataacaagaaccttacatcttaagtattaaatgcctcagtcaaaacttcaagttcacacatcttgcaaacaaggacccagttttcaggctgtatctctgactcagcactacctttatataacccaacattgagtgaagcagattataagatacacaagttgggagagatgtatgaggaagcagctttcagttctgacacaactactaatagaattatatagtttatttacttgcctttccaaaaactaagagaaatgtaaaagtagtggttttctataaagaaaaattaacaatgtacaaatcaatttttttcttgccttataatattatgggctttgttcactcctggtactttaaaccttgtgaaaaactaaagaggccattggcccttgaaagagaccaactagtgttttttgtttgttttattttatttttgctgaatggatatttcaaattgccttctagatacttacacctacacctagaaattcgttctgctcctagcctttgtcagagaagtgtcgttttgtagttggtagaagttaatgcaggtaaccataactggtcagagttctaagagtgaagattttgtgcttggttctaaatgagacattgataccagcctctctaaagatcaacaaacaccatggtacagtgagcagaaagactttaatgggtgctgagtgaaataaaattctattttctgagcatggcatggggctgtggcactcgccaactcacagtatctaaggttatctagacaagacctatgaaagatggaacccatcaatatttcatcatgggtggaggggaggttctgagccctaaccctccttgagaaattattgtagtaataattgctgtagaaagagctgattttccctccataagtggtgtaggctccagtaaaaaaaaaaaaaaaaaaaaaaaaggtactcatgctcacaatgctagtaagatttcctgtgaaggagaagggatcatcgggagaggaaagaagctaagattgtgtgataaaagggaaagatggctgaaattcattctgtacatgcattaaattgacagaattttccaagaatacaagaattattaagatcaggagaaaaaaataagcattagtttgaaagaaagagaaagggaagaaagaaagaaagaaagaaagaaagaaagaaagaaagaaagaaagaaagaaaggaagaaaggaaggaaggaaggaaggaaggaaggaaggaaggaaggaagggagagggagggagggagggagggaggaaggaaggaaggaaggaaggaaggaaggaaggaaggaaggaaggaaggaaggtagagagggaaaagaaaaaaggaaagcaaagaaagaaaacaaattctgaaaagtccaacgctggccttttgcccatctcttgcaagtcctgtgagcttagacttgctgtgatttggtaggagctgaagcagtgtttccctgacagcattgacattttattttccttcctgtggcttttctggaagtcaaagagcccttcttatatagttagttctcaatgtgaaaacaagcaccagcctgggccttacaagaaatcagggcaaaccgaggaagacgcaggaggcatgtaaagagaaggcaatgattcgctctcctttctattaattgtccagggagttttaggctgtgactcattggggttttaagaacattttcttgtgctttcctcccttcttacacatttgcaatgcagtgactattaggacagggagaggcaaggccacgtctcattgtagctgatccaaggagcagtgttaggtgtctccaggcagccattggtgggtgtgcttgcttctgaatctgcccagtgccctctggtcttggcagctgcttgacttttgtgagaatagcaggcgttcatggtcgggaatgatgagcaggtataaaggatgatgccttggctgttgacaaagcattgtagaagggtctgctcaatgagaaagagaacagggatagatcaaatgctgctgagggctgaaggcatggttcaggtaatttcaatgtaacaaacacctctgactgtaaactcacaggaaaaaaacaaatatattttattctttactgaattcccagtgactagcacaatattggcacaacataggtctgttaataatatgcaaatgatatccataaactatctttgtatctgatttatggtctagatttatctggtaaatagtccttaaatgagaccaactttgtgtcacagtatctcagacaatgttgggtgttttcaagataaaggaagatgtatcccctgagagatttaaacccttggtttgactttatggggggttgtggtttaaatttatattgcctgtgacatccaagagactcaaactgaaaaatcaatttaaaaccagttcttagattggaacaaagcaaaaacaaaaataaagcatctttgtagggctatactctcagccaaggccacaaagatgtcacctttgctgaagtgccaccaatgctacttcacagtggggaaaaaatgtgcaatgaagcaagttcctgtgagagacagcagaaataacaaaacagagagcgccagtgttccagtgaggggataactggaagaagcttataaaacgtttgttatcaaataattcaaactgaagcatcaggacacaatgtaatgaaagaacagacattatcaaaataaggaacaaatgtattgaagactgtaggtactttaaaaagattttcagggatatggggctagacagatggctcactggttaagaacacaggctgcttttcaggagaacccaggttcaattcccagcacccacatagtggcttgcaactgtctgtaactccagttccaggagatctgacatcctcttttagcctccacaggcaggaagcatatgcattttgcacagacatacatgcatgcaaaacccgtatacataattatctttaagtaaaaatacaagaatatcagggataatttatgtaagttaaatatatcttctatagtgaataacttcataaccagctaagaatgagaaaataaaaataataaataaatcattaagtacagagaaaaatgagaaataaaaacagcaataaatccaaaagcaaatggatggtcaggacaacttggaggaatggctagaagaaattcaggtgtatccataggaaacaaggttggaacagatcaaccctgtgcagaaataaggaaaggctttagacccgatttctaaaactgtccattgaagtaaaagatacaaaaagaaaacagtaggtaagtgcagaacatggtgaaaattcacaaactgaactcaggcgcaagaccagaattcagatcatgaaataccagcacctcagaggcctacctcatgtcccttcctgccacctttctgatcactccggaagccgtggctgtcctgagtccaacatcatgtcttagttttggtttttaatccagatttgaatgaagacgtaaagagaaaaggcaaaattcacaaaaatttcagaaaatagaattcatcctatcagtgattataaaaattctgaagtataaagacacatacaaaggaaaaagactgatgaattttactacattaaataaaaatgtttgtttagcagagggtgtcataaaaccaatagtctagtaaaaactgaggggaaaaaaattgtcgtcagacaaacaactccccgagtatcagttcccagagcacacaaggaatccctccagacccatgaggaatacacagccaattagtttgcaaagtggacaaaagaaatcagcatacattccactggagagtgaatctttatggcagtccatgtatcaaaatgtttgacatgggcattacctagggaagtcagaaatgaaaccacagctaccagcctggtaaaaacgaatctagtatagtacagttagcagctggaactgaagcagactctctgggttacagcctcagatctgaacgctaactgtgtattcttgatcagtttgctcttcttcataccttggttttgccatctataaaatgaagccaataatccttcctacccgttttattcagttttctgttgctaatactaagaaaggaaggttattcgtgttctgtcccagtcttgaaggccatatttgctgcggttctttggtggcagagttctgaactggatcagaacatcatatgcaagagatgggaacacaagagaaacctagacaggcgtaataacccattattcaccagactgacctaatccattcataaaagcagggccttggtcacctcctaatatctcataatggagaaaatttagcatctgttttgaaggaggcaagccatattctgatgatagcaccagctcccaggattactgtgatggacaaattagttattatatttaaagtgttagaaaatggagggaatttcatttaattgtgtgccttaggccaggctgttatgttaccaggcactgaattgattaaacagcatttacttctcagaggcctgtagtctaggaaactcacgcccaaggtactgtcaagtttattatctgacaagggctttctctatggtttgcagagaactgccttctggctgtattctctgatggcagacagagaacaaacgaagaagactgtcatatctgttttaacaagggcacctacacccatcaagatcagagatctacaaacttaccctaagcaggggagacagttattgcattagaaatcagtacttcacatgaatttgagaatatagtcatttagtccatggctagattaataatcatgtgtgtaaaaggaccttggaccttggacctcttgtgttttctttatgttaccttcttagtgatcttattcagaataatggattcatgtacagttctagcacagattccaagcatagactcacatgcccctacatcttctatacgtaagcacacacatttctaacattcttctgaactttaagtgacctaaaatcgaccctatctactcagccaaatgcccactcaggcaccttctctattgagagcatctgattcttccacttgtccaggccaaacctgatttatttctcttttaccctaactttagtaaatactctcatgcctttcaatacatattctctctctctctctctctctctctctctctctctctctctctctctctctctctctctctctctcagcatagcatctgaatgatggtgctacagcataaagatgtcttgctgttcaactcttctaaacccctccaggaccttcccatcttcctcagtaaaagtctaaattccaatgaaatcctgtaggtgtctgaaccattatgtcctgtgttcacactctgactaccgcttttccacatcatctgcttgggaccttcatactgctactcgctctatctggcgtgctggagcgttctagatactggcttcgcttacctctcactttttcttcttagatcttcacctaaatgacttttttttcagtgacaacttctttgaacactgtctaaaacctcagcacccacccacctccatactttacatctcctggagtggttagaaggagaatgaatccataggctcataagtttgactgttggtgatgagagagctgaatgcaggtgatgggcatgtgggtaatgagagaatataaaactacgtgtccttttattctgtcatagattttctctctttggtggcagtacacaaaagtctacttaacagtgagagcatgaatccagtgagaagccccgcagcttcagaatggctattgtaacgctttaggagtccaccaaagttcatagaccttgggtctagttaattttgatgtgtgattattctttatttgcaagtttttcataataaattttaataaaaataataatgctgataaatttcaagctcaaaatgttgagccatctagacagcatagttttagtgctgtataatttcaaaacatgaaagaaaaattaatattttaacatatacaagaaaaacataaagggaagccaggcaacaaagtgttctgttttgtgagaatgactaagagggggataaaaaatgacaagattgtggagcgattttaaaggcaagtattgtgttgtttgccttttttgttctggttttatttacgagcacagtcaatatttgttaattgtcatgcttacaaaaatactacctgagttcatccctttaattatcctgttgattctgtctttaccattgccaggatctctaccttcttcaaaacagggatttgtttttgtttttaatgtcattcttcctcatgtttgtttctcagaagttttccccaacagtgtaaatgttgttaatccaattccccatccaaaggacaccatattttcctcacgactgaccaatcagagtgatttgctaaagcaattcacttcttattgattttgcgataactgcccttgtagattagttcatttcttcctttaggttgtggtccctttacgtgccacatgatcccgtggtctgcggtgtgtcaactgaagcctcagaaaacttagcaaaggttccattgaaaatctggcaaagacaaaaagccacaccaccttatgtcatttgagtttgtgctgctgatgcctccagttctggaggccagtttctcggatgcataggtattgcaagctcttcttgccatcctagccattcttgtatcagttctgaacattgccctacattctcgtgatagtacttagcgtgctcaatgatttattcccccctccttgccttttgaagcatctttggggcaatttttgtttttaaaacctagtccccttccctcaactcagctaaattcttttcttcttttaaggggttagggtacaacggaagctctatttcccttccctctggaaccctcttcggttgctttgcttcagccatgcgagacacacgtaaatatttacagtgtcatttattcttgccttgtggtcccgtaattgtttataattgttccataatggctattcagtcaataggaactaattttggatgaaaatctcaaaggaatagaagaaaatacttaaagaaaccaactggcttgtaaagattagagatggttcaacctcattgctaattacaaactataagctaaacaataataatgtccccaagactgaaaaaacttaaagttgatcatactatgtattagtagaatttcagggaaacagcgagtacacgtggatatggacgtggtggtgagcaagcgtcttctgggaatggtaccctagtgtaacgcagatggatctccttatgatgaggcctgaggagcagggtcttcacatggcaaggacctgtgggaatattcatgcggaatcttctggtctttcctgaggaaatgcttggttcacttttgccttgtgtttgcattcttgattttgctatcaggactcttggctttcattttgtctgtgacagacgtttcctcggaaccagaaaaaagaaagcttggactatgacttattcttgtttgtctctgaggatcatggaaacggaacatcacactactctgtttgttaataatggtgttgcggctgagccaatgaaagactttagtctgagtacatcagctaacatctggatgtttccttcctactggaacttagttctaacaacaatcttaccattgacttgctctaaataaagactagatgactatcaaaaggttcgaaagttcttgctgaatcattgattccaagacctaataggaacattcggaggcgagccaagtaaggagaaggaactgactcggcatagtaatttgctgagctcactgggcattagaagaaccaggtctcctgattaagatatggagagatgctaagtgacaacagttaaatcagaatttcctgggtatataatatatcacttctctatactgtaaccacaatcgctacaaaccacagtcactgggttatgtgccagtgtgctgggttagatatcaattgtttgttgaagctctatttcctttcttgatacagttcatgggttagcaggaaaccacagagtttgaggaggagaaggaagaggagagtacagtgtgcacattagtgttagatgtaggaagttcttaaaagggattgtacacaagaaaaagggaaaatgaaggtaaacctttcagctctgagaaataggtgtataaataaaggtgtcctgagttgtctcagtgccagagcatatgagctgcacttcttgatccaagtcttcttttctctatgccatgcatcttcctttggattttgaactcctccgacagggctggactcctgcagggacgtgatgagctatattgttagaaaatgtcatagaatcagttgaaatgagtcataggtaaaaattttctttagtatatttcaagatagtaacatttttggaaactcaaaatggtactgtttttattaaatatatctttttagaggaagagatcttatatggttagaaatatataaaaatggctactaagaaggctctattaacaacagtaaaagataactcttaaaggagacattttcacagtgcttgtttaattgtaagtaattttataaaagaaataaaataaaaagttgcacaccaaaattttctaaatgtaactaattaaatgtagcacttaattgaaattaagcattcatatccctaagtgtttatattagaaaccacaaaagatttaactttaatgaggtaaggtaccagtgtgagaggttaggaaaaggctctctgtacaaacctaaagaatgcagaactcagcaaaaagaaaaggaagataaaagcagaaataaaagaaatataagataaaacagcaatggagaagagcagtgaggtcaaagttgttcccttgacaaagccaaggagacagaccgttctagtgagtcaaagagaaagagtgaaaagtcaacatacccataaaagtaaatgaggtccatggcagaggctccgtggagataaaaaagacaaggagctcgtgaaaacactatgcaagcaaatctgaaagtttagatgaaatggataattttctagaaacataagctctgcaagctagctaaaaagaagaagaaaggaaattgaagcgggaactaaaacatccgtccaccagaaacacagccaagctgcttgttttcttgggtgagtttaattttataaacatctttcaaaagcaaagacaaggcaggaatgcacccactgttatcatcacagagatggtacaatacaccagagatcaaacctgtcagcatcagtgtcttagtttcttttcttggtgctgtgatggacgaactccatttattctgactcaaaattcagggattcagtccaggatggcagtgacgtcatgtcggcaggaagcagcttaaagcagctggccatgcagcatctgcagtcaggaagcagggagggatagatgtgcatggctgctcagctctccttctttatgtgtgcagttcagaatcccaggcagggaaaggtgccacccacaggggtggatttcccacctcaactaaaatagtcaagataatctgtaactggcacagtcagaggtctgtctcccagatgatcctagatgttatcaaattgacagctgagcctaatcacaatcagcagtgaaaatgaaccatatatgccaatctcacagatgtacatatgaaggttttgaacaaaataataccgagctgtatttattagtgtttagaaagaactagccagtctagctctatcctaggggctctgacctagtgcattataggtataattttccaccttaacaaatgaaaatatgtgtgtgtgtgtgtgtgtgtgtatatatgtatgtgtatgtatatatgtgtgtgtgtgtgtgtgtgtgtgtgtgtgtgtatacatataaaaccaaaaatgaactttttcatacaacgtattctatttacagtttggcttcccctccctcagctctctacattcctcctccttctccttccatctagatccacacgctttctgtctctgcttagaagacaaacaggcagccaaggaataataataatgcaaaataaggtcaaataaatcagtaaaagacagaatgaacaggaaaaatgccaaagagaaggcacaagaaacacatatagatgcagaaatgcacacattcacacacacaggaagctcataaaaacacaaagccagaagccataattatatacaaaaaggacttgaaaggtttgaaagaaaatggcctgacacaacactatgagacaaagcacctccaaagatgccattgagttcgtttcctgttggccatctactagtgagcatgaggatcaccctaaagaatcatttgtttccccagtgagatgcccttggaaaaaaccaagtttttcatttgcaaatagttatcagttggagatagcttttgggatagagttggaggcatctctgtgggctcattgtgtgttggtcctgttgtatttagaaggccttgttttctgctatgaattataatgtaaaatatctgggttttctgaaggtcttagccaacccctgtgacagggtcattcgactccaaaggagacatgacccacaggtcaagacaccctggtttgccccttttaatatgtttctgttgttttctgtctttttggttttgagcagtgaaaatcctgagtgttactcttcgtacatgtcacacgatttccttacaagctctgagaagaatccttcctccaggcaggctttctatcctacacacctttattgtcctgttcctaaatgtacatgagaaaagattattaacaactgctcaatcagggcataaaatggactaaggagtcacctctcggtctctccgagaatctcataggatgcccagggtcaggacaagcctatcctcatttacatttacaagcaatattcagtcccagaaagcaaggcttcatgagccaaattactgagcttcccaatgactgcaaccattattaaatagcctcaaagcttaataacttgaagaaaagtgaaagagacaaatcaagaattgaaaggaaaaatgattaatactttaaagagctagaaaaaaataatggcagtagtaggcaggaggtataaaaaaatgtaagaaagcaaaatggaaatgttaaactttttaaagttcacagatggacaatccaattgcgcttcctttgaaccagtcaactaagggaaagtctgttaaaccaagcaatcattaaaacaaaacaaaaatcttagatatttgcttttcatttgcaacatataaatacatattaatttgttaatttttggttatttgatgtgtgagtcagctctccattactatgacaaaacacccaagtcagtcatcttataggcaagaaaaataaatagcttatattagctcacattcttattcatggacacttagctctatggttggagtctatggtagcaaaagaacaccataggaacagatatgaggtcctgtcacttcaagggagttgagatgcagagaggtgcagacagccagtcccaatttcttctttaaagccacatcctaaatgacttaattattctccaccaggtcccatccctcaaaggctccatcatttcccaatagcattgcaggctaaaagccacacctccaaactatgggccttggctggggctgggagcatttcaaatatcagcaacaacaaaaggcaatatatgttttagccatctgccttttgaatgttagatttctaacttgtctttattatataaaatacctccagaatctatcaaccagaacatctaactccatttctctcactttaggtctgagccaaaagctagacactggcaaagtaatataaattaagatttctcctatatttaaagatgcaacattttacagttgccttgcttactgctaatttagcagcatttgctaagcagcttaattgtgtcaagtattctgacatgtttaacttagttctgtaaaaacatcagctctcctgcacactcattttgtaatacatcaatgtatctaaatatgcaagtacttatataaaattcaatgcagaggtaaccagaggatgagcagtttagtcagtaaaatgcttgccttgcaatcatgaagaccagcacttgaaccccaaaactcacattaaaaaaatcagcgtgttatggagcactggtataaagttgtggtcgaggggtgaagacaaggaggcagagacacacccatacatgtggtttgtgagcccagcaccctagctgaattagtgtgctccaggccagtgagaggtgttctccaaaaatgtgttggacagcacctggaaaattacacttgaggttgtttcctagcttctacaggtatgtggacatatggacagctacacacacacaaacatacatgcacacaaacatatagctgtagatgagtcagacataagcagattgtatcacaagcaccaaagactcttggtgagcaaggcattcatgttgggctgggaggatcctattggccatcggtgtccggtgtgtgtgtgacacaggcagcttgttccagcagaagccgtgaaaggccactttcagaatcagtctttcccagctcacaagcaagggctttgtttagcatgcagagtagattttgataattatcataaatccacatatatccaagtgaaatttctaaaagacccctgtgggttaatgctgatgtgcctaaatacaaaaataaaattacccatcaagtcaacaaacaagtatgaaataaagctctcccctccggggttcatttatgcaacgttctatgtgacagtagaactgcctttcccagaaacaaagtggaaggccttcttccatgataataattcatgagattttgtcattttccttatactgtagaaggctaccgtagcttctgatcgaacagtcactctgaaggggagctttataaatctcactgaaaaaaagaaaactcaatgaagttaatggatacaaagtaagaattttctggagcccaacagaagcactggtcagctgcactcactgggttttaactgtgtgctacaaaggaaggaattgagcaaacctaattttcatcagttattgatttattagtagccagtctgtcataaaaatcatttgataatggttctcaagttgaatggcattatccaaatgtcatactttttatcattcatttccattgatttctctgacttataaaggtgctttcacagtttctacttgctcctcaggcccagcagaatcaatgttttgctcttggctgctggccgtctattgaatgcctttctgtggtccattctgccagagtttaaaaaaaaattgaactcagaatcttctgaatgataatgataatttttaaccctttgcttgtagctttttatttccttacaaccaaatcgataaactttctaaacacctagagaacaaacattaagaatgtgagtatcattgtttgcattcagtgtaaagttaagtttcttataaattcattagaattattttcaggacaggatgatatcaaaatccttctttattctgggttttagtctattctgaatgggttctacacacatcattgtttttcttggttattagcaatgtagagagaaattcattggatttaagatctcactgaaagacccaaggaaaatttcaatgcctcctccaaattgtaaaatactctcttctatgattttgttaaaactggaccccagtgaaaatttgacaggaaatatggtcaagttaatagtaaatcagtttgattggtattcatattcttttccctcagaaataaatattagaaaatgataacataatactttttggaaagttctggtctctggtatagtatgtttgagtatgtcaaattaactgcttttgaaacttgcccataggaatttgaatatgacaaatgtgttaggatacatgatagtgttcgtgaagaataaagcaactcaaaataagttccattcttgagatcttcaatttgatgctacaagtcagtgctatttcagatccaggcatcaacaactcactgcagaacactagaggcaaagcttatacaaatgcagaccaatttgatgccagtgtttcctatggatctaaagtatttcactgtgaaaatggccaatcattaaacagagatgaataatatcttaaaatgtagatgttttcatttatggcattttaatcaaggaagtagtattgtgtagagaccaaacacagtctgtgaagtgtgtagtaaatgtttgttgccacaagaacacacggatctcaaggtgggcagagtatcagccttgtcgtaggtgactgtcattcagatgaatgacaaaggcagattcaaacccgataaaggatatcatgagaaatccctcctttctatcttcttatagcctgtgtgcttgtgctccacccttcttatttgtgtgttgaaattggagtccccagcgtcactgatatttggagatggggactctcaggaggttcatgactccacgttcatgatgggagcacatgaaagaatttgcttcctctattactgtgagagtttatgagcaaacagtcatcggaaaccaggaccaggagctcatcagagtctgatctgcatccaccttgaccttgaacttcccatctttcagtcttgaaataatatagaaataatttgctactataataatatagtagcatttgctactgaagccacccagtctggaatacatttctgatggcaaggcatgaatattcatcatgccttaccccaactcaggactttaccataggctaatgagaaggattggaagatacagaagctagagagaaccattatgcaaactgcaggctctgagtaattacgatgtgtcaaggtagaatcttcagaacaaatactgctgttctgatggaggagactaatggagaagtcctgcctgtgcagagggataggggatagttatcttcattttactacaaacctaaaactactcttaaaattagccctagagccacacagacacaatgagtaagaatagagtaagtaaatggggtaaaatgttttataaaggagcagagaagccttttaaaaattagtactgtgtgaaattttcttactagtgcctaatattaggatgaatgtgcctttccacttattaattgaggaactttttttaaaggcacaatctaatttttgcaaaaaaaaaatattgtgtcaactcagtaattttctttactagtatatattggtgaaaccacagggaaaaaattatgttattctacacttttatttttcccagagccagtgctgccaggttgctggaaagtggcttctctagagtaattaccagaatggatccctgttacctagcacctctccccactaccacatacacacatacacacacactcacacacacagcctcagtgacactctagactctaggtcctgcatgccaactacagccctcagaaaaaaatattcatttcctagactaataggactgttgaataaaagggggcagtcacctgtgtagacttagctcttgattttagttttctgtgcaaaatcccctctgctgcttaaacaaaatgatactccaggttacttatttaacatgagcaaaaggaatagtagagaagtagtcaccatggttaagaggtaaatttcatctgaacacagggaaggagtttgcaggaattgtatagccacaggatgccatttgcttccttgtgaagcatggcagtttgaatagaaataactcccatagtcccatatagttgatgcttaatctccagttgatagactattttttagaaggattagaaggattgttggaggaggggtgtcattagtcgtgggctttgaggtttcaaaagcccacaccattcatnnnnnnnnnnnnnnnnnnnnttcattctctctctctctctctctctctctctctctctctctctctctctgtctctctctctctctctctctctctctctcattgttgtatcaagatttaagttcttcacctatgcctcagcaccatacctccctacctgctgtcatgctcccctgccatgatggtcatagactctaatcttctgaaacagtaaaccctaataaactcttttttttctatatgttgcttggtcagagtgtctcatcacagcaatggaaaagtgcctaagacacaagtcataagggttctgcctttggctgtaatctactacagactgaacagtgcattcacagagtctaagagagattgagaattggttagatagatgtctggactctacacagattgactctgtctgaaatcctgagattcccaaggcatgtttttttttggggggggggggagtgcttacatcaaaatagctctaagaccagtcttatattggaaccaatgtttctgatccatatcatcacaatatacactgtgtggagctggaaagttaagaagtcttcttgatggtatcatagcataaatgtgaccctacagagtgctgtgcttcaatagaaaaaaagacaaagttgcaagtagaaaaacctccagaagtgagaatattactatcagtgttaatggctaaagtaatttagcaaattgaaagaaaacagctttcccttaagttataaacttgaggaattcagagaacctggatacagtagttgttcactatttattcagtttaatgaaacacaattccttgaagctgtaactacatttatttcctatattaactttactggcttaatgatgcctattcatcttcctaaaatgtgttttgttgtctttttataggctgggcttttgaaggagtcatggtttttaaaagtaaaattaggtttagaaaagacaatgaaatgcaaagggcgagagaagactaaggagcaagcaggagttcatagacattccaaaccatcacaagcaaggaagcattatgccaagtgcttatgaggtatactccagaaaacagataacctcagtgacttcacctccagaagagggatgagatgcagaatggccactatgtgatgtgcatcttatttgagatatgtaaataatctgtacatatcacctctctctaatgctgtaggcaagatcttactactctagagcccaccttcttaaactgtggggcaaaacatggcgggtcgtaggtaactgtgagggttatgaaaaaagttggcattaatatacggttcctgatcattctacaaccacaaattaaatctaagtgaaatgtaaaatgaacccagatgtttctagaagcactcaccccaatagcatgtgacaacatcactgcagccttagttctaaatacatgacacacatgcactttgcactgagcatgcctcaaaccagggaataccaccagtgctgtctgaagtccttctgatcatagtcaagactattacatattatgagccacaccttagaaatataatgatttaattacagaaaataaagatgtaatgttttcctaccgccagtctttattcaggtcaagctaaatgtatttgtattgtattatgccatcatattgattttaaaactgctgtttgagttcctgactcaggtttcttaaaaagtcatttgataaattttggcttggaattaggacaatagttccaaaagctcctaaattgattctaaatatctctgcattttgtattggacatatgtaagatgtcattctcacattgacgattttaacaatcaatttgatcaattctggaaaagctgaaggtgctctacatcctgcagtatcgaatattcagttaagacttaatcccttacataatataaacaagtacgttgatctcattactatacaaaattgctttaatctttctgcattcaaataaaatatacattaaagaattgggtttttaatttttattggatattttctttatttacattgcaaatgttatcccctttcccagtttccctccctcccagaaacaccctatcacatccttcctccttctgcttctatgagggtgttcctccacctacccactgccacctccccgcccttaattcccctacactggggcatctatcaagccttcatagaaccaaggacctctcctctcattgatgcatgacaaggatatcctctgctacatatgcagctggagctatgggtactcctttcttgatggcttagtccctggggggtctagttggtaaatattgttgttcttcctatgggcttgcaaaccccttcaactccttcagtcctttctctaactcccctagtggggaccccatgctcagtccaatggtttgctgcaaacctttgtatttgtaagtctctggcagggcctctcaggggcctatcaggctcctttcaccatgcactccttggcatccacaatagtgtctgggtttggtaactgtatatgggatgaatccccaggtgggacagtctctgggtggcccttccttcagtctctactcaacatgttatctccatatatgctcctgtattttgttctccttctaagaaggaccgaagcacccacactttggtcttccttcttattgagcttcatgtggtctgtgaattgtatcctggttacttggagctttggggctaatatccatgtatcagttgtcttaaaattcatttctttatagcgtattagcactgtttgattgtataccttgcattttatatagttatcttgcattttatatacctatgtgttcaaaatcctgtaaaatttcttgggtggaaaggaatcacaagtggaaaagtttaagaagccccatccagagcacagtggatttctggagtttctgagggagaaaggatgggtcagaaaggactccttcagtggaaaattagtcttcaaatcagcaagagattagttttctcttgtttgatgcttggagtgtattgaaaggttggttgttatggataaatgggtgcaaacagatatttgggagacaaatatctgttgcttaaagtcacccttccttaattagcctctactagatgacaaaaattaattgattacaaacttacttctttacattaaaaaatgcaagtgaaaactctctggtcagagtcttgtgtatcttgccttccaaacccagaactgttctgatgagcaaaccaactaggagtataaaataggcctctcaaactctgaagtatcgtaagtgtttatcacagtatctatgagcaagcatcatgctaccagaacctggacttcccagggaagctgcgcatctttgcagaaatagtctaggccttggaccaaactcatgatagctccatttatctcaatccagtgcttcacgtgatcaagtgtgtccatgctgtggatgcagtctccccagctggagaatgggaataatggtgccacctcatgggttcaggtccttacaacacaacttgcttagaaataatcttaacttaaagtctttaccatctagcaggttaggtcctgcaaacactaacatcccttcagcatgtttactaatttagaagtactaatactgttgttattagaaggatctccaaggaatgtactttaccagtacataactaagaattttcatctttgtgagaaagaccttgctttatggtaaaacagctgtcacaaggtccctgtggtaaagaccttcatggtatcttacagcacagccacaaggatgatagggaacactctggcaaaattcctcagcatgtagaaccaagaaactctaaaacactcttgaacccaactttatattttcagtacttcaatacttcattgtaatggccatagttccatagtgtaggggtccacttataccccagtttgttcaaaatagatacatgacctcaacagtatttactattgaaatctgaagtgttttctaaaaaaaaaaaaaaagactccaattagtccatagtgcagtctataaagtacttatcatgtacccttgagggtctaaggtccatccccaaaccaatgtagcaatgctttgcacaggaacgtagagactggctaatccttgaggcttgtgggcatccggcctaattgactcaagtcccagtaaaaggacctgcctccaagagcaaggtaagaagctactaaagaacaatacctgaagtttaccttcatgtgcacatacatgtacacacacacacacacagagagagagagagagagagagagagacagacaggcagacagagagagacacagacaaagacagagagacagagaaatagaaataaagagagagatctcagtgaagaaaatagacacattttccaaataagattttaaaatacattaattcttgaaaataaggtaacaatgttagtctttacttcatttttcttacaattcgttctgtagagtctttcatgttctggcactgtgctgctcacattggaggggggtcaatttgatataaactggagtcatctagaaagaagaaacctcaattaaggaattgcttccatcagactgtctgctgaagacattttcttgcttaatgattgatgtggcagaatccagcccctgtaaattgtgccactctgaggagatgggcctgtataagatatgtgaactgagcaagccatggaaattaagccagtaagcagcttttcttaacacttggtctctgcttctggttgagttcctgtccagacttttctcagtgttggactgggatgagtatgaataagccaaatgagccctttcttccaaccctagtaggtcctgatcactgtattatcacagcaacagaaagcaagctagaatatccagtgtggtagcttgaataagaatggctcccattgattcaggtgtttaaaagtttggtccatagggagtgacactattaggaggttggagtaggtatggccttgttggaggaagtgtgtcactgtggaagaggattttgaggactcatctatgcccacgctacacacagtgtgacacacactctctccttgctgccagcatatcaagatgtaaaactctcacctctttctttagcaccatggctacctggacactgtcatgcttgccaccatcatgataatgaactaaacctctgaaactataagccagctacaattaaatgttttatttaatttatttttaatattctattaattattttatttttatatctcaattgttgcccctggctccccctcctagagttcttcccccaccctctacccttcacctctgagagggtgtctcccctccagcattctccttccttggggcatcaagtctctataggagtaggtccatcctctcccacttgagggcaggcaaggcagtcagtagggagccttgaaccagcccatacatgcacttcagttagtggaatagtctctgggagctcctagagagccaagttagttgacactgttggtcttcctatagggttgcaatcgccttcaattccttcaatccttcccctaactcttccataggagtccccaacctcaccccaaagcttggctgttaagtatttgaatctatctcagtcagccatgatagggtcctgtctgcaagcacaacatagcatcagtaatagtgtcagggtttggtgcccacccatgagatgaatcccaagttggaatggtcattggtcagccattccttcaatctctactccacttttgtccctgcatttcttttagatagaaacaatttttggtcaaagtttgaaggtgggttggtgtccccacgcctccattggggatcctatttaactactggaggtatcttttcaggttccatctccccactgttgggcattccagctaaagtcagccatattgagtcctgtgggcctcccccatcctgggtctctgggactttctagaggattcccccacaacctgctcccggcagctatatatttccatttattttcctgaacttctgggcttctctcctgtctccccacatacctaattctaccctcttctcctccccctctcctctcccacctaggtctctccctccctttgcctcccaagattattctgttcctccttccaagtgtggttgaagaatcctcacttgggccttccttcttgtcaaacttcttatggtctgtggggtgtgtcatggatattctgtacttttggctaatatccactaatcagtgagtacataccatgcatgtactattgtgtctgagttatctcactcaggatgatattttctagttccaaccatttgcctgcaaaaattcatgatgtccttcttttaatagctgaattctgtttaaatgaactgcattttctatatctgttcttcagttgagggacatctcagttgcttctagtgcctggctattatgaataagatcaggaattcatggcacatacctaaacatgataaaagcaatatactacaaactaatcaccaacatccaattaaatggagagaaacttgaaacattctcactaaaatcagagacatgagagacatggctacccactctctccctatctattcaatgtagtatggtataactctgactaagcaaatgaaagctctgtatgataagaacttcaagtccctgaagaaaaaaagttgaataccttagaatatggaaagatctcccatgctcatggatccataagattaacatattgaaaatggtcatcattccaaaaccaatctacagcttcaatacaattcccataaaaatccaacacaattcttcacagacatggaaagagaaattctcaacttcctatgaaaaaaacaaaacaaacaaacaaaaaaaaaacaggatagtcaaaactattctgaacaataaaagaacttctgggggaatcaccatccctgacctcaagctgtactatagagcaatcatgataaaaaaccacatggtattcgtccagagacagccagatcaatcaatgtaatagacttgaagacccagacataaatacacacaactatgcacacttgatctttgactaagaagcccaacccacacagtggaaagagaggaagcatctttgacaaacggtgctggtctaactggcagtcctcatgtagaagaaggcagtttggtccatatttatcatcctgcacaaagctcaagtccaagtggatcaaggacctcaacataaaaccagatgcactgaatctaataaaagagaaagtgagacatagcctcaaatgcattggcacaggggagatttcctgaatagaacacaatggctcaggctctaagatcaacaattgataaatgggacctcttgaaactgaaaacatccgtaaggcaaaggacatcatcaataggacaaaacagcaacctacagattgggaaaaggtcttcactaaccctacatctgatagaggactaatatccaaaatatataaagaaatgttttcctttatatgacttgccttggtcatagtgtcttctcacagtaatgaaaccttaactaagacaccccgtcaaaatgaatttcagtgcctttctttagataagtacatgaaaatcattagagtctcttaaaccgtactaatcctaagtgatcttaaggaatttgtgaatttaaattaatatttaaatatctgtgaagctaaattaatatttaaatatttgccaagttaaattactatttgttaactaggacatagtgaacggtgtaaaatttctccacacaaattatgacagttgaatttcatcctctggaacaaataggaaaatgtctgtgagaattagtgacttgtgtatttcctaaaacaggggtcttcttcagttcttagtaagtacaaagtaaacaactactgccgacctgcatactgtcaactgagtgctcatagaacatggtttggtgagcagatctgttgcttgatgggcatgtgactgcctcccgtgggcttccagagcattgaaacatcctttcctctgtgaagttgtactgtcccctggccttgtagccactgccatcctgtttgttctcccctgaagaccagctctgctaaacatagatgccttttaacctgggtcacctccaaaaatttgcataccgtgaatacatgcaaacaaaataaatattgtttagtatactgataaataaaaagttgagtcaagttttttcaccactgatcctgagtgggaaggacatcaagtagaagggttgtttttttttccccactgaattgtgagttgataagtttgagatttgtttttgatgttaacatcactggctttgcaatgaagctttattatttttatttgttcattaatttttgcctaaattgaccagtaattccatttcctcagtgaatgactacctgaggccagactcagatgatgaagttttaatactcaaattggatttgtctgatgaggagcccactggagagtccctttagaaatatctttaggaggttttgcatgtgaaacaaaattgaattcacccacagattttcattaagtgcctcaagaaggaaataattacactgcctgttcattcagaccacgatgtgatgttccatgctagagctagacagaggcgtgctaatcagtggggccaccttgctattaaaggaacctttttaaaatgctaacaactatcacaatttaaaagaagcgaatctatcagattgtcaaaggtttttaaaatttgataaaaatgaatgttgtcaggagcgtggagagaagggtcccctctgcagcgtgagcagagatgcaaattgcctcattctttctgaagggcaggctggtgggatgcttaaaacggaaaattaatgtatctccactgacagagaggcccatgtcaggaaatttacctgaggagtaatcactcacttgggagagaagcctgtgcaaagatgctctgggcagcattgtttataagggaaaagatctgaaaataaccaggtatctggttagcagtagaatgaagttaaatttggtaggaggaaacatatagacagctggagtgccacagttaaggattgtgtagcacctttaagttcaggtgaatggaaagaggttaaaatactcttgcattatctgtccatgtgcaattattattgaagttatctatacaaaatgtgctcagaatcatccaatattagctatattgactagatgtctgtgcttagacggatggaaagaccactgaagcagatgctctacagaaggataaatgctgttgtgttgctgtgcctttgtctacactgaaaaacaacctttaggtctttggtcctgtgaaggcttgatgccccactgtagaggaatgctagggtgggaaaacaggagtaggtgggtgggtggggaacaccctcatagaagcaggggaagggggtgggataggctgtttctgggagtgcaggggagggaccaggaaaggggataacatttgaaatgaaaataaagaagatatctagggtttgtttgtttgtttgtttgtttaaagagcaaggggctaaacagttctgaaaacatccttagaagcatgtccagaatatggccctaaacatttccaaatctaactaagctgatggtgaagattaatcaagatatacgaagactctaaaactttaacattgttattttcctaacaaaaatggtcacagttcagggagaatgggtaccataccctgaagatggtctgtaccctcctttgaactgaaatcgcaggttgaaaagaaatagttagggttagggttagggttagggttagggttagggttannnnnnnnnnnnnnnnnnnnnnnnnnnnnnnnnnnnnnnnnnnnnnnnnnnnnnnnnnnnnnnnnnnnnnnnnnnnnnnnnnnnnnnnnnnnnnnnnnnnnnnnnnnnnnnnnnnnnnnnnnnnnnnnnnnnnnnnnnnnnnnnnnnnnnnnnnnnnnnnnnnnnnnnnnnnnnnnnnnnnnnnnnnnnnnnnnnnnnnnnnnnnnnnnnnnnnnnnnnnnnnnnnnnnnnnnnnnnnnnnnnnnnnnnnnnnnnnnnnnnnnnnnnnnnnnnnnnnnnnnnnnnnnnnnnnnnnnnnnnnnnnnnnnnnnnnnnnnnnnnnnnnnnnnnnnnnnnnnnnnnnnnnnnnnnnnnnnnnnnnnnnnnnnnnnnnnnnnnnnnnnnnnnnnnnnnnnnnnnnaagaagaagaagaagaagaagaaagcaagctgagcactgatattcatcttgctctctgatttctgacattaataacatgtgattacccacttcacagtcttggacatggctttccaaaaatgtggtagactatgttccctcaacttacaaaccaaaataaacttgtttttcttaaaagaaaaagaagaggaggagtggggaggaggagagggaggaagaggaggaggagagggagaaggaaggggaggaggagggagaggaggaaaaggaagaggaaaaaagtacaaagtacactagaaataaacaagggtacctggtaccttcctaggaaaacaagagacacaggctagccaagctaaaggaagcaaatgctaagaaagatttttagtctactttaatatgttggttctaatttcatttattttttcaaactaggaaaataatagtttcttagttaaaaaaaaaacacattcagatggagacaactatatcatgtatttcttcaatttctttcattgcttaacaaaattccctgtaacatataccattatatgaatatattattagttaactgtgctatttatttatttgtttgtttgtttgtctgtttatttatttgacaatcccatacatacatagggaggaatttaataattttcaccccgctaccctttcatcttctcctcctcttctgctgaagccattcttctcccaaagaatcctgcctctgcctctcacatcttttagtgtttcttatgtttctttgtttctaaatcattgctaatataaataaccttcataatatttcctggttgaaaattacatatgaaatcacagacgacttattgaataactcacagttgggtttgccttttatcgtagaaattgtggattcatctggagtatgtttgagtataacaagcaaatcaggaatcagttccttagcattgtcgtgctctgcattgcaaaatgactttcaagaaattaagaatattgaacactagaaataaatgggtaagaatgcctgcagatagggaggtgaagagctgatggtgatataaggctaagggaggcaagcacttaatttcttatatattgttatgttcttctttctctgaactagccattttgtactataatctatgccatgttatcacaaaaatacaactctcacctcaaaagggatgagagacagtttattcgagagttaactctgtatgaccaggaacacaaatttaggttactccaaattccatgttccaacatgggaacaagtttcatgacatttttaaaacagaacaaagtaacaaagcataaatcaggtcacatttcaaagtcattgcccagaccactttgacaaggaaacctgatctgttggcctcagatgctatcctatggctctttgccttttggttagtgaaaagtttagtttcgttaaattaattcatttcaaatggttttagtctgttagtcatacaatgttgggtccaaagtgaagtgggcaaggaatgactatttatgggactaatgatagcccaggataaattgtaattagactctgaaactttagcatcccaatatctccacatcactgaagttgtaaccagtctatgagtctttgcagacacagcttcactcgtcctttacagacatggcttctttacagaaaactcatacttaaaaatcaaccttgtccctaatatgcttgtcttagacagggtttctattcctgcacaaatatcatcaccaagaagcaagttgaggaggaaagggtttattcagcgtacacttccaaattgctgttcattaccaaaggaggtcaggactggaactgaagcaggtcaggaatcaggagctgatgtagaggccatggagggatgttacttactggcttgcttcccctggcttgctcagtttgctttcttatagaacccaagactaccagcccagagatggcaccatccacaatgccccatcctaccttgatcactaattgagaaaatgctttacagccggatctcatggaggcatttcctcactgaagctcctttctctgtgataattccatcttgtgtcaagatgacacacaaaatcagacagtacaatgctataacacagaaatttaaaacagaaataataaagatgagagaaattaattccttgggagataggcacaatacagattaatcaacaaggctggaggctcatcttgagaacattcatcaaactttccaggaataaaaatgtttatcaagaatgaagatgaaaataacttgtattgggggaatgtataatgattaagcactgtaatattaataatcttatggacaactatataccaataaatatgaaaatgcagatcattgatacaaatagggatcctgactaattatatctgcatctactaaaataattatgtctaatttaaaatatttctacagattaaaactctagactctgaattcttctaagcacttaagagtgtgagaatcttatttatgagcttagctatacaagatatacacttatatgtcttgtacagatttaacaaaacaatatgcatattcaacagccaacacagtaatatcaaatcagattcagtaacatatgtatgtgggaggggggggagcatcctaaccagttgagctctcctgaagttatacgagaatcctttgtaccatatgatcagcttagtaaatgtgctggttatttatcaacttgacattaactagagtcacctagggagaaggaagctctgttgaagaattgccttcatcaaataggcctatggacatgtctgtgggagcattttcttgattaatgattgatttgagaaggcccagcccactgtgggcggtgccacccatggaaaggtagtcctaggtgggtataaaaagcatggcaataaaccgcattcctctattccctctgaatctgttcctgcccccaccccagattcctgccttggattttgccctaattttcttcgataatagactgtgaaatagaagtgtaagccaaattaaactatttcctcctcaagttgatgttgttagtgttttatcatagcaatgaaaagcacttatgaaaaccaatacattattgtctcgactattaagtctctatttctaatatatagagaattgaaggagaaatttatactgttgtacattgctctgaacttggtagagaaatattgcacattgtctctttgggattaaaaaataaggcaaagatagccttagtgtcatttatattctatactatattaaaagtcttgacaattgtaatgaagtgagataaacatatataaaggtcaccaaatacacattaactgtaaaggaaagcaatcaaaattactcatattcaaaagcagcaaagactttagaatctaaaataatctaccaatatattatgaaaaatattacatcaacttaatagggccctaaataagatatctgtttaaaagttaagcatacgcacacacacacacacataatttgcacttatatacaaatctcgcaataaataataagaaattgaatttagatatgttattactgtttatcacagcactacatcatcaaatagttgaaaatgtaaacaatgatgcccaaacataagttattaagagaaaagcctaaataatgataaagagtattcatggatggattccaagttccaaaactagaaagtttatccacattaatctaaaaatttaatgcaattccaactaaaatatcagtattctatcttgttcaaattaacaaagcaattcctaaattcaagtgtcaagagacaaaaatgtgaattcaagaaacataaaaggaagaaaaagaaactaagtattggcaggaaagcaaagcaactggagccaccactgggcatgtgagctgggaccaccgttttggaaaactgcatgacactccatcccagaaatcctttagaaagacaaacatataatagctagtctcatcatagctccaagctgaaacaacgcaaatatccacctttacacatatgaataagtagattacaaataataacataatttaaaaataactattatacacaaaatgaagactttcacaaatattctattgaatagtaggtgataaaatgaacatattgtctaatttggttcacatgaaactgaaacacagagtaggacaattaattggtagtggtatatgttctagtagctctcctgtggaagggagcatgaactgacagggaatgactgaccgtgggtgctggcaatccttgtttaaactctaaattgttgatatgtgatttatatgtcacatataagtttctgggtagttaaggatcaataaaattatttttatctatgtgaaatcaagaaaactctgaataacacggcctgggacaagaacagcactatggaatattttaatgcattattgatccatgtgactttaaaagactgtgggagtcacacagaacaggcagtagtgggaacaaagaaatagatcccagataaacttaaatagaaagtgtaaattgtgtgctgtgtatatgtacacagatgcttataatgtgcatgttaggtttcaataaactgagtggaaaaaaaatcaaactaaatttcagcattatcaaaaggaggaaaatctatcaagaaaacacttcacaccatagacccaaaataaaaggtacagtagacgctcctatcacatctccactaacagaaccggcatgtccctcacaccttgttctctctttaagatgagaggcagtaggcaagaataataaactttcttattatctcaaaaggggtcagaaagttgaccccataccttttagagcagaaaggatcttgattgtggctttgggagtagtcggataaaagagcttaaatagaatgaccaagggttcagcttcttagcttccccccagtgatcacagatggctgtgggtggcttctgccagcattcttctgacttcttatccagtaggaaggtagacattatcatcccagcactcccttcaaaagccctgttgaactgctttggctccaaatataccatacacattttgaaccaaatgggatgtgtagagaaatgcatggatctgagatatttggtccagaattctatgctccacatctaagctagagaggctctagatgccatgggggatacagagaatgtaatacactccagagaaaaactagagtagccacaaagaagaggatgagtatattcgtggtcacaaaatgtcctctctaaggtggaatagagttggagtgggtgcaggaaagacagtcttaactttaccttgacatttgtttatcagtgttaaaaactagagtgctgctaaggactggacatatttctaccctcactctccaaattcagagattggatccagtgggatgctacttgaaggtagtatggtcctgatgatggatcgctcatggttttcattggtgcccttctaagattagacacaagaaaagaggactgtttcatgggagcttaccacaagcaggggtaggtaggtgagaaaagggtccttcagcagcatcagatcagctgccacttcagtcttatacatctcaatctccagaattatgggagataaactcctattgtttaacctaggcagaccacatcacttattagggcatctcacactgactaaaatgatagccacatctggctttggggaaaagtaaaggcataataaagaggtagcaaaagggtctccttcttctgtattctctaaccctgtactttatgttttcaggagttgtttgagtgaccgtgtttgtttccattagctgccctagaatgtgagcagagcgctcacagaattgatggtagctgccactgcagaaagaccataccgttctgaaggagcggtgtcttttctaatcctctctttctagtactggttttaaataatgtttctgacaagattctgcttctctttctgtcaactgtcagcgaacaggtattgggcattatttgtggggctgtaaatacattacatgaaaaaataatgagtccttacaaagtcgggagcaatgcctcgagagacatttacctaacatgatttatgttggtccaggaatgaagtttcagaaacttccaaatggaaaacctggatcataaaataaagtgtctgccggatcagactttggtatagcccctgaacacatttcccttttgcttttaatatggaagtcagaaaatgcttttttatgttcaacttaaattgtttagttaatggtctaagaataactctagggagctcccctcagcatagcatgttattactccattcttccgactggattcaatgtatctattgtgttcttgctgcagaagctcatctctgggattaatcatcctctttactagcccgaaatcgtagacatttaatggatattcctacatcagtcaatttaatgagtctcattgtctaggggttgaaataaactaatcactctgatgttaaaatataattgatgttcatcctcattccaagttttctaggttggtctctcctgcctgctagaagaggctagtttagtttaagctgttcaacctatgtatgagtgagtgtgtgtgtgtgtgtgtgtgtgtgtgtgtgtgtgtatcacaaccctgattcattctctctctctctcccctctctctgtctctctgtctctctgtctctctctcccctctctcccccctctgtctgtctctgtctctctgtctctgtctgtctctatctgtatctctctgtgtgtctctctgtgtctctctgtctctctgtctctgtctgtcactctgtctctctctctgtctctctgtctctctgtctctctcctctctctctgtctgtctctctcctctctgtctgtctctctctgtctctctctgtctctctctgtctctctctctctctgcctctctctctctctctctctctctctctctctctctctctctctctctctctctgccctggaactcaagtgtgtctactgggtgatgcacagcaggctaaccaacctttatatcatttacaatagtacagcttgtgaaaccacttgacttccatttccttaacagagaatactggaaacattttgtcaattgttctgttaaaagctatggctggttaataccacctgaactatatctggaagcctgacctttgaacataacacaatgttgacctggctgtggtatcagtcactagacaaagaaccaggtaagtccagtgacctgatagcagcagctcaaggtcaaagtgatgccttatatggaaggggatggtccagtcatgaaagccatagtaaataagctgtgcacatatctgagtgataaccagtggcttttggtctctgttttgttttcagctgtttgaatttatgaacttcctggctgaaaacgtcatcttctgctacatgggcctggctctgttcaccttccagaatcacattttcaatgctctttttatactcggagcctttgtatcctttgaagaaagctaatagaaaatgttccaagcttgttcctagtagggctttgaagacatcatagatgttagcatgaccgaggtgctttccacatcagaagcatcatgcgtgtgtaggtttatctccaacaaatcacaccttttgcgaccgtggagttagctcagccagtgaagtatttgccttgcaagcatgaggaccacagtttgaaccccaggacctacaaaaaaaaagcaggccatggtgaaacacacctgtaatcccagttctagaaaggtagagacatacaaatcgctgagacttgctggccagccaaccttgtctgaccttgagttacacgcatgcacagatactcaaacgcacacagagataacatttcctggctataagaacagacaaaaatctagaccccacttttaatatagagcatgctcctcctggagggctggagtcagaggcattttcccgtgagagcatgtatctggccaaagggatactgaacaatacaacggtttctaagataagcctgcagctattgtccacctacctgaaaaatgggatgatgcctcccagggtcacaggcagatgatcttaacttccggggagccttccatcttcccgctcccactgttcacatgaatttggtgtcaatctctcaccgctggattctgccgaactcccaaatttcatctcgacctagatcatagagagaaggaagatgtctcactccaaatctcttcatcctgtcaaggacaagctagaacagacatgccaccgagaagggaggaaggacaaggtaaaacacaggaggggggctaatggctgagcttgtcagcaggcattcacttagaagacatgggcattttacggaagtctcttgaagtagcagttgtaccatatacattgacagtcagcccgtctcgaaattaagcccaccaaatgaaaaaggtgagcaagcttgctaggaacaggcacagttcagtgagatggaaacctccagcaggaatgcatctgttctttccaaagtgctgctggggaggatgacaccatagcatggggcgtcgctgccttgcggcttccagcagaatccgggagtcagtcaccagcaacgggaacgtgatgtagaaacatactcatcgagatggcagggcagtaccaactttcagccaagcatatgttcaaaggaaggcagaattgtatgtccttctggggaggaattgacattgaacgatgaatctggggagggagttagacgtagatgagttgtcatgtttatccttgttttctgggtcatatcagagagaagcatatggacgtggtatctgagcttgctcactcagcctctcaactgccatgttttcctcaacatgtcccaacagctagcaatttttgttgccagagcctgcaacatttaccccctctccttcctcctgaatctgggcagaaagcagaagattccctggaacttccagcacatgatgatgttttcaggtatgtagagttattgtacattcattctgctgctctcccacctttgcacagcacagaaagccatgggggacctggagcacttgcaggaaacctgagcttgcctggcccttggatccagccccgtgctcatccctcagtgctgagcaacaggggtaagttagggaagataaagagaatgtgctggtgtgagcttgaatgtctgaccggaaatgagcctcagctaaacactgacttccctctgacctatcagagcaatttccatattgaggaatttaattaccatcttctcggttgcacgtcccagtataaagtgtcaaatggtgccagccttctccctgagcctttaccatgcatgcagggctccagaaatctcccatggttaccatagaagctaatcagatccatgtaggctcagttattagttggaaaaacatgttaattgcataccagcaggtgcccaggactggttatggctctgtctgatggaagcacaggtctcctctccctggtagtatgtgttctggtctctaagacacggatggaggctcttttcaagaagaaaatataacaattgagtttgctgaccactgagctattctgagagattatagttgctttctatttaattatctttgcctgattggagacagaattcagagacttagtgtactttctaagagtctatatacttacaatacacttagagcagttagttaatgggtccatgatattcaaacgaaacaaaacaaaacaaaacaaaacaaaacaaaacaaaacaaaacaaaacaaaacaactttccatcagaacagtaccaagacagttggggcacacagggaaatacaaaaacagtgagagaagccaacatttattgttttctacttataattcaccagtcacaggaagccaatattaagttgttttgtgcttaggatctctaacagtttaagtgattggactaagaacaaaagcatttacaaatccagactttccctcaatgctaaccaagtgttttgaaattcacattttaaattttattttattttatttattttattattttatgtatggaggtgttttatctgcatgtatgtctgtaccccaaatgtgtggttagtgtttacaaaggtcagaggcagatatcagatctgctggaactggagttacggacagctgtgagctgccatgagagtgctgggaattgcactcacaacttctagaagaacaaccactgttcttgaccactgagccatgtggtcacttggccacttgactccagccccaaaattcaaattctttaatggcagtcctgggagtagtaggctggttcctacctcagttctgtgctgtcttggcccacagagtactctggtgtggctcctgggtttggaatgagttgccttaccaaatacagacatatggagaaccaaggctaaagtttatccttgatagagctcacacagggctttccaatgcttccagatgtgctgtggtaaaaaatcataaagaaaggtatgtcaggtcaacagtgttctgtggacttaatgcaacattgatccttgacagtgaattgacttctcttgtgggaaaataaaggtaacctcaatcatttaaaatcaggaagccagcactggcgtgcgaagtgtttcccaccaaaacatccgtggatttcttaccagcagcttggttagaaagcttagcactttatctcaagcattattttacttgacaaagatgttctaataataccccatgattatagacacacatgcaaactctctacccaaatggccacctagtttgatagtttcttcgagatttgaaaatgtctaagtttgcttagcaacatgattgcagctgccaaacaaacaaacaaacaaacaaacaaacaaacttacagaggccaaaaatatggtatattcagacaagggctgagaagaggtctataatttggtgatatgtttatgatacttttaactctgtctgtgactatttcacacatgcatctactaaatgtttggtcatttttacctcacattgctctccgtcatctcccttcctctctgctgaaaccctttctctttctaacaaatcttcctgctacttcatgtcttttctttattttactaatgacccaagaagtttaattgtggttgcttgcatgagcctaagtggagggaaatttactggaacatgggaagtttatcagtaggaccctctcgttagcagtccatagaccttcggtcagtgaaggctcaggaatctaatgaacaacttggcatagggtctattgaatccatacctgacaaaatgatgatggagccagtctttcccagattgtgagcaggtaactacagcaaagatgaatttgtgtatgcagcagccatgtcatgtccagaagacacactcactgcactttatgccatctgctgcctcttgtgttctttctgctttctcttccacagtgttccctgagcatgaagggattacgtgggtgttccatttaaagccatgtactgcactgccagttgttatgggacactctacgcagttgtgagtctgtgcaataactgctgctcactgtcaaaagaagcttctctgacaaagaaggttgagagcaatcctaatgtctggatagaagtataagtagttagaaggtagtttaataccatgtccatttagcaaaacaacagcattaggttccccactagggcttatgactactgcagccataggctacaggcttacagcatcaggtatgagttccttcttgtgccgtgggctgtaaatccactcacaaagtggttggttactttgtgatactcatgccactgttgccccggtgatcgaatcttgcccgtcattttgttattgtagttcatggggcctacagctgggtaggattgttgttggctttcttccatgctataatacatcctagcacagtaagatatagccagcagaaaaggggacttcactatgtcaataacccaagtgtggtcttgtctgcaagagggtcttattatctagttctggtggaaacccaagaattacaatatcctatattgtctgtgaggcttctgaggccccccttgaacaactcatcctggggagggattctcaaagcaaagtttgtggtttaaaaccttcagcttctaggggaagctgtgcacctctttaaactgtgggatgaggttggggcagggtatgtgttttaaatgctcccttttctaaaagggaagcaagactcctcgaacactggtggggctgaaatgcttgcttttattcatggggatgcttgattagcccattaccatcaccaaagagattagcaagaccagtcttcaggagatttactatatgtggtcccgatgtccaaagaaggctatgggctgtcttctgcgtcaagcatctgtgccacctgtcaagcagtaagtgaattgaatctgagcaacaccgagattaatttgtttctacatattattactaataactttcttaaaactgcataatattcacagtattgcttggtgcagtagggaaaccctatattaaatagctgcccccattttcaaacatcttcaatgttatgtatctgtgtggtgagcccattgatgccacaaatcagaagtcgcatttgcctccccaaagcctttgaaccccatagctgggcaagacagccagggattaccagcctttgtttcttagttgttatttttctttcatttccccctccactttcctattgtgaatacacttagtataaaccttatcattttacatgcacacttattagatacattcctaaactgtgtcatgttcaccacccgtacccacactcttttcatcttgtaaaatggaaaaatatatgcattaaacaatagctcctcatcccttccaaaccctgagaagctaacatagaactttctgcttccatggttttgactatggtgggttcctcatttaagtgaggtcctgccattgtgtctttctgtgactgcatttccatagcattctccaggtttgtcactgttgtagaataatgcagggtttccttcctttcaaggctgaatgacagtcccttatgcatgtgtataaatattatatattgcttatccaatcatctgtcactcttgggtttcctttttatcttttagatattatgaataaacctgctatgaacatgagtgcacaaatttctttaaagccttaccgacaattttaaatatatatccagaggtagaattgctaaattatatagcaatttacctgctaattacttgggaaactgccatctcgccttccatagcagctgtagtgttaacacagtcccaccaagaacccagcatagagtgccagtctctctatgttgtccccagcacctgtttagttatcctttatggaagctatgctctcagtatgaggtagcagcttactcttttgatttgtgtttccttgctcactagtgatgcgttgagcatcttttcagaaacactggccattcatctttttgctcatcttaaaatgtgtcttgtcttttggtaaaaatttccaaatgttctgtttcctaaacattgaccccccccataagataaaggattcaggaatattctctccctccctttccatttgtttctgtgttactgggattatattgtatttttatacatgatacctttgtcttttgatacacaacagttttaaaagttttcaggaagtctagtttgtctgttatttactttgtgtcctctgtgcctttggtgttataccatagaaaccattgcctaatctgatgtcccagagattgggtctgtattctccaaagaatgctatggttttaggcttcgctcagttgtcagtacattttatatgtctgtaatttgggagtacaacttcattcttctgcacctggatatccagttgtcctgctatcatttgtccaaaactgcacttgcattttgattgatcttagcagttttgacaaaaatattttgaccatatatgtgaaagttttattgtcatgttacatttttttaatcccatgtttgtcttttgcactatactattgagatacttagaggggtgagttcatatgtgtatgtgcgcgctcacgcactcatgcttgtgtgtgtgtgtgcatgtgcttataggccatataggaaaacaaggctgctattcctcaagcaacacccaaatgctttttttttttaaccacatctctcactagcctggaactcacccactaaatgagccccagtatccacctgtctctttatcctcagggttgggtttgcaagtgacactaccatccccagatgtcttttttggttttttttttttttttttttgaggttttttttttttggtttggggttttcaagacggggtttctctgtatagccctggctgtcctggaactctctttgtagaccaggctggccttgaactcagaaatccgcctgcctctgtctcccaagtactaggattaaaggcgtgcgccaccactgccaggctcccagatgtctttttaacatggctctgagaatgaaactctaacctcatgctccccaaccattactgaagttgttcaagccattattgaaaggttttgttttgttttgttttgttttgttttgttttgttttgttttgttttgttttgctttgttttgtaagttttacaaacatggaagcttgagtcttattttgttctctttctttttctcaagaaaattttagctatggaaggttgaggaggaccattgagactccatatgaatttcctatttttgcaaacaaaatagtaatttcaggttttgataaacatcaaattgggtagtattgatattgtaacaatattaaatactagaacattttatgaccatggaaatgtttccatttatttctaattttcatttgtttcaccattttataatcttaatcttgtcaccttggtttacacctaagtattttttctttttctgctattgtagatagaattactttttataatttcccttttagatttttattgttggcttattaaaatgcatccaatgtttgtgcattcattttgcatctttctactttgttgaattcatttgttatctgtaatagctttgtgtgtatgaaatccataggattttctacacatgaactcttctcaaatctgtgaacagaaattactttacttcatttgcaatgtggataactttattcctttttcctcactagttgttttgactagatttcctagtaaagccttgagtagaaacagtgagagtggggcatcctttgctttcttctgggcatgcagaaggaacttccactactgagagtaacatttgatctcactttttttcacacatggcttttcctatgttggaataattttatttgatttctagttcactgagcatcttctagtcatgaactgctgatgagagactaacaaattagcagtgagtaagggtgctttctactgagtctgacaagaattctattccttacattcctgaaaattatcctatgatacacacacacacacacacacacacacacacacacacacccctctaagtgaataaaataaaacttttttttaaaaagccattaaactggaaaagtacttttcttatataaattgcaatcatcaagtgatccctctgaattcttctggtatagtttgccattatttgcagtggtgggccattttcctgctctgagaatgaacctcactagggcatagtaaagaattatcttaatgtgtggtattgaatttgaattagagttttgcctttcagtagtcataagagatatcagtccagtaattttatagtagagtctttgcctagctttgatctgagagcagtgtctagagaatgaactaaagaggatttcatcttcctcagtttcttttgaggagtttgcaggacacatgtttttctttaatgcttgatagaattcacccatgaagccaccagggcttgcaattttctttctgtggagatttgtaatagtggttacatcttctaatagctatatgtgtgtgcagattgttttgttcaccattagtcttagtgtgcattgtgtttctaccactttatccattgcatttaattatacactgaacttgcttacacttcttacatttctacagtggatgataatgtctccagtttaattctttgattttagcattttgaatctcctttcatttcttaatgcattgagtttaaggattgtcaattttgttgaccttttcaaagaatggacttatgattataattattttccctgtattatttctatcctctattttacttatctgtgctccaaacttattatttccttctatctggtagcttactggtttgtttttcttttttacctagttcttcaaatcataaggtttagttgttggacagttggttcaagatctttcttgtgttaaagaattaatagctatacatttccactgccatttcatgagtcttgaagaacttcctacatcattctcaggcatctcttattattttctacctttccttctgatgttatctttaatttatttgttgcctgtatgcttgtgtgaatatatgtcatctgtgtacaagtactgaaagagacaagaaaggtgtgttggatctctgagtcctggagttacagtcaagtaggagtcacccaatgtggctgctgggaacgaacggcattggggtctctgaaagagcagcaggtgttcttagccactaagcatctcagcagcctctcagcctctgaagttcccgccaagcaatctgctgaccagattagcatatattatcaaagataatatcaaaataagactatcaaagactctgtatatggtaagtcatgcagtttagtgtttaagacaccatctcccttaatgtgtgtatatttgtcttatttttattgtgttatttttattataaaacctaaatataatctcttttcagtgtttatatgtttgggttcaccttagttgaagttcattgggtttctcagatacttatgtccatatctcttatcaaacacattattccttcaaatatgctctttggcctttgtctcttctcatatatgtctgctcgattatcatcctgcaggtatcgtaggctctctgtattttcctacctttcccttacttttccacaatctccgtagcatcctttactctctcagcagtcttccacatgttcaaatctatcttggaatccctgtagtgaattgatagatcagtcagtgtgtttcccatctcccaaaggtttcctgattcctctgggtcttctacctcctttttatttacactctgctcacacattgtggtagtatgaatgagaaatgtcctccagagtctcaccatttcaatcctttcttcctaatcggtgctgctgtttggggaggttttgggtggtgcattgggcttcacattatgccactgagaagttgctttgagattacatagattcaccctacttccaatgtgatctctctggtccaagatagataccctcagcttcctgtctccatgtgtgccaactgctgtcatgtttccccaccatgatagactcttatccttctaaagctataagccaaaataaacattcttccttaagttatcttggtcacggtgttttatcacagcaacagtaaagtaactaatacatataccattttttggagtctttccatctatccctctgctttggagctttttaaaggtagctatttcagtttctgctaacaatcttctatcaggtctttgttgatttttcttgcaaatagctggcaaaagtgaggatcagctttttattatggttggaaatgaaacattttaatctgatattatggcaactccagaaagcatgtatgccccctgtggtctttgaatatgcttgcccccaggagtgaccctattagaaggtgtggtgttgttggagtaggtatggctttgttgaagaagtgtgtcactgtgcaggtgggttttgagaccctcctcctcgatgcccaggaaacagtcgtctcctagctgaagttggagcaggatgtagaactctcaactcctgctccagcactgtgtctgctgggatgctgccgtgcttcctgccatgatgataatggactgaacctctgaacctgtaagccagccccaattaaatgttctcttaaaataagaattgcattggtcatggcgtctgttcacagcaatggaaacacaaactaaaatgcctcctgccctgggtttgctttcttttgttattattgtttagatttatttgtttaattaattttaaatttatatttattttaacttcagtggactgtccttatgtaaacaacctgagctataagcgtcttgggcccttctaagcttgtggattccactgggctcaagcaaccactttctaatttctcttcaataggcagggttttttttcagtgccctagttgttaataaatggcccccacattagaaaaagagaaaaatgaaatctccaggaactcacttcaaccaaaaggacaggggcatgccacactgagcagagggacagcagcaatggctgctggtctctttgtttgtaaccagtaggaccagctactggttagcagagcacaagtccatggcactagcctactggttccttccagctgtttgtaagcagcttcagaatctcacatgtctctacctgccctttgatgggcagctgtttctatgttgtcctaacatgttctcgttgctgtgataaaaacaatgaccaaaagcaacttaggaaggaaagggtttgtttggtttgcatgtctcagtcccagttcatccttaggggaggccaagactaaaacccagggcctagaggcaagaactgatacaaagaccatggacgaatgctgcttagtgatttgttcttcattgcatactcagccatagctcttgtatatccccaaaccacttgccctgaagtggcaccatacacaatgtcccacttaattcattaattaagaaaatgcacaaaagaggacaggtcttctgttccatctggtggaggcattttctcaacagaggttccctcttcccatgcgaccctggcttgtgtcagattgacagaaactaatgagtatgtctactgagagggggaaaaaaaagatcagactcagactcaaaacaatttattgtccgaagcttgtactggatgtcccaaaccttccaactctaaagatccagaagccgttacatcagacacatcccaccagtatacctgctgttcaggtgaaggaacacatccccgttctttctaccctgcctcttctcagaatctccctgttggaacatgtagagagaaagggagaaattgggcatcccgtttacaatttcacaaccaattagagaagtaattccgaattgagcccagccttccttgactatgaacttagaatctctcttgtctatgtgatgctatctgagatttaacctcaagaacataagtttaaaactatgctttccctgaagcaagtcaacccgagcatgtgtggcatgtctcttctgtcaacatcaacctggaatagttcacaaaacactgaatacatgggtgggacccgcctacaggctgaggcttcacaaagtctctactgatgagtgccacacacagagtgtcatttctctaaagaaaatataacaccctcgactttgacatcttgccacaataggtacaaagctaaggatgagagtggggggattggatttggaggagagaagagaagtgaagatctgaagcttgtctacctacttcactggcctactttcttctctgccaggcatggctggcaggttccccaggaatgtctgctggaattgtgggctaggataatgtaatgagtagggtcagaaaagagggggagaagccacagcaggtgatctgctactaagttgggggtgagtccaggggcttggatttccagtagaggagaggtgaagatctgcaggtagcctaccagcttccctggctagtgtggcttgaaggtcccaaaggaatgtctgctggtgatagggcctgagataatgggatgaattgcagataagaaggttggaggaggtctgtgtgatcagttggagatggaagcagaagggaaggagacgtcacagagcggggtgagaacagagaattagatttgggagagagaagaggagaagtaaagatctgaagttagcctacctgcttccctgactggagttataacatcatttttacatttggtcatccagatattccctcagcacatatttgtctgtcggtgaatgctctaaggtgggtattcaggtaaacaaagacaaaggtgcctttgagagagacatttgccctgacttagttctctaagtccatacacttcagactcaaatgtcaatcaaatagaaaccttagctttctgcctcagtcaatggtgcctaccatttgataaatctcctgtttatccaccctcgccatttgtacaccttttggcattatacagaaagggaaaaaaaatttaaagcagaagtgaactcttttcaaacttattggacttaagctttgctttctcccttggtaccacagttcatatcctgggaaaagccctaacggagagtcctgatttatataaatatactcaaatagctcgtgtttgttgttattgaagagagccatgtacaggctttaggctccataaaaccttgtcagacttacctccaaaagtggatgaaccaagtgatatggagctacagaggtggctcagtggctaagagctctggctgctttttcagagaacttgggttcagttcccagcacctacaggctgactgactactgctccaaattccagaatcaagtgatctgaaggcttctcctagcttccacagacaccacacaaacatgtaatgaacatacaaaacatgtagatggcctggtaatatttttcaagtgaagcactcattgttcatggctgttccacagactaaacacacacacacacacacacacacacacacaaacacacacatctgcctccatcctttgcctccagaacaattaaaccagcaaaacaacaggaagactgcagactgaattcctccactaacagcccctcctatacaattccactgatgtggactagtagtgtgtatacactaagccttggaacagtatagtgggagacggatcgagatcagttggtgaggatctggaccccactgtttgacctatctgtcttaagaagtcattaatgatgacaaatgctgttaaagagtcaatcaaggaggttaaccctgagacatatttaagactttctttaaattcaagaccaggaggctgtaacttctctggtgtatcctgtgacatgcagcacaaagagcttaatcaaaatgctaagctcctttgaagccactcctgattctacatacaaccctagtaatgccccattgaacaaccctgccccagctcccagctcccttgaaaccaaagagactacactctgtggtttaaattaaaggagatgtgtttcacacaaattagcttccctattgatgtggtgcatattacagagatcagtcttcttgttttaatttaaacccatgtgctgcaatttttatttaatttaaaactaaataagagccaggagctgatagaaggagggaaaatgccaagcctaattgagccctggcagcctttttgaaaccactgacttgggaactacaaactcccagactgcggagtttccatgccactttatctggctgggaggaaggctagggaactgtggttgtagaaggcagagagcgtgttaaaaagcacccttccttgaattcatttcctaccggtacacttgaaagaagacatggagtccgtgatgtagcctctcacaaaactctagatgagttttaaccaggggaatatgaccacattacaaattcctatgaaaattcatccctgaactcatcacagtcacaaaactaacaatgccaagtttgcgaggctttgttgactgtgttcagtatccaacccatcatccactggtacatgttaacattcacagcactgccagcatcgaaggaaggggagaaagatgtggaaacaaagattaaaactcatttttattatcaacatttattgcttctcccttggctgtgtaaaggccagcactccggctaatatccaggggagtgttgtgttcttcagcttagggtcaatgggagtaccagtgcagagctggaggccatctttccctgtgtcattttgtgaaacaacaattgtctgttatctgaacatttgagactctggcacaaaagtatccatatctagaagaaaccagccaagcagacaccacaatgccttacagaatcaactaactgttagcacatggtttcagggtctctgttctgttggtgccacacagttctgacgagcattgtagtggcaggaggctggagcaggggctagtcttcacttccttggttgactagactcagacagtacccacaaaaggaaccaaagatttgtccctatggactttccttcagagacctatctttttaagctagggctcagttcctaaaacatccacagcctcccaaagtcataagaagccaaagacaacgtgttcaagccatgacttacctgtaggaaacatttcctatacaaaccatagcagaaggaataaaactgaaggtgaagcatgaagaaggtcacggggtcagcagtgtcaagaaacaggagtctctgtagtctttcatagactaatgaaactctgttgagatgacttagtgcatcccagtcatcaatcgctctctaaacggggcactttcatgctctcttaatcctgaatacctgtgctagtattctatctctgtgacctgaataattctcaacttgacataacctagagtcacctgagaagagggtctcaatgagggactatttacctggggtaagtctgtgggcctgtctctgggagttatcgttaatttatgtgggaagatccagcccactgtgggaagcaccatcccctaggttgggggatcctgaactatagtaagagtggaggaattggaattatcacaggcaagcaagcaagcaagccagaatgtatgtcttcatttctttctatttttgactatggatgtaatgtgatcagctatcttagtctcttgaggctgtgacttccctgtagaccataacatgggattgtgagttgaaataaacccttttcccataaggttctttgttgtcttaccacagcaagagaagtgaaactagaatagagaacaaagacttacttgctcagttttcagtgtttctgtcaatggtcactttccactgtagcttctacaccatggtaaagcagaatatcatggtgggaacataaaatggaccctcttatctcatggcaaatagaaacacaaaagagatgggaaaatggcaaggacaaaacacccttcaaaaccatatcccttctactaactgggccttacctcccaccacctcccaataatgccatcaaattatgaatccatccatgtacaatcagagccctttggttctgtctcttctcaatgacgggatccattagctgaaaaccagctttaaatagatgaaccttctagggaccatgtcatatctaaaccacaccaatacccaaagtattgacactgtcaaccaagaaacttggcattccctgagcactcatcgtgacactgagcttgatctaattctgacagtctccaggtaattcaagtgtataaatttgagaagaacattcccgaaagtcactacagttcatgacttctgtcctgagactatcgattcaatttattcctcccatgtcactgtgttatgtttgcagggctgtctaaccagcctggaccacaggtgttacagtagctgcaaatgtgtggcaacacacttgtagattataatgtcatgtcaaaagattggacatttctgatagcctgtcttaggcgcctccatttatcatctgatcagcacggcactactgacttagttactgaatgccttccaatctattcacgctaatatccttcttctaacccacctttatttcttagtaattcgattgattcatcagacctcaacttggacttttcttcttagaaggctttgtaacacctcgagtctgagttgatatccttcttagctctttctatggcctccagtatcatcatttcctaaaagccattctattctaccatggttgtcagtctgtctacctgtatcccctctctgttgggagttttgtaattgcatgatgcttatctttataacttggccccagagcactgcttgaagaaactgagcagccttctgcatatacttggtagataataggaaaataaatgaacaatgtaacaacattgtccacccaacttaaatggtatgtttaatatatattgtcatttaagaattatccattctatcttgttttatttctagaagctttgtattattacagaattgccctgttgtctcttaccagccttactcatttccacaggtgggagataagcagcaataatttcaaaggaagagattaataaattaaatctactattatctagcctgaacattggtaacagtaatattggtaacaagccctcaaaaataaaatgtgaatttgaaaatgttttccaaatctttgtttgctttatgctgggggaatgtgtttgctttcttattaaaaaaccctggggttatttgaatccaaaataaagctaaacttgttatacttaggcagataatttctttaactgtgtgttcaagcttatctaaaactctgatgtgtaaggacccgtgacaggggtttgtctttcctttctcttccttacactcctagagaagaaagacagcccaacagtattgccctctgagtatcccctactcaacctaaaatccagggctccccatctcctgtgccccgtctcctccctgccctgggcctatcttatgtaattgattagttcagcagtaagccactaaccaactaatggagcacagagatagaactttttctccattagaggatatgagtgtcagagccccatctctctcaggtgggaaacactgtggcctggggcaggcattagtgagtggtgactactataggtcttctgaggtcttataagtgggacggggttaatcagcttatgcaggaaacgaaccacaaaaatgttttaaccaccgtgtcaagcaatcacgggaaaagtcatcttgataatggatgagcatgcacagcactgttgtggcagagcagacaagcatcacagacccacatggatcacagctcccattagctcctcgcgctttcacccactgggaaagggttgtatgattgtggtgaatacagaatagctgaaccagccaaggacggtgaccagcccatgcatttgtttcttctgataggaagtcaaaatattatcattcttcacttaactccaaagtacatttgtagtaagaattacttgctcttgcatttttaagcagcaagttagattctgatgcttggcatgccacggtatttcataaatagcagctaccgttttgtctaagtacaaggaattcaggctctaaagtggatcccaccttttgtgagtcactggttctaacccacagcttcctagattgccagatagaaaaaaaaatccctagcctaggtacttagtgttgaaaaccaaactatacagctgtcttaaggctggagagatggctcagctgttaaaagtatttgctgctcctacagaggaagaatagggcaggtcacaactgactagaactcaagttccagaggatctggtaccctcttctggactctacaggcactgtactcatgtagtgcacatacagataatcaagtacacacacatgcacataaacaaacgtaaggtttgtttttgttgttgccaatgttgttgggttttttttatttgatttaattttttttcatgtattcactttacaccctgctcactgcaccctgcccagtaacaccgacccacaatccttctcctcctccccttctcctatgagtggatggggtgtcgctgggtatcccctcactctggcatttcaaatatctttgatattaggtgcttcctttaccactgaggccagacaaagcagcccagctagtagaaaatatcccatgaataggcaacagcttttgggatagccccattccagttgttcaggacctacatgaagaccaagctgcacatctactacatatgttcagggaggcctaagtccagcacatgtatgttcattagttagtggttcagaatctgagagccctaagggtccaggttagtggactcttgttggtcttcctgtggagtttctattcccttccagccccacaatcattcctcttattcttctataagagtccccaagctccatccactgtttggctatgggtgtctgtatctgtctgagtcagctgctgcatgaagcctctcagaagacagccatgctagacaggtacctgtctgtaagaataagagagtttcattaatagtgtcaaggattggtacttgtccatgggactggtctctggttgggctggttattgcttggcaatcccctcagtctctgctccatcatttcttgtagacaggagaaattttgggatgaaagttttgtgggtgggttgatgtctctatcactccactagggttcctgcctggctataagaggtcagaactcttcagattccatatccccaatgtactgaattacatctaaggtcaactccattgattcttgggcacctcccttatcccaagtctctgtctcagtctgcagatgcctcctacctcctcatgcctgacagttgcagatatccattcattttcatggccttctagtcatctctcttgtcctccacacctgatcctgaacctcccatttctcctccatctcccctctcttccagttccctccctcaatctgcttcttgtgactattttattcccccttctaagcttcctcaattgtgccttccttcttgtttatcttctttggatctatggagtataacatgatacctacattttacggataatattcactaataagtgagtacatatcatatatgtccttttgggagtgggttaccttactcaggatgatattctcaagttccacccatttgctttcaaaactcatgatgtctttatttttaattgttgaatagtattccattctgtagatgtaccacattttccttatccattattcagttgagggacatctaggttgtttccagtttctggttattatgaataaagctgatataaacatagttgaggaagtatctttgtgggatggtggagcatcttttggatatatgctcaggagtgatatagcaccctattttttaattgggttatttgggttgttggtgtctaacttcttgagttctttgtaaatattagatattaggtctctgtcagatgtagagttggtgaagatcctttcctaatctgtaggctgccattttgtcctattgacagtgtcctttgccttacagatgctttgcagtttcatgaggtcccacttatcaattgttggtttttagagtctgagctattggtattctattcaggaaattgtctcctgtaccaatgcatccaagggtatttctcactttctcttctatgagatttagcatatctggttttatattgaggtcattgatccacttggaattgagttttttaaggatacttgaaaagtcaatcctgccaaggaactgacaccttgagacacacagaggggatgtttgtttgtttgcttgcttgcttgtgtgcttcccttcaccaccatagatgacaatttgataggccatatgcaggcataaatcccgaatcactacatcaaccaaaacgttaaaagtcaaagtaccagtttgtatatgaaaaaatatagtgttcccctccccccacaagtatccacaagtatccatgtaaaacagagatgccttttggcattttacagattatgagaaagttactggatctcaaaatgaccagactcatttatcttttgagatagtgtaactaacaaaatcatgtgaaaccctggcatactcagtaatgagagattataacccagaataacactgttccctgtgttctgggaataaggtcttagaaggatacaggggcatgcgcaatttggtcactctgtgctagaattttcatgtacacttggggctttcaagatgtccacagtgaaccaatattttattgatatttttgaccaaattaacctgtacttatccactgtggcaagcaaacagaccacataattctaccctatttcctgcctgaatttatttactaattgcttgtcagctcagaacatggagtagataaaaccatagaaaactattaacataagcaaaccaatttcaaaaaattagcttctatgcaccagcacaaatcccttgtaatatttgcctcgggttctatagatagagctcgaaagaaaccaatagaattgattcaaataagttatatgtgcaaatgagcaagaagcagttgagtttacaaatgccttgcgctgaacacccatagggccatttagtaattcaaaattttgtagcattaactctgatatattgatacggttcaaacactggtcagctagtgtttcatgcattgaccaacttctgtagtaagataagacttcttgctctgcctcccagcctccagaaggctctgccaggaatctctttcaaagaggatgactgattcctgatgagagaaggaagaacacccaggttgctaatctgtgactcatatagtctttccctctatttgcaagatggtctcttgtgtcatcaaggcacccactaaggctctacaccctattgaagtgattttcaatcccatagcagatatgtaagtacatgtgttaaagtttgttgatgtgggagccttccccccccccccatcttgtcttccttccttccttccttccttcctttcttttttttcttttcgtcttaatctgtattttgccaaggctggcctaggaattaactttgtagtccaaattttcctgactaatgcctcagctcccagagtgcctgaattgcatgtctgaggaatgttttcctcttgggaaagatgggcactgcccttcgatacgtttcttacaatgacacttttcctggtggagtgctcattccagccaccagaggaaatgagagctttgatgagattgagtccaagtgtgctggttagtttttgtcatcttgacacaaaccagaatcagctgggaagaggaaagctcaactgaggaaccacctgcatcacattggcctgtgggcacgactgtgggggcactttcttgattaatgcccctgcctggcaggtggtgtatgttaaataggaaaacaacatgaacaagagtaatggaaggccagtaagtggtattcctctgtggtctctgtttcagttcctgtctctgggttcttgccttgagctcctcccctgtcttccttaggtgatggactataaagtttaagatgaaataaaccccctcctctccaagttgcttttggtccatattttatcacagaaacagaaaatcaaactagaataatgagccaagcacgttatttttgtctagcgtacaagattaacatggcctgggaactctagagatgcacagtttcagtagggcatagtggtgtatggctttaaagcacttgggaggcagaagcaggtggacctctatgagttcaaagctagcctgattacatagtgaactccaggacaggcaggatacatagtgagactctctctcagaatgaaaaaaggcacaatgtttagtctaccacaagcctaataaataagaagtcaagtgtggaaacctgtgactatattcaagtatgttttggtggcaggtagccatcttttggaaagcagccattacaaaagaaatattgctattgtttataacattgttataatgcaaaataaatatcttagattcaaagtgaggttactaaaccctaggaatccttgacattaaagtccagttatctattgtgctggctattttgccctttgggaatctttgcagcatccctggcctctgccctatagatgccatcagaatctcactaagtcccaaaccccaagacacagccaacatccctgcttctgaacacccagggcacacataaatgtttccacaccttgccaaatattcactgggggaagattgccccagttgagaacttctaatctaaatggaaagttttgggttcgcctcttgagcacggcccggtcaagagctgagcgtggctctcagagtgttgactatctttggaaagcctctgcaggagtttcagcaaacattgaggatcagcccctggtatacaaccacatccatcttcactacagaaaaataaacttccaaagccagaggcagctctgcatgctgacttcagagctgtggcagagctaatcccatccccaattacccttcctgctgcccagggcttccaaaagcaaacttcattccagataaaaaatatattgcagttatgttacattccttgtgctcagccttgagttttagaaatgcaagttcatggagagatgaaggaaagaaagttcttcttgtctaatacaagcttggtttgtagaaggactcaatttatttctgaatgtagacgatttttcctctgcaaacaatctgttggcttcccttccctgtagaaaaaatgatgttgaattgaaaatggaactgcatggcaaggttgcacgattcaggaaagtgtattttgaaaccagactgacatttttgctgaaagtagttaccctgtgcaaggtcatacgactttagcaagtgtaaaagctatacataattcaattgtagactcgacttgggctttgatttaccagcctaataataagaatgtgttagatctttgaaataaaccccctcacagagttaaagtgagggggtgggggtgcctagacacacttctattcctaatggaaagataggaagcagaaagacacttccaaaggacacttcttttaaaggacagatcagtttctcagcaacatttatgtatcccagtccatctactgctcatttccttttgggttctaggaacacttccaaatgcaaaagtgacctttccttcatccattcatttaggcattcgtcactaggtaagcttgaggaatgctcaccctgtgagaggctccattttagcaccaggggtatgtcacagcaagtgccagcacagatgacgctgctattcccaagttcactttctaatcaaaagataacgtaaataaataaataaataaacaaataaaatagatatcaaagacaatatagatagatagatagatagatagatagataggtagatgacagacagacataaaggtcttcaccttcactgtgatcaggtggttaggcaggctctctgacctaagaggaggaataaccctgggactacctgggagtggcagtgttggagggaagggaaacatggcagctgaggtgaatagtgagtacaaagaccaagaaacaaaacgagtgcatgcaataaactttaccttcctgtactttgtaaattgctaagtaccctctcctccctctactctctaatacgaggattctaattggactcttttatctgagcatctgtccactcaacctctcctcttgggagactaattggcctctcacaggaacatggctataatataagccttggtagttggtaaccctcctcccttggcatacaccttaacaagcacactcctcatatagttcctcctgattcctctgtcagctcaggaaaagtgtcctggctaacctctgcacaggttctcatcagacccaccaacaaggactgcggttttaccatgccgggacctaccacactcctaccccagtgagcatgcttaccagctctctggattcaggcatcaagcccactggcctcctgttttcagcctagaaatctgacttcgatacagtagcctgggttcctcttttaatcattgaatagatgaaatcactttcttgtgcaagaccttcctaaagtttctcatctcagaataacatccaatcaccttactcttcacaaacccgtcaatatttgctctgtgatgtctatagcatctcctccttccccagtcccaggcctaaccacttcatcttactccaatcacagtgccttccagctccctccctcagagctctgctcaagcttcccaaaggtgagcaggtgctggccaggcgtctctgctcaagtgtcactaacctgagaggcttccctaagcatcctaaacactgaacccatcatgtacacacaccctgctatggttttcttcctagcatcttacatatctgccctgggtgcacctataagtcaagagctgtctctcatttgctacccaactctgtatcctgaaggaattgaagaattaagtaaatcaaacacagatattggcatctcctatctagaaagtctgaagtcagtgcaattgttcactttaagagcaatgttgaattccacatccatgatactgtgggaaatctaagaactacttttaaaagatgtaatttcaaccttttgagagattgagagaaaagaacataacacattaaatattgactcatcccaattataatttagtaatacaagtggtatgatcagtctgttgtataggattttgaagagtgaacaatgtgactagagaattttaagcacccgtgagagtgcaggttgggcagaaacatagttcaaatgggcaaacactggagaagcacaaaggaaatgcagaattctggacatgaagcaagagactgagtgagcttatggcataaagacaactttcttgtttatggagtctctcaatggagagcagacaaaagaaatagagtggagttttgattgacaggtttctatgaaccgtgggaagctgcgtgctgagctgacttgtaacctcatcgtaaactgggattgggagacctctcagagacatggaggagagtgtggggttcatgatgcacacagcatactctcagctgatgtagagttgaggtgtgaggtgatggccttgggccaccatagccagtggcctgagcaagtaccttattctttgctacctaatataaatcttcactaagctcctggcattaatgacagtatgtggttttaagttctgtaagatttcattatgcaccttaattgaagaccacaagtcaagccttaaaatgtgcacttagaaatgagctaacttctggatattataaataggctgctatgaacatagtggagcatgtgccctttattacaagttggagcatcttctgggtatatacctaggagtggtattgctggatcctcaggtaatactatgtacaattttctgaggaatcaccaaactgatttccagagtggttgtaccagcttgcaatcctaaaagcaacagaggagtattcctctttctccacatcctcttcagcatctgctgtcacctgagtttttgatcttagccattccaactggtgtgaggtagaatctcagggttgttattcatttccctgatgactaaggatgttgaataattttctcaatcactcggtattcctcaattgagagttctttgtttagctctataccccatttttaatagggttatttggtcaaaaaagaaaaaagaaaaagaaaaagaaatgagttaacagggactatagaaagggctcaagggttaagagcattgtctgctcttctagaggacctggatttctttcatggtactcagatgacagctcacagctgtctgtaactccagtttcaggagagctgatgctgccttctggccatctgagggcactggacatatccgtggagcacagatatactcaaaggcaaagtacccatacatataagcaaacaaataatttttaaaagtaaatgaggtaacagcaatgaagcagcctgcttaggctcatgcaaggcatcatcctaagagcacattccaaaacccttgaacctcaacataagaccttctgagattaaataataaaaaggtaggcactggatttccagaaaattattcaactattacatcaaactataaaataaccatcattttctgtatgtaatctggactcgtgaaaaatcagaaatctatccagccattgatttgctcaatatatattcactgaacatcgattatgtccctggtcttgctctagctgctgctagtaaacagagcctgacaattataaagcattatatggaagctctgaggggaactgggctgttccaggaatacaaggcagcttgtcctgtgctcagacctcagaggaggcttcctagagaaagcagtgtcttagctgaactctagagagtaccttgaacgcaatgtatggcaggggagggggcaggagaaagaatccagatagaaacagataagtcagggatgttacactcaggctcacacatggcacatcagttggtgtgggtcatgagtgagccagcatgatctttgtcgtctctcttcatcatttccctttatcagcctatagtttcaaatcaccctttttatacatgctttattttgtttgtttgcttgtttttgttgttggtggttttttttttttacattttaactttttttattacgtattttcctcaattacatttccaatgctatcccaaaagtcccccgcactctcccccaccccactcccctacccacccattcccattttttggccctggcgttcccctgtactggggcatataaagtttgcctgaccaattggcctctctttccattgatggccaactaggccatcttttgatacatatgcagctagagtcaagagctctggggtactggctagttcataatgttgttccaccgatagggttgcagatctctttagctccttggatactttctctagctcctccattgggggccctgtgatccatccaatagttgactgtgagcatccacttctgtgtttgctaggccccggcctagtctcacaagggacagctatatcgcggtccttgcaacaaaggcttgctagtgtgtgccatggtgtcatcatttggaggcttttttaattaggtattttcttcatttacatttccaatgctaccccaaaagtctcccgtaccccccacttccctacccaccactcccacttcttggccctggcgttgccctgtactgagacatataaagtttgcaagaccaatgggcctctctttccactgatggccaactaggccatcttctgatatatatgcagctagagacacgagctccgggggggtactggttagtttatattgttgttccacctatagggttgcagacccctttagctccttgggtactttctctagctcctccattggggggcctgtgatccatccaatagctgactgtgagcattcctttaacacaccccctaatacaccccatcccagttctcctttttaatatttatctagggatttcatatatgagtacacatatatttgcatcatttctgcccacctctccctccaacttctacctatatcattctgaccaacccctctagaagtcatgaaatcacacacacacacacacacacacacaaacacacacacacacaactactgggcccaattagtattgcctctgtttgcatatgcttaggcctgaccccttaggattggggtctcatccctgttccttatttcttcatcagccactgagtgcctatagctcaccatcaaggaatggggccttttggaattttcctccgttcatgttggttggcatgataacttgatgagaggcttattgctgagagttcatggcaacacccctatcatatgctgagggatctcatggccatcatctggaccaagatctctaggctcttagaatctttctgttccttcctctgagatgttccctgagacttaagtgtagaggtgaagttatctatgtaccacttggatctagcatgccacagtcaaactatagtttgaccagttgcaaagttatctgagtagtctctggtccaaaaagaagtttcctcaaagagatgcaagagctgtacctatctacgggtataaggatgagtattttgaagcatttagaaaacaactctgttactttagtaatctgaaagtaattggttctcctctagggcctatgacataggtttgtgactagatttacagtatccagcataaaatccctgtaattctctgggtggtgtccccaggacttgggtactatcttcatattctaaaaagtaattcagagcaattttgatagtctatatcgcttggaggagtctcttgaacccctctagacaacaacttgaaggtaaatattccttgcttggtactgagttttttgttagatattgctccttggggcaatattatctcatcaggtaggatgactccagtaaaaccatatgcatgcagagactggagagatgtctctggttattaatactagtggctcttccagaggacctatttccaattcctaattcccagcacccacacggggggtcacaaccgtctgtaaatccagttccaggatatctggatatctggtgctctttcctgtcatctacaggtgccaggcatgcatgtgaatgcagacatacatatgggcaaaagatccctacatagaaagtaaaagtaaatacaacaattaatttaaatgtatgtatgtatgtatgcatgtatgtatgtatgtatgtatatccacacccttgtatgtgaatgtgtgtgctggttggcatgattacttggcaagatctttgtagtcagccatatcatttcagagttcataggcgcagcactcctaccatatgctgaagacaggctcccacaacagttatctgcgaccctaggctcttacaatattttatttcattttatgtgcatgtgagtgtatgtgtgtgtgcagatctgtgtgtgtgtgtgtgtgtgtgtaagcaagcttataaaatggtgattcccataacatccttagtgttattttccctcctccctctctctgcatactgtaagacagtcatgtttgtaggactaagtgccttagagaggatgaaccttcctatctgcactctcattctgtgttttggctaaagctaggcatataatgggtgctcaggaaatatttacagttttgtattacagctttgcaccttaaataagagtgcctaaagagatatttatattcccgcggtttaaatgtagctatatatatctgacctggacccatttgcagcacctttgcaaatgtgtaattgattaaatgcttcactcgtgctctttaaagataaacaggaaactgcacattttctgcagcaggggtccttgctggaaatctttctttggctcaatagtgttctattgttatgagcagaacatcaatataattaacataagaagcccttagaggccaattttaaatgaaaccacatttaattgtaggtatttcctttattccccaagatgatgataactttgcagttggacatgtaacgtgtgtcaaaatccctacaaagtcaatcttttcaaagcaaaattgtagagtcaaccagttcccagaagtccagaattactttgacaacttgactgaaacaaagagaagaagaaaagtaaaccaaggggtccaagtacccagaaaataaaatcaaattcaagttttgatgtgctctaagtttccctttgtggaagcaaaactgtatatattttttggaagtaatgttttgctacaatgaaaatccaaagatcgatatcaattttttttaacatcttagtattttgccagtagccagaatgatttttttttctattctaaaatcctccatggcataaatccatggtgttaagaagatagaatcagcaggcccagaactccatataggaggcaatcgatatatgtgcattaatcaaagcaatgagtggccattgattaggcatgtgcacgggctctggttgtgtgaggacgaacttgcagagtcacaagggacaagcagatcaggacagcacttcatcttctctggggttctgaggcagcttctctttgtccactccacaagctcagcacccgcaacaacagtgctgccagaccatgtcacctgtggtaagtgccacgtggtaagtgccacgtggtaagtgccatgtggaatgtctctcctccaaacaccctcacctctgaacttccctggatgcccattcattcttagccatcccttcccaatgtcttgagtttggacataatagatatttcccaacctaccatgtggtcattgctatgcttttcaggttccccacccccaagacacctgtacattgccttgcctgtgggtataggttttaatatgacttcatctattaaagtttcatatagacgggcatgaagtcggactaccagatatgttttcatatatgtgtgtttgaaagtactggggatctggaggggttttgtttcattttattttgtttcttgagatagggtcttactgtggcaacccataccggcttcacgtttgatgccctcctgctgtagcctccagagttccagggttaccaacctgccactattttgactcatatttaaattaaggactacttacttgcaatttgcttaggagcatagctatgccagtttggcatcctaatggtacattgttaaacatctttaggagggttactgattgtttactactttgaccttggtatctaatatgggtgaccttgcagtaagccagatacagaatgctttaatttgtattctattttctactattttttatgaaaactcgagaaacatagcaaatagtaatcgatgttcagcatttcaaacttctacctcataacggaccatgctgcttgactgacatctatagcaagcttggggtgggcggggaaacgaaagggtcacactctctctccagggttgcactgcgaataaacaaccttgacctataaatcctgtcctcagataatgggagcctgttcccttgccttcccactcactaatgacactgtttgtgtatcctggagagaacattattcaaactgtcccaccttgtccccagctgagtgtgtgagcaagaacacctgtggtgggggcgccgtgcggagcacagccatcctagcactcagaacctctgatagaaaggatcatttttattaatgtctacttcaaatgttatctcccttctcctcgggccatttccttgtctacacggagattcagaataatttccttcttccattacactgttccttggaggtattttataatcagagtgcatattcttctctttctgaggcttttttttttgtttcaggcaaaatgtgttcaatctccctggcttaatcctctgtctcccctgtcacaccacttgtctcttgtacattctcaacgtggacagaacaaagaagcgttataatctaagttctggggcgtaggatagctataatgtccctcatcttacctgtatctgctttttttaaagataaatcatctgaaatgtataatgacttggaatcctaaacctgttataaaatgctgtctgtccctcctctggcacaaccagagccactgcagtcttgataccacagcacctgtgactacttccaggctcattaacaatatctcacagagaaaagcctggagagtcatcagaccctcgcctaagatgttggctatttactcctgcacacatgcagctgcacgagagtcctacctccactgatcatctctggagtgctagagaacataacacagggggtagaaggttggttgatggggggaactccatgtctgtacctccttttcagtaatgtagctgttgaggggtcacccatgtttctggatagaattccagttaaactggttggttcaccaagctggtcttgatgggattatctctctggtctgctgtcgatgccctatctggggaaaaaaataaaaaggcatttggtcacatctcccctggcaaagtgacagagtagatccccagcactacggaagagataaaactggaccactgaaatgagatgcatctgacttaaaccttataaaaacagcggattcactgcctctgacttaggcttgctgccatcatcaaccattctcttcctcctccgtggtctgataggaaccacagggctcagcaagtctccggtcaccagagagcccctcctcctccccatcaaactctggctctctgtttttattaatatcatcaacttatttgaagttctggcctttcattttgtaacacctcttgtgtttagtacagattcataaatatgcaatggacatttagcatatttcaccataaaacaaaaggtaaaacagtttttaaagagtgggctccaataggttagtttccatcaaaatgtttgtgagagtatgcaatcagcctagaatgttttaattataacggttaattagctattaaatttccatggtcctgattttctttgttatcagacacatttgatttagaaaagaaagtgttcccaggaaggaaattttttggtagataaatacaatgtaaatctaaagttttatgaaaaaaaaaagcaagaaaaatggaaagctctggttttgaaaacaaaaagtaagtttgaaaaaaattgctgtacctaatgtaaaggcccactctgaacttacaacaatcgggccagtgtgctacatgaattgacacggataaatgcaataaatggagaactcagaaacagacgcacacaatgcagggagctgattctggacagaggttaaaaacaaactaagagaaacagttgatggaaaaagtagatgtcaccagtgcaaaagataatcgcaacccaagcctctcgcttgatatgaaacctgccttaagatgatggtggacttgaatgtaaagttatcaatgataatctttgggagctgagtttatgcagagtccttagagttgactccaaaagcacaattcacttgaaaactgacaagtttaatttcatcacacctaaaaagattgttctccaaaacctcaaagatgagacaaagaagctgcaggttagaaggcaatatttttaaaacactgcatcggataaaggcctgctatggaccatgtataaagagctcagcacagggcaactggaaattccagcagtacaattaaaaaggaggaaaaatacaagagctgtttcgtgtagcaaagtgtgcagataacagtgtaacaaattaaaagtattcagtgcttttagccattaggaaaagaaaattcaaactctagcaaattaccattccatacctatcacaatggtttaaactaaaaaaagtaacaccaccaaatatgtcaaggatgtgggaaatttagatgatttttatgttgctagttggagtgtaaaaaatggtaatttctttaaaaatgaaacatgcagatactatagcattctgatcatattcgggagcattacctcagaaagaaaaatttgttcacacaaaaacctatatgccaatttaaacagtcttggtttaatctctagtaactgggaaactgtaggtgtccttcaactaagcaaccaagccatgggatagccataccatggattaaggctcaaggatggagatgaaagaccactgatccagtcaacaaacttaagatctagaaatttgtgctggatagacacagtgacaaattgttccacagggtccattgcttcatgacatgcagacattaaaacaactgtaaatgacaaagttgtggaaatggagaacagactactggtgactatgagttaaggggtgtgtgtgtgtgtgtgtgtgtgtgtgtgtgtgtgtgtgtgtgtgtagctatccagtgagattaaaagagagcagctagtgagactcctgtttgattggagggtatgttctatgtcttagctatgcagataggcatcaatattctggctaagatgtcatgctgtttcgttgcaagatgttatcgttggcagagactaaggaaaagtatttctgcatattatttgtcagaactccatgtgaatctacaatcatctctgaataaaaatattagctaataaagaagttatattagcaggttgtaaagataaatatagcagaagagaatgagttcgtctcgatattcagtccccgctctgggtttctctggaaggtttgcgaggtgccattgccttcgccctggccatccgcaacacggaatctcagcccaaacagatgatgttcaccaccacactgctccttgtgttcttcactgtctgggtgtttggaggaggaacgacccccatgctgacgtggcttcagatcaggtatgtgaccctactaacacaatccttgagaagcatgactggcctgctaaacttctaataaagctgacttccttgagagtgcagtggtatatttgtaccccatctgtccccagcttccaagttccaagtgaccttccgtctcaggtgaagcaatatgacctaccgcacactgagctgacttttccaataggcttagaatgttctttcttttcaagctgtcctacaaatagatttattcacctgtgactttatccattcaacagtattaaagtacagtgcgttacactatgagccttaaaaaaaataagatacaattcttgtcctcaagatagctacattctagttaaggttgttaaaagaaaaagcagcaaaactaacaagaaagcagatttgctttgctttttcactcctggaactgggtcttaaaataggaaaaaaaaaaaacgcttaacacacatttggtaagagagccatatgtttttcaaaggggatgctgtagatagaagctatatactttctcacagaaaaggaagccaaggttccagtcagaacccatctaataagcagcgcctgcagctggacgctacaaatctagattgtaggggtaacagacaattagataaaacctggtgccagtttggaaaatggataaatctattataaagtgtttttgtctttattcaaatgtttctgtggcccacgtcctcgttttaaggtaatggattaagcaaacatttcatttctcacatgcgtacatcataatgattctctccagttcccactcgttctcgagggcaaactcatgcccaataggaaaagatccttctaactatacagggtttccaaaaggatgcttattaacaaggactatgatttcagtacctttgcatgacatgtccattataacaagaatgaataaattattcatgaaaacttaagtgactataactataaatacaaatgcttttgttaagcattttcaagaattttctacccatttggcaaagaaaaagcagaagcaggcctcacatatttagtataagtaggcttatgtgtaaagtaggccaagtagctgtgtattaaaccaaatttcggggtagaagagcttatggactactatgggtattactgaacacacaaaagtgctttgactaaaggtgagcagtgagcactttgaaatgcttgttgaattattttctagccacataaacgtggtctgcaatttctctcacagtggtggttcctggagggttcctattgatgggcacacatgctgcattaaactctcaagagttggatcccccgcgaatcgttagtaagacagtgctgtgttcaggtttctggaaaataaaattcagtaggttggatccctgcatggaaaaatgaggcttagaaggcagagcttagaggaagagaatttccacagaactatcaaatacactatcaaagtattctgtggagggcatcagaggtgtccaattttccttcaaataatcaaacataatttattttctatgatttcttttcttactctcaagttatccccaaattggtagcatatttggtttgtagccagctcttcttcagtgctttccagcggcatcagctaacttcccatgaatgtcataacttacatgatctctgatgccgagtcggctgggaagaaagaggtataatggtggatcctcagatggactagggcaagtatccagacagcaagacaagcatgctaaagaaaaagtgagctatcaacacagtatccagaatgaggcactcggaggccaactttcctagagcccagcttccaaagggcccaggtgactcagtaccagatctggccactctccaggaaggggaggagtatggctagggccaggacagatgtagagaaaggaagtaccagggcttccatcacatggtaaggccagtgttctcggcggaaaacctgaaaccagggcagaaacccctgaaagccatcctaagaatatcaaaaggagaatactgaaggacgtagaagtgaagatgtttgggaagttagctcagccaaatggattcaaggctataagaatggttaaaggccaggacggtaaaagagtcatatgcagattcacagatggaagatgtcgattggcttcaactgtgctatatgatcttatcatgggctctgctctcctttcctggttggtgatggtgttaaagaagtcatcaggtccatctcagcttctgagtgcacagttgcccatctcctacacacagctagagagggcctgcttactcacagggcaagccatgtttgccaacattcctatctgactctttccatagagcaacagtatgtgagtaagttgcaactttgataaaaagacaaaagtgtggaaggctgggggagagaatgcaaatatgacctcacatgaaacccacattcttgctagaatatgatttgttaacctattttacatggtctgccctttctcaatttcttctcttaaactatttggaaaatgcttggattagtttttctttttaatcactataggatttttttcactcagttacaaactaccacagtaagaggtaaggaaaatgttttctctcaggtaacacttagtagcaatgtattggtttgtcttggataaacctgactcaaacaccaacggtcatgccatagagacccaaataaagatcgttacctctgaggcaagctcataagttgtcctagcattggtgcaaagttctcatcttaaagaaatttaatttcttttttaaaacattaatagtaaatatatacttaatgtggcaatttgaaataaattgagtgttcgtttctttttaatttttaaaggaaatggattcctcccatgttgttttggaggtttagatgtaagaagaattgcttcttgatgagagtccaactcttccctcctatgatgtacacaatcaccagagtgagggaacccagtgaacagtttccaaggaccctcggtgggtaggcaggaaacaggagagatgaaaggtcccaggctttgccacacaggggccataaaagcatcacataaacaccaaagcccaagtgcccagctctgtggaagtggcaccatataattaagtctgggatgctaatgccattcctggtttagggttggccatctgccttctcatgaatttacactaaaccacagctggagtcatagccttgcaaatgcagtgcagaacttgcctcccagacaacactagaaaccaccctggcaaaattacaatgacctctaatcatagccatctttgactgaataatcattgcatgttggatattagatcataaaatccaggcatggaatctctctgtctctgtctttaacctataaaataaaggtgaggatggtatctacctcttagcatgggtaaaacttggcactgtgacatcaccttggtgctgcagatccactgagcttaaagggaaggcccatacttccaaacggtgcacactgttcccacctgcatgaagagagctcattctgtatgcctacagtctaccttgattgatagatcctctgtggggaaaagaggtatattttcataacaaggcaagattgttaaaagcaagctcagaaagtccctgcctacaggaaggactgggcatgctcacttttgtggcagggattcttcatgcagtttttctttaacctgcaagggttaaagttcaacaaggccaaccctgcctggtcttcctcagctacaatctagaattagagaaattacaggaatttattatccttccccattcaagccaagccatcccaccctctcttccccaaatcaaggaaacaaaatgattggccctagcctgtgtccattgcagggcaaataacttttagatagtttgactcatccagtgttggcattttaggtatatttaaaattgattcttaggttttggcccaaagccatgtacaaatgctttctttatcacttttgcccactgactacgaagttctgtgataacaattgccattagaatgtagagatagagtgctgcccttagtatatatatatatatatatatatatatatatatatatatatataattgtaatctaattgtagccatctttgactgaataaccattagtgttagtatatatatatatatatatatatatactaacacacagaatttcctatattactgaggtaaggaaacaccaatttaatacagtggagaaatgcttataataagttcacttaatatttatctatttggtttcctccctagcaccaacgttcccaagcatgctaacaatttccttcacaggaagattaatgcagtgaatagtgtgtgtgtgtgtgtgtgtgtgtgtgtgttgatattcatacagagaaactttgaaagtgtgagtccttccctgcctcaatctctttaaagtgtggactaaaagctctaaattcacttttgcaggtcttcatttttcttatctataaaatgagggtgataacaagaacacctctttagagtttatgagcattaggtataaagtatacaaagaatgtaaagcatgtaacaagtgcccaacaagcatgcctgtaaactcaaacttcttagccacatacttactgcttattatgaaatacacaaacacagtaatattaattaagtacattcgtgaaagcttgctttcatggagaacagaaagacgtggtctctggagagtttacttcattttgtcctgtaactagactcatcaattttagagacaaccactacttatgcattcaagatgataaatctcattaaaatccccacaaaactatttcagttatccaacagctcaaaaggagtctttcaggaatatgcttcaattcccatcttcagataataatccttgcttgtgaatttttcaaatatccaacctatgtcatttcatcaatttatattttatgtttatgtcttgtattgatttttaaactagcttatacattttatatcaagttatttcaatcaacagacctgagaaatatgttgtctcctgagacatggacaactagttcactcactgaaatagaatcatactttctgtttctcacccactactcccttctagaaaggatttttaactttctgtagattcttctataatgacttctaaatctatgtatttattgctaacatcaatctaatttgacatattaattatagatgttgggtaactagagcaatctactgctgacctaaaagaacagcatgtttataaccaatgttatgagttagctgctcctaaatttgttcaccatctgggcgctttactgtgctgtgcttatatatacatcatcttcccagttccagagatacatttttcacctccacagcctccagtcaccctccccaatcctgctcttatttattttctcttaacaccggcatcacccatgcattagtactaagtttaccaaaacaaccataatctgctctgtggaaggcgatgcgtttggctgttagcaccacccaaaacagttgccttcttttaagtaacagacatatatttaggtgaaatatgaagtttagcaaaagtgatttaactgcagtgtgtggaatttgttactccagggtgaagaggaacccccagtccttgctgaaacagagcattcatccttatcccccatgtctcccagtaactcaaagcccttgacccaatgcaagtagcaattgtgtgacaactctaaaagcaaatggtaggaagcatcctagaagcccattaatggaagaacggataaagaaaacacgatgaaattttattctaccataagaatgaaatcttggcttttgtaggaatttacatggaagtggaagaaaaaattcagaagtagaataaataccacactttgtgtctcatatgcaaatttgtgagtatgagtgtgtgtgtgtgtgtgtgtgtgtgtgtgttgtgtatgctatgaaagaagaagaatcatgagagggaagggaggagagaaacaaggtggtcatgacatacttgatatgaaagcaggtaaaaatggaagagcagcaggaggcggccaggaaggacagggagggcagtgtggaagaggagtnnnnnnnnnnnnnnnnnnnnaacagtacttcacacatgcgtgagaatactgtattgaaacttattgctttttgtatcctaactttaaaaataaatagccaaaagagaaagaagtcaaagcaaatgataatagattaggagtaatccaactcttgggccaggagtggggtttcattcttgctcttctgtctgagtctcttgcattgggaccaaaggtgccaaagaactattttttgcttcttgtagtgaaactgcaggtcaaaagagcaaggaaggaaggagagaagggaggcaggctgggatgcagagggagggagagaggaaggcaggcaggtaggcaccttatctgatcttagatgaccatgatcatgaccatgaccatgaccatgatcatagctctaacaaaagatacacaaaatgctattatgactgtactccaagaagtaaaagcaaacaagatactatcagaagatacgcaaaatccctgaaagggacagtgatgctctggccataagggacaataatcctgttgcaattttttccctctcctgctccctcaccagttatccttgagagcaggtgcaatattatggagaaggcacaggaaattcacagtagtggaggggcactaaagactttcattcttagggagcaagggaaagaccttgggggcagctacaacatgggaagacaattatggctggaagagagtcaagcagatggctctgtgaagtgtgtattaactctgggatcactctcaagctgcatgggtttagctaaccctgaataacacaccacagcactgagaaataaactgcatagcagagcctgagtcagacagcactggacggcacacatgtcaggcagagctgagtagtgctgcaaagactttgtattggaaccaacagaggaaccccaggcaacacaagacaggcaaaaattagtgccctggacctagacttgccaaacaactccctccaccatgaaaataatgaatattatttcataggagaatctgatcaagccatttcacataatattcagattttctaagaggagctcataattactcagtgtgtgaagaattaggaaaaaatatgtatcactaatgaaaaaataatagaagctaacctgaaaatgacagggatgttggaattcagagannnnnnnnnnnnnnnnnnnnnnnnnnnnnnnnnnnnnnnnnnnnnnnnnnnnnnnnnnnnnnnnnnnnnnnnnnnnnnnnnnnnnnnnnnnnnnnnnnnnnnnnnnnnnnnnnnnnnnnnnnnnnnnnnnnnnnnnnnnnnnnnnnnnnnnnnnnnnnnnnnnnnnnnnnnnnnnnnnnnnnnnnnnnnnnnnnnnnnnnnnnnnnnnnnnnnnnnnnnnnnnnnnnnnnnnnnnnnnnnnnnnnnnnnnnnnnnnnnnnnnnnnnnnnnnnnnncttacatacacatacatacatatacatacatatacatacacagacaaaatagtaatagaaaatacaacagaaacaaataaaatcaacaagaagattaaattgtgaaatggagataaatgaggcttttagaacttaaaagtgatgtctaaaataaagaatacactggattcctggactgctattacatagactcccttccctatctgttctcatgagaattgggtgtgtcctacctctgaatctgtcaaaagtttctctgattcaccactttgtttgccactcaattacacatcactttcaaacatggctgactccttctataaactaattttaccttaaacgcatgtactaagggtgtatctgtattccagccagaggattaaaggtgtgaggcctgtctgtattccagctggatcacacaaatgtagatctttggatgtgatcccttgctaaagcagccatgttgctggattaaaattcctctacacattcacccagaaagcactgagaagaacataaaaacagcataaacaaaagctaagtgacactactatacatccaaacccaaatgcattagttattgcaacaactaatgaaataaattgtcagtgagtgaaaactgtgaataaaaagaatcaacaatgtgatgccaataagagacatacttgacttaagacataggtgtgatataggccagctaaacataagagaattagaaatgcattaccaagcatacacccagatgaggtcttgcacataatagtcttctaagcaaggatatttctctggttgaaataaaaaaagaaggttatgtaatgatgagagaatcagtttactcagacagtgtgactatataaaatgagcacacagctaacagcattgctttccaagacaagacaagtttggcagatcccaaaagagagatgggcaaattcacactcagaacagaggacttcatagctctctctctctcaacaactgagaaacaagcaggcagaaaaaagaaaaaccaaaataaaaaacaaacaaacaaaacaaaagttcaggagacatcaacaacaacaaggtgggtgtcttagttagggttttactgctatgagcagacaccacaaccaaggcaactcttataaggacaacatttaactggggctgatttatcagctcagagattcagtccactatcatcaaggctggaccatggccatgcccaggcaggcatggtgcaggaagagctgagagttctacatcctcatctgaaggctgctaggagaagattggctctcccgtgattaggagaagggtcttaaatcccatgttcacagtgacacacttcctccaaccaggccacacctctaaatagtgccactccctgggccaaacatattcaaaccaccacagtgtctttacctactgtaagccctctggttccttaagtcatttttcacatagatctcttctctgtgacatgtggtatgtaaaattgctgtttggtaaatgaagagagagtcaagtgttagtaaagttgcagagtttaacctaatagtaaaagaaatatgaacatgcatatatacttttcacctactttttccttttgttaataatccctctgtaaatatataaacagttactatatctctatgtaaaccatctttttgtcgtactgttttgcacattttaggcaagcactctacccctgactgacagcccccacctcaagacacattaaatgtattcttcttgttttgctgatctgtttgaatattgggacggacatcatatccttatctaatgctgaagcatgcatcttaaaggataaaaccattctattaagtatccaaaatacaagtgtaaaaagcattacaacaacattatcagtacatgttcaaatgctcctgttattacaaaactgttttataggtatttttaaattcaggattgactcaaggtaatatattgtatttgagcctgactctttttttctccatgatattgatttttatagaagaaaccaggtcagctgttttatatgcttgtccacattctggacttgtttcctcgtggtgtcaattaatatactctttcctatattgaatttcttataaatgagaaattaggtcaaactttgaaatcaggttgagtccttttttttttcccaaggatacccattgttgatattttgtgcttaatagtgtgcattgctttgactgtgcgttgtagggccttgccctgaatgctccatcaggatgcttattgtcacaatgctgagtttattcctataggacaatggtaacacgtgttacaagggtacattcttttattttatagtttactttcaatctgtggggcaataattgggtaccacataattatcctcttcccaacactcttgacctctccagtttaacatcccactggtaatacatgttcagttaaactctcatattttggatgattcagtttaatttgctcttgatatctaatttttgtatgtgtgtacatgtgtgttagtgtgtagactggaattgtcccttaggcatcttctaccatttttattttgatagagcctttcagcactgctggagttcacctgctaggttaacctggctggccagtgaggccctgggatctgcctgtctccttctctccaactctggggtttcaaagatgtatcatactccccagctttttaacactgctcccagggactaagctcaggtcctcctccctgcatagcaaacatttatgtcatgttacatgttacgtcatgttatgccatcttcccagccattgatacataattcctagacagttcctttcttgctaaatgattatctttccaataaccttttaaattttctgagggctttttggttttttgtttgtttcattggttgttgttattgttgttgttgttattgttccttttggtcattgtcccagcctggttcttttgtctggttttgagacagttttctatactctaggctggctttgaacttcatctttcttatcaatgctgaggagaaagctgtgtagcagcatgcttgacaaacttaattgctttgcctcagggatggggatcgaacccaggaccttgggcatgctaggcaagtgctctagcactgagtgacacctctaccacctccaccatgactttctctttaaatatatgatgcttttctttgtgaccaggaacaaatatatgctttctaggcacaagaaaaatgcatatttgatattttaaggactaaagttctttgtgtatgcactgggtatcttaactacaattcaatgaaattcccaatattgttatctttggtttcctaagtgagtcagaatacaaaaggtatacatcaaattatattttctgtggctaaagtcctttttaaatatttgttatgatcttataaggtgccacgtattgagacatgcatctggctgctgcttgggaggtgtgtctttttatgataaacatctcccctgcatcatatttgcttcatccattttgctcacacagaaatcaaacaaagtggtcccatctcccttttatgttaatgccccatgctcatctgcagttctgaaaatgtgggattatgaagtgcacaagcaatggggaacgtgcccaggcagtgggggctccccctcctattccttttgtttggttcagtaagcagtgaatagattctagcctgggtagattgcagcatcttcatcaacaccattaaattctccaggatctccaacttctcaccagaaaaataaagccttgttttttaaccagttacaaccttttacctggtaatgcacattttaattctaaatggagctgcttacgaaaaaaattacagagtgaaaacccaagggattatattaaaatgtccattttccatctagccctaaagatcaatcccatagtcaaaatacaggattctaactggagttattaaaaatagtactcaggtttacacttagcttcacaaggaggaaattgccatggacagagaactgtctattagaggcaaaatatgacttaatgacgatttcattgtactcagggcaactgtctggcttggaaaaatgccagaggaatgtactgaagactaattcctcctcctcctcctnnnnnnnnnnnnnnnnnnnncctcttcctaaactctgttcggtgctaggattattgcagtgtagattacaactagcattaatgtagctgctcccatgtttgtagatggtgatcccaagtgtccctggccatctctcctctctcagcagccctggctacatttattttctgtaggactcagtctgaacatcagggtctccaccgtctcctcaagccctttcctccctcctctctcagatgtagtctgctagcacaaggccacggcagacaaaccatgttctctactaaacacacagggcagtgctaagggagggcttggtggacccattgggaaggctgccacagactgctcatggtttctactgtcctctcaggctgctctgccttctgactttatgtccttatgggctacagtttattctgacctagctattgaagcaatcccactcttctctctcttcttttaattctccctcatcaggagcctgcttttttatacagtccttttgccactttaataggattctcagagagttgaagattattgctcagaacagtaaacttaattctatgttttattagccaactccaagcatttgatcaagtgtttaaattttgtgcacactaaaataatgtttatcgcctaaaattagaaatagaatattatttaaaaataacatttgcctggttcatttcacatgaaggtaattgtggttaaaattttagtctatttttctaaaaattaattgctttaaatgcttctcttaacaagaaattctttttaacattcacagatttttttttatgtgtatgagtgtgtttgcctatatgtatatctgtgcatcacatgaggacaccagagaggatgcagggccccctagatgtggaatcacagatggttgtgaggcagcatgtgagtactgagagccaaacccaggtcatttcagaaaagagcaaatcctcttgggcatggggccacctctctagagtccacaacctatttaaactggtccaggattaggtcatgttcttgaagatgagtaacagtattttagagttccatcctgatcccagaagctcatttctcagctgtctgcaggaggaatcggttttcctcttgcagtagaatatcttgatgggctctgtgctgatcatgttgcctttgttaacacttgagtctgatgagttccagactcttccagacttggtgtcttctacgggacaggtgcatagatttcgtcacccttcactgaagctacagctagcaagtggaacatgctgcacttataacccagacctgtggcatcttctgtccttcctgcttcattcccaggacctgtgactagtcattgcaatcctttcctggcatctccagtctagtccccatcttactcacgggacatttatctcctaagggtgcagtgttgcatcacaaatgccaattcccaccccagccctctgccatctccattcacactgtggtagttaagatcgactgcctccttactggatctagacttacttaagagacaagccattgggcatgtgtgatgatttgtttgactaacaatgttaacttgacacaaaccagagtcattagggaagtgagactctcagctatcatattggccaataggcaagcctgttgggcataatcttaactaatgattgctttggaggggggccagcccactgtgggtggtgccatgtgctggtggtggtcctggattctatcagaaagcaggccaagcaagccataaggagcaatccagtgagcagcacccatccctggcttctgcttcaatttcggctttctgacttctgccttgagtccctaccctgacttctctcagtgacctgagggttgttagataaactctttcctcccaagttgcttttggtgctttagtatagcactagaaaaataattaggatagcatatcggtgaggaattatgtaattaggttaatcgagaggggaagaactggccaaagcatgggcaggaccatttcatgggctagaatcctggatgaatggaaaggaagagccaagtagtagaacttacctgccctggctctgagactcaaggcgcaatgggaacatctgcctcacactcctgccaccaccatgccttccccaccatgacggacctcataggctaaattaaaagcatccttccttaagtttcttgggttagctattctgtgacagcaatgaagaaagtaactaaagcactcagtgagctgtactgtgtcagacaacatataaagcatagactcggagacaaaagcctgtgactttgtggagctgacacccctacaccccaagcttttgtcttcacttcctgccctgtgacagcacgagttctataaactgaggcagagagtgagactgtggacagcttcctagtgtcttctgttgtgaagacagacaaggatatctgtctctgagatgagatggccgtaggcccgtggtttcttttcccaaatacttaagcactgggtgattcagtggcactggcttctcggggtcttgagaagcactgactcagaagctcctagtcaccataatagctgctaatttaatgctatttcagacagaagtcacttggggcatttgctaagcacaatttactgcctaggtgtcttagtcagggtttctattgctgtgaagagacaccatgaccatgaccatgttaactcttataaaggaaaacatttaattggggctggctagcacttcagagatttgatccattattgtcatgacagggaacatggcagcatggaagtatacatggtgctggagagagttctaaatccagatctggcaggcatcaggaggagagagtaatgttgggtctagtttgagcttctgaaacctcaaagcccagaccccagtgacatacttcctccaacaaggccatacctcctagtagtgccactcactatgagtctgtgggtggggacattttcattgaaccatcacactaagttttgttcttcatagttggttggtaggtcaggaggggtttgttgttgttgttgtttgtttgtttgttttcttttataaggtagattttgaggcaatacatttcagaaagaaatttttggttggtaacaaaatgaaaatatccaaacaaaaacataagaccatgggactaaatgcatcttatgaatcgatggtacagtttccacttttccattgctttgttctacttaattacttaatgtttctgttttgaatccttgatccaaacatatctcagaaatttgtttttaatagctgactgagccaaatcctcagagtgtataaccccaccagacaccaaggtgaaataaactctggctcgtgtttacatctccttatcagtatctcactgggctgtgtggtatgtcctactgctttcaacatatgttataaaaacaaagaacgcaggcaggcttcctgcgagtatgtctgcagtccaggctacaggagacaaggatgtagcttcaagtatgtgaggaacatcccacggaaataagagagccagatgtgctggtcatggcattcagcagttgtctttctgagaatcacttagttgtacaaactcctctgtcaaacatgtgcctgtgcgtgtacaaatatacatataccctacatttcagtgtattgatatacaatacagtatattgatgccttcaccaacatgccacataatcccataggctttttcctctttaccaagacatccaatcttcccactttcgctacctggagggtccctatttcctcttcatgtcctatactacattagtcatttattctgagaatctttctctcaccagccttctcttgctcagctagaacagattcctctggcttggcattcccaccaccatcctcatatgtcccttcctgatagatcacagtcccagaaagtaattcatactctgtttgtgaatctgaatggcaggtctccactgtagactgtgggactcctgggggtgaaggtgactctggatcgcttccttctgcctcccagctccaagcgcagtccctggcatacagtgtaggcgcttgaaccctttgagcatcaatcatcctgaagttcccaagcccgttttctctcataccgcttaataatttctccttcgctcttctcaagcccccgtctcctttttctcagcttactctttaaaccgatgatcgttccaattcactggagcagaaggcatcgataaatgatttcacaagtctcccaccaaatctgccttgttccctgcatcagtgcccttagattctgccttccatctaattccagagggcagagtggccctgctgcagagaagacccatgcttttgtttatgtgctagtcacatcctctctcaaccactgagattcagtatcccaacatccccccaccccaccccacccacaaacttagcaaagccaagataaagagagggatgccgcagaaaggatcgggaagggaaaaagaaaacgcttgtttccttacacagccaatctggtgaaggggactcgctgtgcctggactgaggctacttctgtgatgatgagcaaagaacgttttaaaagaactctctgtaaataagtaagtccccatcggaagcagcccctcacaggtctgcacaagtaggttagggattgggagtttcagggaaaagaaaacatgcaaaaattgttctctctctctctccctctctttctctctctctctgtgtatgtgtgtgtgtgtgtgtgtgtgtgtttgctcgtatatgtacatatgcgtacgttgctgttttgttttactttttgagactgtatctctcatcagcctggaattcactgattggttatactgagtggccagcaaaacccaaggatcccgctgtctttgacccccacctcacacggaggctgagaatacagaagggtgccaccgtccctgggtcttcctgtttgcagagcaagcattttatggactgagactttctctcaacccctcaagttgttttccttggttcctttgtttcgaacgctccaggctccagcactgagcctggaccatcagctgcatcaggctctttcccctttttctcattgctgcgacccaatgcctggcacaggcaaatcaaagggaggaaagatttattctgttcctggtttcagaggatttgtcagtccttagctacttggcctcaatgtgactggacaggacaccacccgctgtagtgggagcttttagtgaaagaacttctttacctctgtgatgacaggaaatggagaaagaaagcaggggaggaccctttacaaaggacatgctcccaccacacagtcatctgcttcttccaactcgtccccatctagagaccaggttttcaaaacatgaaccttggagggggagggggaggagcgggaatgtgggaacactttcatattcaaactatggcgttaggccatacatttgcaccacaattttgtggaaacctggcaacttcactgaccatgagcctttggccatgagaaaatgggatgcagggactttagtttacaattggctgacccgggctcttgacctcatttacacagaggaaacctgggcttttgtccaacccagtaccaaagaactttactgtgagggtgttgaatttggtttccgttttttcatttctagacacagttggagctgattctaaagtgttttttaggaagtcggttaaaacagcgaaacgcgtagctgcaactcttttatgaaatttcatcttttgttttgacctcgcttgtgcttagataccggaacttgtgtgatgtggctgcggggtgtgggggtggcttaagtcgttgcaacgcccaccacaagtcaggaaactctcgggagtcaaaggttcatttcctactttattaagccaaggactgccgttgagtgtgtgactgggataatatgactcaggttaggaactgagcctatggaatgtgtttcctggccaagagaactagatttcaattgccaccagagttgagtacaaaatgctctcttttgccttcattggcgctatgacttttagactcactgggacggtgagactgaatttaaacatggtagcatgaatccgggttgtgaagaattaagagagcctttgggaagtattacgttgcagtctcagctctgcgcatgctctgtggctgaccttggtcatcacacttcagcgggtaggcttggaagagagacggttgctgcctcgcacccagtaccaagctttaaaaaagaaagaaaactcattagacagtggctcactggatttactaacatgaccccctcgtctgtggattccttcgtttatctaggtctttgtgtcttaggggataccctttcagagaggcacctccgagggcagcacattacagcagtaattaaaacacataaaacacagcaaagcagctcctgaagaaatagcacagattgtgtcttgaaatactgctgagctacgtcttgaaatcctacagctgaaagcgtttggtaaaggcactcacctcatcagagcacatgtgtacagagaagagcccagtaaaggctttaaggaatcataactaggaaacttgtggtgacaggaactggctcaaatctcctcttcccagcctgggctatgctctaactcacctgtagaacggtttgttttacaatgtgtgttgatgtgtctctttagccagccagcatttcagaggactcaaaagcctctttctttccccgaggctgtaactggagttcttccttgtacattacatagcttaaatggccgttgatcatgcttaagtactggaaacaatcagagggctacggcctcagagaacattcttccagcggagcagaaaaacccttgtcgcgcataccccattcccacccctcaccccctgacccctcagcctggcatggtttccttaaatggcactgtgtcctcttttgtcctctcccgtgctctaagaaaggcctgtgattcttagcctcctgggtcccacttgtcattctggtgtaagctgtatctttaaagagttagaatctatgcggggagcaagcagtgcagagagcaccaggggcctgcagttgttgcatttcctggctggggagagcttggagagctaccagcatggtatactgcactcactcatggaggatgatgctgtctgcaattcaggagccctgccataggtagcccatcttgtttatctaaaagtgtcactattcatcctttctggccagagttccctctcccactccagacagatagccaactattctaagaactcagtattcaaagctcatcgcacaccagtgcctctgcatgtgctgatcttgctcttccaactccccaactcctccatcacattgaattcatgaactgataactgttcccttctccatcttatccaggtactaaacattgataacgacaagacctatttactgttcaactccatctattgcttttagtctgatgaccatttgttttggggctccatacagaagtacctgccaataacaagcaattaacaagaggggttaaagagtacctttcctgctcccactccagacctaccactttctaagtgagtcacctgaatctcatttttcctcatctgtaaaatggggctaacatgagtcaccacctaggcattcacttacaagatccctcattcagaaatgctggcttcctggggggttttttgtttgtttgttttgggtttttggtttttgggttttggttttctctactccaagaggacatagaacaaagagccgtttcctagagattatattgtcctgagtgtgatagacaggaaccaattaagatttgtgatttttagatgatgatctttgctaagtgttgggatagagaagggtaaggtgacaatgagaacaagaatctattcttcggaaggacaaccttcctgcaaaccttctccacaaggaaggttctagccgtcaaagtatagatagcaaaaaatctcttcaaggaacgatgaaagggtaacaggtaataaatgggagagacatgggatgcaggagagatcagcaggggctcattacacggagctggtcagccagggcaggtgctgggattgtcataatgagatggaagactcggatggagggagtgagctgattcaaaacagtaatgggcacctgtgtgatcgggaagatgggcaaatgacctgctgcttagagggtattttaaagactactccatatatgaccaaacagcaactgcggaactgagatggggaactcaaaggctacagagagatggacctagacagacagaaaccacagcccacatgggccatgcacccctcacttcaatatggctgcactacagacatctgctctcagatgactcatgccaatcactgtcttgagttatcctcaagaacacaggaaatgcacacgtcttcctgacaagatacctgggactgaacctcaggttagtcctcctggcagaggagagactgttggctaccaagagacagtcagcatgttcaatcacagcatacaacttattggggttagggtgagaattgagcgtggttacagttccacagattggctacgagtttgctcctttgtggggacccagaaaatgagccttggggtagctgagtgttggcaagagaaaaagaaaatggagatgtgagaaagtcctaagttattcaggatatgttgccacagccatgtcatggtgaggaatgagtctgccaaacaagagaagcttcctcgtgccacagaaaggagtcgccccaggtcttaaagtcaaaggagaataatctagtacagctcttaaaaatccattcataattctgcaccaaatgctatggaagagcagcccccgaagtcagtgaggctcatttccaagcctcttctgcatgatcatatttaaacattccatttttgctagtggaaatcttttgggagcaccgtgctctctctaaccacgaagctgtgatcattctggaatttctcatcaaagtgcagatcgccgtgctcagtgaaaactctgtgctgcgagacagaggtcggctgaggccctgggctaaccccccaggttcccgctgctcttttcccacacagctttatatgtctgatgagatgcacaccctaccctgccaagaacgaacagacgggaaacctctggcaatccacacggcatgagcggggtggcaactcaaggttttcttacactgcctttgaaaaacttcctgatttcctcccggaaacactgaaacggcagtgttttcagcacttgcaaagtctttaaagggcatctctgctgctgaagagagtggcaggttgaatccgagcacctctcctgccccactcccacaaacacacacaaacgcacttcaatggccctgcagctacaatgtagctaatgtgcctgaggaccatgcatcttggaccagctaattctgctgctcagaaccccacccccacccccacctacccacccacccccactccaggagaaaggtaaatgaggtagcaaggtagctagcctttgtgtaaggtgccttctaagtgaggtcgaaggcccatcagatgccagagttccaatgagctctaaggtgagtggctcctgctttgtcctcaggaccaaacatgtccaccacctccttcctacccaccaaagccctcaatagataccccagcctctcaagtctctgttttctgcctcaccgctctgtctccatacagaaactgtttatctagtgctagggaaaagttgggaaatggaatggaggatatagagaacggtggaatttccttaaaatgttaggcctaagcagtaggacaagttacacactctgaaaccctcaagactcccggaaccaggtgtgacagcaccctacagggagtcacctccaggcctttgtctgcaaggtctctgtgactcagaatgccgccttattccaactcccttatcccacctgccttgtgcttagatgagattttcccagctccatagaggactttccctcgtctcctgtgccctgtcccccactagactctgaatgtgctataagatgagccagatttagtataagctcatggcttagaagaaggacgccgcaagtaccgatgctggctcttctcccttcttagctgctgtgtgccctgagctgagctgcttcacctctcggtacctctggctgtgtcaattttgtaatgaggttgagcgtacctactgagcaggcctcttttggaagcctccccgagttggccagagggaaaggctgagccacgtctagcatgtggcaatgcctgtttttgttttgttttgttttgttttgttttgcattctgaaacctgtcacctgcactgcgctgttctttctccaggatccagcacagttcaaatatccttgtgtctcaatcatctgcagctgggataaagcagcctgtgtaaacacaggagtcaaatgctgaacacgttgaagaactgaccaaatgattcaattataaataaatggaccctggtaaggaaacaaaatgtagcagggtatggtagcaacagtcctgggctctcagacctaaatttagtccataacatgtcctttccccatcaagtgagacccagagtcttcttaaacaatgtttaacaatgtccttcctgaactcggtatgggcctagccctggatgctgcatagaaggcggaagagcttcagaccgatgtcttgaaactcaggaccagtctctgcttaagaactatatggcttgattccattctccagagtgggactggatcttgatttccaaaagcttgaccaggatgtctccagactcccctgtaccctgcacaagttttagaacgactggagcaggctaaaggtagagacccccaaacactttttctataccagcccacaccccatgcaaactcatcctatacatgcttgtgtgcgcctgcacacagcctgcggggtcttctaaataattctccaccctcttctgtaagcacagtacctctgatacctctgactcccacacagaccttcactccaccaggaagtgaagagcccaggccaccaccatgaggacactgggctcctggcccctgccatctccccagcacatatgtgacaagtacagaatggatcaccatctccctcccctcgctcaagccaggctggttataaagtgtgatggacctggttaattgttttgcctgcataagcacattttgcttcatccatttgtcaagctgaggggagggttgttttataaaaggagatttaattaaatgttttgtcccagcctggccttttcgcttccgcatctgcattacgcttgtgtcatattttccccggagggcaggaaaacaatttagtcaaaatgaaggatccattgatttactattgaaaaaggaaatgccaagctaacaactcccctctataatttcctagtgaccataagagagagcccagtgatttaacttaaaggctatgtggttcccagtctacctggctcttatgtcttcagagctgtgcatgctgctaagtttacagtcctgctcgataggaattatttcaccaacatctgttagcgctatttttctttcctgaacagaatagatgtttctggttagtaaaatcctttcattgttcccacctccagtttggtgactgaggtgaggagtcaattccccccccccaagaccccaacagtgaggtcacagcctgctcctgtcatctaaccacagctctcccacagggtatagaattcaacttgccctactttcctgcctgctaagctgcctcaggcctcaactgttcttgtagcatgtatccgatgctttctgggttaaaccctcagatccctagctgatacaatgtccctgggtctcagaggaagtagaatgtattcatcatctgatggagctggatacgacaggcccttgctggtgtcccgtgcctcctcctgccaccctgggtccacttatggctctcttggaatctgagtttgtctagtaaagaatgagggtagttctggaaccaacttgcctcattttgagggaaggggaattgtgaacataagaggactataagactagaatcaggacaatgtgacttgctacatgaacacttgtgacacttctgggatcattagtgtccctcccagcctcaacagtatgccattcactcccaccatttattgagcacttcctggaagtcattgtggccaggacatcagggaggaacctcagagtgctactgacatggggttcaggcgtggcagaagccattgtaattgagtttttagccaaacaaacacaacgtgatgatagtaagtttcaccatgaagacctactgccctgccctttctccaaagaagatatcaggtagacctgtgccacagtgtcccttgtcccaacagaggatgctcatgttcctcttgacaagaatatggtccattaggaaacacagctgctgacttctgagtgggagctggtcagccaggattcatttacacctaactggtcacaaattacagtgtacagaaaggaaatgcttttgctttgcagcattatatcaaaaaccatagcctcccctattccccatctccttctgcagtgggaagaaggcaaaggaatggtccttgccttcactctgctttgccagctcatctgaccagactgaaaggaatgcactggaaggtgaccataagtgacctctcagctcccagtggactgagcaggagttggtggggacggttttgaatttttagcactatctagctgaagacctcaggttgctttattatcatctactgtcaactccctggtcgctgggattggtttctttgtctgcctgtttatctgtcttgccacactgctggggattgggctgcatacatgctattcaagcactggaccactgagttacatcccccactagtctagagttgctgtgggggcagtgatggtcagccaggctcattctactgctatacactttcataataaatgttcacagtagtggacctggctcatgaggagttaggaggaagggtgagaaggtgcacatgggcaggggccatgggtcagtcctgagagcagcaagcctcctccccagaggaggagtctctcctattgcccttagcttttcagctggtctggtctttcctgtgcttaggcttcctgcctgttagcccttccatatagcatgccagaactgggagaagcttgaaggagactcccacaggggaccttgttggtatggcacaacaaggtgactggagaggaaaatgaggtcagccatgagctctaggggatgactggagatgctaatctaatgaaatctaagcaagaggtcttccaggacagcctccaaagatgtccttctcttcctgccccccatgccctccctccctttctttctttcctaaaattctacaattctgcagagtcagaactgtatccactttcaccattgcatcatctgcttaattctccaggaaagccaccttgagaaaggttctaggccttggcatgaccttgaaatattactttaattaagtgaaacaaagtatgtgggaggtatcgtggctacagtattcctggtgccttattatttattgtcttcttattgggtccacttgaaagatcagaaaacaggccctaagagacaaatatttattcaaagccagactggcagtaaactgtagcggatagatcctgtccccaggtgcatctgcagcacatagccccagtggtgtggagagaaagtgagaagtcttcctcactgaaaagctgtcactcaaaagtacagaagactcaggtcattggaacttcagggccactgaagctaaaagtttaacatcacctctctacttactagtcgcttttgtaaaattttcagggagactcattccaatgccaagaatatacagaggttcttaagatttgaaccaggatagaacaagatacagagacgtgaataagtagaatataaattaattgttctctggagtatgttctagagtgaaatatcctgtgttatccactattcttgctacctggtacctaaagggttagaagacaccccacttgtatattgtcagcagatctcaattcatctggcgaatgctataaatcaagggccagtgtgaaattggacactaaatgtattggacgttattataaaaagagaaattggataatttctactcatttctatctgaaaatgaaaaaccgccagggtaatgaatctccttgatctgctgaaatgcctctcggttataaagtacttttccatcaacgagataagccatcaaaacacacaatacaaattatgcacagagatagtttttgaataacagtaaataggcatcccagttgtttagagggataatcttctaaaagaaacacgggatgagctaaaagcttcaaagtgaagaagggctcttactggtggggactagggctgaaaagaaaggagtctttgaaactattaaagaaacagttgactctcaataaagaaaagaaccaaccatcaagatagattccaatgactgaggccaggtcaagttgcttaagaaggctgatcaacccaaaggcttctcatcaccagagttatcctctttctctttgtcaagtgcaaagaaaggaaagttacaccatttccagggctcaaccacatatccagatctagtaaatgctgctggtctcatcagaggagggagcccatggcaggaaaatggcatcagttgagataacttttaggcatgagcatccagatagccatcattctgggtggaaactcttcaaaggcaaatttcagcagaattattaaaaccaaacagattcccttttctttctttctttcttttttcttttgcatgacttaaggttgtaatttgtaatgaaaaagctctctagaaaccactttttaagtccttctccctgaatttgataagttcctaagttcctataaacaaaaccagtcccattttggctgttggataaataaccactcaagttggcaggtcctctgagggacagttcccagtgcatacatcccatgataagaggattcccacacagcaggtactcaggaccatgctagtttcacataaaacaatctacatatataacagatatctgtgtgtcaagtattgttctgagtatttaaaataaatcacacaccaaaaaagcagtaaagaaagaggagaggagaggagaggagaggagaggagaggagaggagaggagaggagaggagaggagagaaggagggataaatgcttttcctcagggagtattcaccataacaagaggaaataaatcataagcacatcgcaagacaaatatgcaaattatatactagataagtgaagaagagataaagcagagtgggtggggtgggatggggctgggcacagggataagactgtaggatttgggatgtgctctgtattaggatggactgagggaagcctcaatggtaaggtctcttgaaatagactggaaagcggagaaggaagggcatgctagctgaagaaactgcttatacaaaggttatgggcaacagtgtctcaggaaggtccagccagtgttgctggagccttggtgaggaggagagtggctgtgttagtggagaaagaaagagggtggggctacacagggcctggtaagacattaggactgggcctttaactggagacaagtctttctgtgctggaggtactggacaactctatgaagacgaggtctgcgatctagctggtgttccgcagggatgactgtactgtgatcaggagagaggcaaaggtggaggctaggaggccatggcatgaatctgggcaaatccagaaactacccacattctgcatgttgtctcagcacagcaaaccctgggtccaaggcacagtatgagactgtgtcttccaggaaggctctcccagagttgtgacctgtgtccttgagaaaactgctctagacatggggagcatatgagatatgaaagggctgaaggtaccaatggtggaagcctgggatctcagggctactatttgatacaaagccaggaaatacccaaatatatagcctagcaaatgggtcctatttgtcttctgcattatgaactctggagaaagcagcccagaactgatacagaaagatgagtgataaaggtattaacttgaactccttctcatactcttgggctgcttatcccggtcctaagaggactgccacatgtacattcagaaggaaagatggagggcaggatggaaggaagcaagccaggaagggagggaagaagatggggagagggaggagacagaggagtacctggtcatgctgcccatttttcaatccctgaaacaaaagttcctggaagctcccacccagcagacttgtgcttaggcttgtctggccccggctggtcacatgaccatctattcagcaaaggggtggctctgatgtgtcagccacctacagggctcattcaagcccatggtccacctgctgcaagtgaagacggtgcttccccagcagacagtgtggctctgctagccaccttgactcttagagtcgagcttggtgcagagtgatgcctgaagaggcctgacaggcccctccccacttctgatgtcattgtcctgcttccttcacatggccttacatggaaaaaggcttcaaagctctgccttttctaccagtctgtgtgcatctttgattcaacaggagtccatgccctgtgctgatcatgctaccatatgtgtatctgtggagaagaggtgtgtgtgtgtgaatgagcccaactcagtcagtaccaatcatgtaagttatgagtccccaagatgtgtgtgttgggaggaactagtgtctgaaaacgtcccctcttccaagtgtgtctttattttaatagctaccaagctcctggggctcaacccaaaatgtagcgccaggttatatgtgctttgtgcatctagctctgccattaacttccaaaagaatcaatgcatttgaggatacagcttctgctttgcaaaagagccaacgaccttccaagtctccccctactcctttatgctatgcagtaaggcagacacatctcagctcccaatgagctgatggtttccaggctgatggagatctctcctttttactgcttccaaaacagggctggcaggcaacaagcactctacagactctcgtaaagatgaactatctacatggtggtgggaaggtagcaggagtggactcctccttccactctgcagataggctcactgggctttaccttctgtctgccctacttcttcctcctctcttcctactgtaagacagtcactgtagactccccagggagacagtctgccaaattccactacctataccatttaactcgctaagtcacgaatgcaaaggtgagtttgttttgaatgttcccttaaggctgagagaccatagcaagagagcctccaagatacacacccaagaaaaatgtatatgctatgtttcccaagctgatgaggaacaagtataaaagatgaaatatcaggacccagagcatatgtcccatgcattcaaaggcttcctaccctttgaagcagggagctgagctggatgaatgccttaagtcctgtttcaggtattctgagaccaccatttccatcagtctccctcatcccactgtttccccctttttggacacataatgctattcttgctcaatgcctttcaagttgctttccatccaattttattcaaagatagggtgcaggtaataaacatgttactttataattattaagaatcatgtacttccctattaaaaaatgtctactgcatagcaagatttatagaatcatttttacatatcttagagtaattcaatcttctgcctagctctcagtcatctgtctacccatccatccatccatctgtcatcaattatcatctttttgtttatcttaattgttttaattacacagcaaatacagtaacaccatttcttctatttagaagctcatgtgagaccacatgagctgatagggtgacttcagtgttaccaatacataaagctttgtagtcactcccaacagatgtgctcttggcatttaacccatgtcccactttagcctggcatggagtaatttgttgtgctgattgtcagtcaggatctaaggatgttgctttgcaatgtttttcatgagttgctatttcaaatgaaattttgactgatcttttagctagcaggaaagatgtcacagcactacaatatcctcacagctgtactatgtaccagctacctttgtttcatgaccatggcccaatcatttaggctcatggtgctattacttgtggagagggaggcagggaggtttatagtagaaaacatggataccataatagaaactatctcagaaagtccttgtaagggttatatgtattaacctgtggtcatcacacactgttcatcaactacacagcacttataacagagcctgcaacatggtaacatgatacctagcacattacgatcaaagcatttactcagaaatgaacagggcaaacaggagagaaagagcaagaatatgaagaatcgctgagctcggggcttattttaagacaggaaactaatacatttctttaagaggctccttctacaactggatcagcctggaaatttccatcggcttaatcatgacgggccaacatggttccacactagtaagtgaatataaaggggctgattaaaatactttcttgaagataaagtctttgctacaacctgagccagtaagcgctagtaaacagataattacattataacatgttttttttaattgttaattataataaaagaagcaacaacccaacaataatttgccagtctgtacatctgtgaagtttaaatgggaaaattgcctcttgtctcagcaaggatgtaattgattcttgggcacttaacgatataataccagttgctgtctgctcttctctcttccttcaaagagctgacaccattatgtcactgatataaatggaatcttgaaggtgcatcaaaaattctgtcttttgagaggataaggaaaaaaaagccaccgtggctctttgtttggaacagggcatattcaagtggaatgtacccttggaacaaagtcagagtttggcagcagctggagtattttgccctgtccgatgggcagggtagcctattttgttgggttagaaatggccactgtgaagcctataaaatgttctgaagtaacactgtaagggactgttgaagggtgatgcaaaggagccttgtcaagagaccatctgctctcgtgtcagctgaacctaactggaaaagtacacggagttcttgagacaatttgatcagtaaagacaaactaaaaaagtactcaaccaaagatgccgtgtaaattagccccaaagcacatcccccaagcacacacagctcttaatgttgcatcgttacagctgatatcaagtataccagggcagaaaaggcataaactcaaagaatcaagatcaaagtggatctagattccttttccaaacagaacattgctttatgtgccctttaaactgttccacttttaattgaattagtcacacttggtggcagataccctttaatcctttgtcacaggctagacttgcatattttaaaacagcttaagagacatcttgtcaatgagataatcactttttcctcagttcggattatcataaactaaatattttcacccgatagaatgaataagtgtagtcaaaaagaaaaatctaaaatgaagccaggcctcattgggtctcaaatgtatactaacagtaaacgccatctgaagattataaacatatctgttatttcacattccctccatctataaaccccccagacatctacctgaatactaggacaagccatgcagtgaggagacagatagtcttgctaggcatatgctgtgaggagaaatacatccattgagcattctcagaaagcaaactagaaagcagttctcagaactcactgtagagctcttgacattaagcactgtatgttatcagctcactggagtccacaaagcctctatgcggctgtgattaaccctgttttacagaccagagaaataagacacaaataacctggcaaaatttactgttggagcagataactttttttccatcaaatctttgaaggacaacaaatacaatcaatacacaacctttttcctttctagtcactgaaactcattcaactgattatcatcactttctaggatgtcaaggtggtacgaatctactgaatgaggactgtgtttggtcaattactacacaaccacccaagtcactcgggttctcccagttcactaataatgccatttagatctacagtgacagttatgaccctcatgctggtcatgattccttggtcactttgtatctggaattgttccttcatctttcattacctttcagagccttgatatatttttttaaactacaggccaggaatttgcaggagtctgcaatgggatgtgttcagtatttcctcatgattagatgcaagttttgtatcatcattagcagggacattctcaaggtcactctgagttggcatgtgtgccatcaggagatatcccattactggtgtctttgccttggtcacttagtaaggtagtgtcacacagaattctccaccataatgtcagccatttaccccatataattagtgtttgggggaaaggtcctttgaaggtatttgtttatttatgtcaccataaaccctgtgggtttatccgatgggttggcgaatactacagttgttattttgatgttcaaagtgtctttggtctggccaccagaagcctattcctcctgcctctctgtcactagagttctcatcttagagcatgtttttttaaaaaattaatttgaacagtaagccttttaaggttcatcttgtactttccttgctgtgaccctgtaattcactgcttttccaaggacacttattttatttgcacgaagaattgcccttagcaagccaagacctgtgtttgagtgtggttattgctgcttcagacaccctgctaggtagaaataggatgtgcttgcatgggtacacattcatgcatgtgcataaggaaaataattttcatgaagatgcatgtttatacctgttgtaccagggtggtctttctttctagtctttccgtttccatattcgtaatgccatttagatagtgagaaaccgagagcctgcattcttaatgtactctgtaggatcagcatggttttttttaatctctaaactggttatagctataaaacatttcaggaggccatgaagtgtagcaggcagaacacagggccagggccaactactggattttcacttggtatgtaaccttgaacaactgactcaacatctctgagccttgttccttggacttaaaaatgctttccccacctacccctgcaagctaccagagtggctgtgatgtttaaatgaataccgaacagttgctctgtacagcatctggcaggtagaaccagtcaaatatgacccccccccaaatatgcatccccatgcttcttaccacaatgtgaagtcagaattataagacctatcaccccactgagggggaacaatagaaagcccaacaaaagttaaagtgatcacatgattcctaagtgctggagacagcaacagggcatcaaaggttgcaattctatggactcctcaccctttctgggcatttccggggtaaagtagaagcaggaggggagaagatgctccaacaataatggacccattattgagggcactctgtcactgaatttccatcttcatgctcagctatgtaacaatacctaagtttacctttgattgactggatgcctgttaacaccaagaacatcccaaaactcattgctaatcctccctacaccccttcaagaaaagtagtactttgtccatgtcataaatcagtagcccgaatctttcaaagtaaataaataacttcctcaaggctatgcagccagtctctggctgggtgcaaccctagtgccagcttcctttctgtccagtccatgccacatcctgagaagcacacaggatgtacccggtcagtctattagaggaattctggacaggtccgtttgaacaaagaaaccaattaaacttgctgaaaacaagctcgggacatgctttgtcctgttcccagctttctctgcgccccgtttcaggaaattggagagcacaatgactggagtccttggtgtcttgttgccatagcattcctccagcccagctggatgagctggcatctgtttaggaactaaaaagactcccagagcaactggagtgaatccagcaccatagacccaacccttttctgttcgtagtttgtttcttctggagccttgcgcacatggggtgtgtctgcgcccttgtctgttggatgtatacattgtctattgaatgatttgcttccccaactaaatatcaaattcttgggaggcaagggaactctttgtcatccttgtcttttatataacagcccaatacatccctaaaaatgtacttgttacctggatggacagatgcataggactgataattcatccttagtggtgcgtgaaaggggttgaaaagggagagagaggccagttaagagctaaatgggacatactatacatttccatagcaaatagtttagatagacagaagtttttagaaacattagagaagcttatgggtaccaggcatggagttcagagaaacaccgcctggggtgagttctctctctggtccttaacttctgtggaaccctcagcaagccactaaagctaagtgttcgatgaggtagttataaaaaaattgatgcagtcataaatgtgaattgcctacaatattatctggcacacagtaggtactttgcaagtacagcattaccttccgctcttactgacaaataggaagatcccaatgaggtgatgaaaagaaaatatagtgcccaaagccacacaaatgaagaaaatgtcgtctctgtccaaagcatcccacaaattaaattaccataaactggcaatttacacatgtagtcctaagggatcggccacagaaatgaaaatgaagctgccacaaggtgagaactcaaatacatttcccttcatcgttaacacagtgtgtaatgagaaaatcagcacagtcactgggtgtgaaagcagacactggctctcctcgtgcagatcccttaaataagggctatcagaagaagtcattctgggccttccccctgccaaacttaggcagccgggggtggaaagaagttcccactatcaagcctgtttgcactttacattcattgtctcaagacttaaattgtcggcagattacactgcaggctttctacatttgtctagcaggttcattttccctcttagacatctaaatccttccttgtctatccttcacaaaccttcctgggtgtctttcctaacttccccatcagctcagaacaagccctcagatacaagccctcgctaggcctgacacccagttttagttgcccctgccccttcctcccagtatattcaagaatgaatttactttagaaataagtgttctggtctgcacatctgtccctctgctccaagagctgccttgggtctcctgctgataagattgagaataagaagaaaataaaattgagcaactctatttagcatatatttatatggcataaactggcaatttacacatgtagtcctaagggatcggccacatcatatatatatgaaatatgtctttatttccttgattctcttatgagattggtaatggtattgtccccacattctaggcaagaaaactaagatgcagaaagtctaaattattagccatgggccacagtactaggagggactgaatcagttctcctccccaaaggctgagccctttacctcacccccacctcacccccacaagcctcaccatgagatgaagacagtagagcagataagaaaaagacggtcataaagccgtctccactctaaagagagccccatctgggtctacttttttttcttgagggaacgagtggaaatcggaagctccacagagcataggacagggctcattcaattatttcttcccattgccccagcatttgtgacaccggatcaaatgagatacgattcctccagatacagtagctctctgggccttgaaggttgttcttgcatatgttggtggtcaactggagtgaccacagcaaaacaccatagccagggtaatcctaatcatggtccacttaccactttgatcttataggtctgaaggctgggaagaccaggatctcactcctagggtagagcagatagccaccttctctctgtaccttctcgtggccttcccatccccctatgcacacagactattggagtaaaagcttcctctcttcctcatattataatgacaccagtccagtttgatcaggacccctccaatctggcctcatttacccaaattaccctctgaacagcctgtctccaaatgcaatcacactggaggttcatcttgaagttcagaccattacaatctgtgcttcagtgtattgctccaacttgggaagaacttccttnnnnnnnnnnnnnnnnnnnnnnnnnnnnnnnnnnnnnnnnnnnnnnnnnnnnnnnnnnnnnnnnnnnnnnnnnnnnnnnnnnnnnnnnnnnnnnnnnnnnnnnnnnnnnnnnnnnnnnnnnnnnnnnnnnnnnnnnnnnnnnnnnnnnnnnnnnnnnnnnnnnnnnnnnnnnnnnnnnnnnnnnnnnnnccccctcctcttcctcttcttcctccttctcctagtcttcctcctcttcctctttcttctgtagaaggtattcctttccagagcttcagatcctgaccctattcactcatatctcccatccttcagctgtcccttccttcctttcctgtgtcaccattacttccactcaaatcagattgtgggaccaacaccagcatcccagcatgttctcctatgtgtcacttgactgaacaaccatctcttctttaccccacctagcctactcttctccagcgagactgcaagtcccaggcaatagacacaagcatgctggttctttcccttttagcttctgtgaagaagtagtgattggcagcctgtggtgtgttctgatatgtctatagatacacactcatgcacacacatacatattgcagataggtacttaaatgcatgtgtataaaccacatgcatacacaaatagaaagacatatacacctacacatatgcatacagagtgtgaggggattgtaggggaaaaatagaatgtagttgatattatgtgaaagctgaataaaaaaaagagttcagactgaatcttgcctttctactgaataccgactcttctatttttcaagctccttttctacatctggccctgggcaaggcactggcccttgctcttaaatggtccatttagagcgacaaagtacttagagaggttttttaacaggacaatgatctttgcaccaagagtggtagagttatattttttcaccctagaaaggtttcttggaacatattggcacacttttatgataagcatgcacacatatatgcatatacagaagagaggggcaacacaatattgactctgtatttattagtactttcaatatgacttccaaagcaagattaggaaaatggctctatgagcccagcaactccaagagatgctagagactggggcacaggcaggaatagtcacaagccttttcttcactcatccccagggcaacaggtcaaactgggagcttctctttttcccctcagcttaggtcctgctgctgcccactttgaaaaggcagccctgtcctcaagggtgatagtttaatgggaaatgtcccccacaagcctgtatgttggaacacgtggttcaagtttatgaaactatttgaagagatttcgaaccatgagggcaggaagcaaagatgctgaggtagtcaccagaagtgggtcttgaggtagattcagctttgcaccgcttccagtcttattctttctgtttcctgatccatgacgatatgaaaaagtgtgtcacacattctgaccaccacaggctgagcgttccaactggcctgcctttccttctgggatggactgtgactcataagctaagagttagaaataataccttcttccaaacagctctgtcggatacttggtcaaaattgcaaaaaaaaaaaaaaaaaaatatatatatatatatatatatatatatataaaacaaatcttaaaagcatccaacaacagaattgaacctttcaccacggtgtacctttctaaacttcagaaggagccagcacaggtttcttcacagttcatgtcttccaccatccacctgggcaggtccttgaaaagcacaatctcctggagaagtatttacaaatcttgtgtctcatggaaaaggagcctcttcatcagctcagctgctgtggccaaccagaggcctggctattccaatccagttcctcattgggtgggagaaagcaataggaagatcttcctgtagagggagttcttaaactcttgggtgccaaggatatcagtttgtcttatgaaggaccagctgaagctctgtggccctgcctcccacctgttgtaagaaaagcacaggactggtccaccaacgtctggtgcaattaatttcccgtgtcagttcaacactgcaaagaggaggcatccattttgtatgatgttgtgggaagaagtaacaagacacgggtagagagtgttgtattgagtgccaccatggaaaaacaaacaggaggggggtatgaggaaggaaaaaaaaaacagttgagacttcctcattgtaatagtcagggttctctagagtcacagaactatatagggtagtctctatatagtaaaggaatttattgatgacttacagtctgcagtccaactcccaacaatggtcagtagcagctgtgaatggaagtccgaggatctagcagttgctcagtcccacatgacaagcaggcaaaggagagagagagagagagagagagagagagagagagagagacttccttcttccaatgtccttatgtaggtctccagcagaaggtgtagcccagattaaaggtgtgtgccacccacctttaatcccagatggccatgaactcagagatcttcctgtcttaatcttctggaattcatagccactatgcctcaatatctccataccataatccaggtcagaaacttgtatctcccagcctccagattaggatcactggtgagccttccaattctggattgtagttcattccagatataggcaatctgacaaccaggaatagccactacactcatcttctaaaaggtggcatcttaattgtagaatgacaaggagacttccatttgcagggcatctgtccatagtcacatggaaagggggcggcacagcatggctttggagaaagggaagagtccaggattctgagaagcagaggctagagcttactctggtggatccagccagaagcaggattcatctcagaggcttaaggcatagatggcttgccctgggaaatggggaatcactgggggtgctaagacctcatgaaatagggaaacactggagacactagaggaggcagcaagaagaaactctgagcttttaaggtttctttcagagagaaatgcacgtccttgtcctccgtcctttggccttttccacttaagtcaacaaaagtgagattagctgcagaatctaaaggacccataagggccttacaagttgaggggcattaggtttccaaggtaaacagcagcaccttcctggccacagaggagaaacactctttctccttgtaatggaagtctacccatgtctttccttagaaagggcctcttctttgaatttgaagaggtcatattcactatgagggctttgttataagtcagggctgttctagttcactctgttgaaaaagggctccaccagctccctaagcaaaagccaccaacatgggctattcatgttctacctacctccactctgcctgatcaaataccccaactggccgagcagggcaggcattaaagatgcctacaaaattgattagagagtggaaatttacaatgattcagagggagttctgaaaccaggagaaataccagactgagcaatgagagctggcagcttcatttatagttgaactagtggaaagagaaagaagacattaataaaagtaattaaaacaaagattataattagagcacaggaaaggctttctggaacaaagaatgatatttctgaattttaaaaaaatcagtagacaaattgagaaaaaagaatattcactgctgagaatagagttcattttctaagagactgagtttaagaaatatctgaagacaaaaagaaatcgccttcaaatggaaatcatgtgcaaaaagaaaagaaatttgagataaattcaaagaacaactgcattcacacctggcaagccagaagacaggacataagaacacgctgagagctacaagcaaacaatgaaacaataaaaatgttccccaagctgagaaatatttggtgtcttaaagagccagacaatcttagacaggattaattaatgaaaattagccttttgggagaactttggtgagatgcatagatgtcaaagataggcaggatattagttttctgctgccacactaatgactcctgaggtgataatcaacctataagctggagattgtttgggctcataggtttaaaattagtcatctgtaacacctggatgtgttgtgttgggcctgtgacaacactgtggtgggaacatgtggttgaacaacatatgtgaagttaaagaagagaaagagaaatgaccagggcctctacagccccttagaggatactcccagtgacctagagacttcctattgggtcaggcaggcttcttaaagttttcatcacttcccaataacacagtcctgagaaccaagccttttacaaatgccctttgaggcccatttctggtccaaactatgcaggaaatgagtttaattttaatatgaagacagagtcacctaagagacacagcccagagcaccatgcttctggctgtgccctgttcaccccagatttcttaatgcgagccctgggcaatagctggcatctcaagatgacaattaaaaaatgtataggtttaatatagactgctcccagaaaagcccagtggcagctgcagagtaagagacaaggctcagcctgtccacccctctcctcctctgcatctcagagggactaccatcctcagagactgggcccaggatgagtaggtagagagaccaggatatcagcatttggtcttcattattctgcccaaatgccctacttaggaaattatcaagcctctcaagagatatgtcccttaagtatctaaacacagtctcagtggcagctcaatgactattcaataaaacttgagtattctacttcaatttatgttttctttttccttgccctcttctgcccccaaacagccaagaattctagccacacagcatcaagaaattcagatctgaaaacaacaacaacaacaaaaccctcagaattgagagtcaggtccttaatatcaagataactcttttaatcaaacccaggaatgactgttctggcctctctccaagtcatgtctctgtgcagcttccaggagaagcagcaagccagttataacatgcactaggcagggaaaggaaagcacccagagtgggagcatgctgggagcagcatcttctaacttgcacctctgcttgagtcatcttgttctctttgacgcagacgatggctttgcagagtagagttgctgattcctctaccgctaacttcttctgtgtccacacagtccacagtaggatgggatggtgactaagttgaaaatgcccaccactggtacctgatttgaaatcagcctttatagcatgctgcttgggggctgtgaaacaaagcctgggacactgaccttgttctagattcccaggagtgtattgttaccacatagggttctcaggttggtctttcctatcccatctcctacatctgagaatgttgcacagtctaccagaaaggagcctccaagttcaaaccacggaaggtcaggtatctctttttagggctgccactattcagtccaaagaaatgcaaggccatctgccatctgacaattgaagcctgtgagctctgctttgagttaatcaacttggaggtaactgaagacgggctctggggcctgtcctcacatccaaaggagctcgattcatactcagggaaaataaagaccctggcatccaaagcaattcactgagctggtgacataatcactagagaaaactggtgtccctgagtgcgggacgaacaagcatcctttgtaggacaaattgtcaaattgtatcaaggcgggagttcttttcattttctttttttttaatgcagatcttttataaagccaacccctgtttgacctgactggtgattctcattatcagtccaaataaaatgacagcaaagtggcctgaatcatcatcatcttcttcttcttcttcttcttcttcttcttcttcttcttcttcttcttcttcttcttcttcttcttcttcttctttctttctttctttttttaaactgtacttctctttgtagaaccattaaaagtaccactttggggatttaggtgcagttttttttctctcttgtctacatgacaagattattctcctttgtggtacttgtgtcctgtctgtgggctttagcaactaaactttcaataatgttccagagaagggggtctgagggactgaccttctgatagagaagcacagagcatttgatctagaaggtaccacggggctcagaaaagacccaaatacctgaacgccatgttccaagtaatggcaacgaggccatttcttaaagaacaggctgccattgtatgtggttttcactttaaagcagcagctgctttctcacagctccagacatgaatgaacatactttgatcaaacttccactacctctgaaccctttctttttcccaagaagttcccacccacttccgtgtctttttcctgtgtgtgtgtgtgtgtgtgtgtgtgtgtgtgtgtgtgtgtgtgtgtttgtgtgtgtgtgtttgtccatcccactgtagttaattagggtcaccttcatgaacatgtgtggggaaggggtggggtttgtatttacttgagtaaggccttcttagcagtatctatatcactgaatactacccagcagccattaactgctcacagcgcctcaaggaggaatgggggccccacgaccccctcccccatccatgatgaaacactgatgagtctagtcttggacaggtcttctgtgagggatcccagatggggtgagttcatgagtgcagtgactgtcgtgtccaaaaacagcccttcatacccctcctccccagtgccctgcctcccatttcttcctgcctcttccacagtggtctctgatctttggagggagatgtctggcttaaagctgagtgcccggtggtcacttatccttagcattttgaccaattacaaacctttacactaactgctgcccactgagagcagaagcatctctgaccaatgttgagagcagtgccaatctatggataacacgtatttaaaaggtagtttgatatcatgtccatttagcaaaatattagtaggcttctctagaggagtggttctcaacctccctaatgttgcaaccatttaatatagttcctcatatttttctcataaaattatttcactgctacttcatatctataatttttcgattgttacgaatcaaaatgtaaatatctgacatgtaggatatttgatgtgcaacccccgaatgtgtcgcgacccacgggttgagaaccactgctctagcgcctccgagcacccagccaggaacttttccctagatttatttaaccagtataaatcccctcctctagagtgaaactaacaattcaatccaaaagaagctgaccacctcaacagcagtcaccactatctcaccaatggccgaattttgcctggcaggttggtcatatggctccctggtgtttatagctgggtaagactgttgatagctttttctctcccagcagcctgaataccactagaaaagctagccagctgtaaaagaacttccaactcaattcaaactttatttctctacatcccaaacccaagtatgtgatgtcttcttagatcagggtcttcacagctagtccttttgaacaaccaagaacaattacagtagcctatattatctggggagcccatatggcgccctagccaatcactcatatcctacacctggcactgggatttttgtttgataacctacggcttctgagagcagtgttaaccacacattcaaggtacccatttcagattctttttcaattctatttttaattagcttctatgatagcaagcttccatatgggcgcttcgtacttccatttgggttaaacatacgaacatgccttcttcccctcatcctctactcctgtcctcactaaaccttacacgtctgtgggtcacagtattgctattgtcaccagtattgttcctgaacaggactcacagacagacttagccatatgttgaccttctcattacacactactactctgccttaatatagaaactgggtctttaacttcagttcccagataatccaaacttaggccagaggcatacccaggacctaaaatacagattctagagacctgccaacaactactactaaagttcctctcctttctatgcacagttcatatgttggggctttgatcctgatgtgtttgtagggagggggcctatgagcagggaatgggggttaaatggggagataaggacggggttctgatatgataggattaatatcctcataagagatatcttagaactctgagtttctggaaataagtatgaaggaaagagcatgtaagtgcacacacacacacacacacacacacacacacacacacacacacatacacggcagctccaggaactgagttggccatcttcttcatcttggactacctagaccctagaattctgatagcagcattctgttacttaagccatcttatatgctatggctttttgttctgacagccaattttgactaatatatcttctgatccagattatttatgcttatgagaccctctggggatgagttacatgtgaaagttcaagaagtcttctgcttccgttgaccttgaccttaaatcagcaagcttcttgcttgttctgaccaccatttttcaatgggaaaaaaacaaacttaagcagtatccacaatgtagctttgcactctctggctataaaggccatcctcaggctcagtttaccattctctgagttagaacccatgggtgtagttaagagtgaagaggtagcaagatgtggtagtgcacaactttaatcctagcactttggaggcagagacaggtggatttctgtgagttcttggccagcctggtctacagagtgagttccaggacagccagggctatgtagagagaccctgtccaagaacaaacagacaaacaaaaaaatcgaagagctgcttttaacattccctgtgcatctggaagactagaagttgcgcttgctttacagggaaggcctacaactgtgtcaccagtgattatatggttcaaaagtgacctaaatgtatggttctttgaatagtactatatgctgtcttccccacggcacacactggtgtctgatctgtctactcgagtctatcacttatggggatttgtgtggagcaacacttatgaaagcttttcaaaacaccttagaattttccaacatctagaagctgatagctatgctgtgtgtgtttgtgacccctctcaaactcacattgagacttaattccaatgcaacaatatggaatgatggggcttttggaaggtgacgaaagtcacaaaagcttcaaccttctgaatggaattgtcgtttaattatgaaaaggctttggatagtaaattgatccttctgttcttctatcacatgaagtcacaacatctgtatcctctgaaggatgtgctgcatccctcaaaggaggttccttctagcatcagagagcagccctctcccaacagcttgctaccaccttgaccaagcacagcaaaactcaagacctgtgtaaaataagtctgcttctaataaatcatttaagttgtggaattttgttatagaaacacatactatgactgtgataatgataaatcaaagcttctctctccctctttctttggtatcaataatagttggtaagaaagtaagtatgaccagactatgagtaataggcgaatgtgtaataatctccaaaagataattacaagtagcagtggacatcggacagaggatggccagacaagaaatgctttattagatggcctggtgccagaaaagtgcaatgctcattctagagtgggagaaatgggttctaccctcacggagggaagtccgagcaagctcagtcggttctacctagctgggaatagtgagtgggaatcttcagtgagcattctgatccccatagcttgggttttagtttaaactccagttggaacatttcatcttagaattcccgaggctggacatttttttcttatgctactgtctgacttttacatattgtccaatcctccaagagaggtacagagaggccttgcgcccactggacagttttctgtgttttccctgactgttataaaatatgacttactgaaatccggaaggtagagctgagtgagcatagccctttctctcctcatctataaagtccaagggaacgtgaatgtcccctgaggtagccgtaccttctttgtcatcacagctctgtgtttttgtgtggcacagagagcagaatagaattccctactgtggcattcagttttctttaggtaatgaagttgtcagcagagaaaatccaggaatccatcagatctttgtgtctttcaaaaaagcctatgttttcaacaaatatctgaggcacaaaacatcccaaataagagtgcttgtctgatctctgtcagtttgtgctcattcttcagaaagtccatcagccgggcttgagggcatatgcctgtaatcccagcactagcaaggccagattccgatggtcacttagagttcaaggcttgcttggtgcaaaatagtgaattccagtttagcccaggccagagtgagaccctctctcaaaactaaacatacacacaaacatacacacacacacacacacacacacacacatgcacaaaacacatgtgggggctcacacacacacaaatgtaaagcagagattggatctgaccatgttatccatgtatcattactgtccatatttttccactaagatttgtttcgcttcctcattgtctgcctcacatgtccacacacttttgcacaggactgcttgtcctctgacccgaagccaggtctacacttgtccactagccacagtccagtgattccctcccttgctgctgaagggcaaagggagaagcaaactcagtgagtacctgtagctttctggtcaccgtgtgttgctgaagctgcatcagggtgtatgagactgtctctgaagaccaggctctgtcactctatagacacagaaagtaggattcctgaaaccagcagcttctgtccactaccacacaattaaaaaacactgggccacaactcaaatggaagtgatcctggttccaaaaccacccaaggcattctgcacgtgtagtcagtctgtctatgagtaacatgctgaactcaagggtgtttgcagcacctttgtctacagggcagcacactaaatccaagcatgtcctcggctgtgctatgagttcaagttctacgttaacttttaactttagtgtaatgaaaaagtcaccatttagttccagtgcatctttatgtttttattttaagaactttagtgaataattttcagaggtgaaaatcaattttcttcaaactttaaatgagaagggaaacatatcaactgtaatttgtattctgttttgatgatagctagatgccctgtagatctgaaatggggaatatcccagagatcaatcaacttattattactatcgtgtatgaacctgagatgctttcatttttcatatacttattctagatttcaaatgcaccattaagaaattttagccgttccttacttttgagtattctttacatacttgtatcatcgggatgagaaatttaaataacatttaaggaattttagataactcttaactttgttgaagaaaaaaagaataggctatcttattagttctagagtacaaaacatttccaattttagatgtataattaacaattattgagtctaattcaacatttatccacttacaaatcacatcaaatgatttgaactaaaaatcagcataaaaatgaaaggtgggtgtggtcttttgtaagtatggaatggcctagattcttgcttcatagtatttattatataattagttcttcctgaggaatgactaattggacaaaaaggccacatttcagttttgctttagaattatattgtgcactcttggactcttgtgtttaaaatgcacctgcagaagaatgatctaaaataatgtgactcctgcaaaatcatttggaccgccattctcacagtggagatgccggctgcattttcacctctgttgtcttattttttcactaataatactgaatgtgactttgtaaattgtattccttttgccttaataaataaggaatgaagtattctgaattttcaattgtgttcaaaggaagctaaacacggtcagaaaagagtatttcccatctccttttgtaccttctgacaggtgataaaatactttgggcaacataaaaataaagccagagaatggtaaaatagagacagctcacttcactgctgtattttccctttgtggttttgtaataatttggtcttttataaaattgctaagagaataatgaaaataatggataataatgaagtaatgcctaggatgatgacaaatttttcaagatgtaagaaaacccagatcactccaattttagtgtatatcttacatttcaaaagagttcaggagacctatgtggtaattataaagcaaaaacagcactgggctttaatagctaaaatttctttttgtagtctggaagattaataggaagaatttttaaaagccatggaatattaataattacaaatagaactactcaaaagaaatggaactaaaattaactacagtgggcagaggaataagaattgaagtatatggtgaatacatcggttcataactgcatagaagatattatttaacataaaactaagctgatgagacatcaactcaaccaatattgcaacaatcctccgtgaggagcttggtagaccctctctaagcgaggaaggcattgagctggggaaaataatcacacgatggtttcatctctagaggtgatctgatgatgaaatgatagtggcatgtttcactgaacagcatcaaacagctgttttatatgctttatgaagacatttcactcaaatgtaccatggaattaactatattccttcttcgtgccctcccacctgccccttcttccagtccacatccctcccctagatatttgcacatggtccatatgtgtgctatgtgtgcatgtgcatctatggaaacccaagcattcaaaaaggggagaaaatgtgcaatgtttgtctttctgaatctttcatacttggttcctataatctccaattgcatctgttttccaagaaacaacaaaatttcattcttcttcatgaaaaaagcatcattttgtatttatatcgcattgcctttctgtgttggcaggcactctggctgattctatagctcagctattgtgaatagcacaaaaaaaaaaaaaaaacccaaacaaaaacaaaaaacaacccctccaaaaaaaaaacaaaaaacaaaacaaaacaaaaaaccatgcagataagtaattgtggtatgtacttccttaaagattgtttaccagaaagtggtatagctgggtcatgtgatggttctagttttcatttttagagaaacccccattgttttccaaaatggctggactacattacattcccaccccacttccacattctcaccagcatttgtcttcgtttcttttactaaaattttaactttttgttttattaattattattaaggtgtgtatatgtgtaagcacatacacatgcatgtgctcaagtgtgtttagcctgtgaaggagtgtcagcgtccagccaacaagagttgggggtcatcaaggactagagatacctggtaggctaataagaaaacacacaattgagatacagtgctgacaggctggtgcattggcatgggaggccttggactcgggagtcagggtgctcacctagacctgactcagccccagtcttatattgaactcataaaaaaattaggttacaaaatccagggggggtgtggtaggtaaaagcttctctattttcctgtgcaaacattttcttgtgacccagagtagtacagatttagaacagacaaaaggaaactatacaaccttagacataaaatttttacagcaagcacaactttttgtatctcctgaccaccagtctccagtgagacaatatggtttcataaaagagcaagcatactgctgacccttcagtctttataatttttggaccccatctgcttgtctacaaaaacatcctcacccaaccggtatggagaattcctagggggctgacaccatcgcccctaaacccaagaaacccattgctaactttctaggagatatttgtatattatttcatcctcaattctgtataataaaaataggatccttttattatacagaattgagacgaagactgggggaagagctacagaattactcatctctgcctgtggctctaagttactttcatttctacctagagcgagtgactgtaatatagatttctcttgaattcatgaacatccttcacttgaatattattggcaacatctaatttctgggtatcaagcggcctcctactagatctttccaggtcactaaataccagtttaatcaaggaaggcaggaagaaagaaaaggaatcgtaaatagatgaagaaaatactaagtactaagaataattgcagaaatgacatcactcagtgtttgcatcaaaggagcaggacttggggcccctcagtactcacactggggcccacaagaggccattgcctcaagctctgaaacacggtacccccagcaggtttttcctccttgtcatctggggtcccaggtctctccagcttaatgtggggtgtctccaacaaaggagtataggcgtgactttgccaatgtacttatgtggggagtccattccccccttccaccagaggtgactaatcttggttgccactttcatacccttgggaagatgaagccttagttgaggaatgccttgatcagattggcccatggacatgtctgtgaggcactttccatcccaatttggtttgagtcagtgtactacagcaaaggagagcaaaccaggacagtcactaggccatttctccactgctgtttttatttttattttgtctgtttgtttaaattatagccattcttactggcatgagatggaatctcagtgttgtttaatttgtgttttgctgatgcccaggaatactaagcttttgttttcccgtttgtttactgaccatatgcacttcatctggtttggagagccacccactcattagtctctctattgactgagttctttggcctcgtttgatatttagcttctgtgtgtgttctttatgtattctaaatgttcatcctctgttggctctgcagctagcaaggatgtactttcattctgcagactgtctctcccctcacttccttcctttgctgtataggaggaaggagccttttagtttcatgtaactccacttgggatgacttcttgggctattgaagtcctttgcagaaagtccttgcttatgcctatgtaaatatgagtatctcccacagttctccagtttgcagtctttgtccatttcaactttcttttttatttttcagtacaggtccaagtatgggaatccagcttcattcttccaactagtttcttcaacaccatttgtttaagaaggctgtgttttctccactgtttgttttttggaaactttattaagaatcatgtgtgttgccaggcgtggtgatgcacacctttaatcccagcacttggcaggcagaggcaggcagatttctgagttcaaggccagcctggtctacaaagtgagttgcaggacaggccggtctacacagaaaaaccctgtctcgaaaaaccaaaaaaaaagagagagagagagagagaatcatgtgtctgtgagtttgactctgagtcctctgtcctatgccactgactagcgtgtctgtccttgtgttaggaccacgctgcttctattactgtggctctgtgctacagcatgaacctggcattgggatgactccaacacagttccttttgttcaggattgctctatgcagcgtcctttgtgcttccacatacgttttagaattgtttccctaattctgtgaagaatgtcacagtaatttcgataggaatcctgttgaatctgtagattgctttagataatacagccagtttcctcctactgtctctgccaatccatgagtatttgaggtttgcctattgtttaaaaacaacaaaagtacatgtgcttttgcagaggtcagaggtcaattctgtggcccttgcttcctttccttcacccttatgtgagatctggttctgggaatagggcttggctgctcatgcccaagcagaaagcaccttttctctctgagacatctcttcagccctctgatgtccttctcaatttctttcaccagtgttttgaaagttttgctgtggaagtctctcgcttccttggttagattcgttcctaagtgttttgtttattttaagcagggtcgtttctctgattttttttcttggcatgtttgtttttgttagacaggaaagctactgattttgtgtattgattttgcatcctgctactttgctgaaaggggtcctcgcttctgacagttttgtggttgcgtcgttagtgtctcctatatacaggatcatctctattaactaaggctgggatgatttgacttttccatcctacatttatccctgctatttccttgtcttgtctcgctgctctagctaaaacttcagggaccgtgttgagtaagagtggaaaaacatcaatgtcttcatctcacttctgaattcagaggaaatgcttcctccgttgtctaatttaatatcttggtgctagtgtgttggtaggcttcactatgataaggtatgttctgcttagtttcttctaaaaagaaatttagattattcattttatttgaatgagcctgcattgtacgtgtatatgtcacatgggtgcctggtgcctggaaagggtgatcagaagacggtgttagatgccctggagctaagttatgaatggctgtgagctgccatgtggcactgacaactcaatccaggtcttctgtaagagcaacaagtactcttcaccactgaacagaatctccaggcccccttcctagtttcttcaggacttctgtcatgaagggatgttggacttcaccaaagaaaaccactttattacaactattaagatgaccatgtaatttctgtccttgtatttatggggcacatcatacttactcatctgcatatgtagaagcattcttgtacccctgaaagtaagccaagttaataatggtgaacaaattttgcatacttttaaattttttattttatgcacatggatgcttgcatgcataggcttgtggtaccacttgtgtgcctcactcgactggggccagatgagagtgtcagatccccttggactagagttacagacaattgcaagcaaacctgttgatgctaagcattgaatgtgtatcctctggaagagcagtcagtgttcttagccgttgagccgtccttgcacaccccttttacaagtattgataaagacagttgccaaatgtattatttagaatgtgactacgatcatcgtgagcttggcttgcaattttcatctttttaactgtttatctagtttcaagtcaagttaataatggctttgtaaaatgaggttggtaacacttcttccctttccaagctatggaatcgtttgaggggccatggagttaatgtttatttaacggactggtagaactcagcagtgaatctatctggttgtagacagttttttttggtttttgttttttaggtgggagacttttccttatgactttgattgcttgctgtagtccttttaagttgtttctatcctctaggtttaagtttggtaagtcatgtgtgtctggaaatttacccagttctagatttgtcactgtgttggaagataggttttcaatgtatacttgaatgatctgaaggtcactggtctcagttacaatgtctccaccttcatttctaacttattaatgtgactccactccctctccctcactctcactctccctctccctctaccatttccctcctcactcactgatttttcctacattttagtcaggtttctgtttcttaagcgtgcttaggctgttcctcctagtctttgcacaagccatgccttttgtctagaatgttctctcagttcctgaggagactctgccttttcgcctcactatcagaaaacccttctctcactatctcctttcacatggcccccagctcctcctttcctgttacatnnnnnnnnnnnnnnnnnnnnggtttttgttttttagtgggaacttttccttatgactttgattgcttgctgtagtccttttaagttgtttctatcctctaggtttaagtttggtaagtcatgtgtgtctggaaatttacccagttctagatttgtcactgtgttggaagataggttttcaatgtatacttgaatgatctgaaggtcactggtctcagttacaatgtctccaccttcatttctaacttattaatgtgactccactccctctccctcactctcactctccctctccctctcccctctctcctctccctctcacctctccctctcccctctcccctctcccctctccctctctgtgtctctctctctgtatctctccctgcccctcactattttggttaaattttaccaatcttggttctctcttcaaatatccaacctttcatctcattgatttttatatttttgtattgtcctttcatttccatatcatgaatatatatacctgatctttattgtctcttttgatctacttaattgaggtttggcagtaacagtggtgccataaaccccagatctttagccccactgctgcctcaccctgtcctgctccaggatcctaactgtgcttgctattggccaaaccattctaagatcaaaggtcaaaagataagagaactcagttgatgctgtccacattggtcaggagtggaacctaaggaggaagaatgagtacaaaggagatgatgagaagtgagaatggtttctaaggatgtacaagaagatgtgagaatatgcaagtgagggggtgaattcacccaagatcatggcagagcacccttctgtagggtgtgcagatgcccactgggcacccatatagccccatgggtatctcattccaagtctagcttaattaccaagtgacttgaaagctgtctcaatatgattaagaaacaggatgaactactttgatctataagcatgcactgaatagtttgataaaaatttcaaagtttgtcttttgacttttctcctcaatgacctctaaatatactaaccatacataaaataaacagagctagtatattgacaagcaaacattgccgacaaaccctgggttttgaatattttataagtaaatggcacagatcccaaactcacattcccacatcttaacatttatgatgtagaggtgtgtcatacaattaatggtgtaccaaatataatcagcagtaattttttttcttggaagaacataaagtaatagcataccttgtaattgatgttatctttggtttagtgaaaaccagcaaaattactttcaagatgcactagcaaatttttcatgtttcccaaaatagccagcaagcaaccatggtcatgatccatttcccaccaatctcccatggatggataagtagaggaagaaagagctgatctgggctcacgtggctatttaccttcaggattcacatagcatgtcagttacaacatcacttcacatgcaccagctgcttaagctgtcgtcatggtcctctcaagtgatgggctgggaaagcctgaacggagccttagccatgagcatccacttaactctcatttgttcattgcctgccaaattgatgctgatcctgctcccatgctgtgcatcttctgtgatcacggtgataatgtgagaacctgttttgcagcaagtctccctattctcccccatcttctctcatttactctaatgtgacttcctaataacattttcatcagttcttgattcacgttccttattttaaaccattgattctaataccgaagtgcattcttcaatgttattctagcgcggagcacgcattcctcagtgtttggagtctgaatattcaatttcatgtctgcaaggtcaagccggtgagcatgtacactgacatcacgctgaacagcagttggtttgaaccagagaaaaatattattttgttactaatttatggttttctgttgatttattttaatcctgcccagcaagacatgaaaattattttcttctcttctgatgagtcacggcagtagcagcttcctaacttacccattatctcttcctgtcaatttcctttgtaaattaagatatttattcactcttagcaaaagtaaggttgtgtattaaaactacttgtgacaactcttctggggctaaggaaaaagctttttcatttaaagagtaaacaaatatgtatgatgtatatgtgtatatatatctcataaatctgagtgttaattattcataacaccatgtggtcttataaagtgttaaccaactcaaaggaaaataagactacagtttttcctcactaagattatggatcacaatctacttctaattatgggcttaaataccagttttggcagccactattcatcccaaagccattttaatttcaatttcagtgatttattagtgttggtgaaacaatcttctttggccattttttgttttaggtccacatggttcacaatgctgtagaatctgcaggatgctggtgatggatggccagcagctgcagacatcctggcacaaaacaccatagagcccagtttgcaagtgctctgtaatggtgatcataaagagatgacttataaacccttccttttgttgttcttaataactaaaatagatggtgtcacgataacttcagattttttttctcagattcatatactttatgtggggtatggtattgcccagttgagactttgcatgttagtgcgagctgtctcgaggttgtgtctcgggcttccttttgaatcctttgcctctcttactccagtgctctgtaggaacatcgcccaataactgtggtgaccttgagatttcgttctcacatccttctgacgcaatcactcaatcacttgtactttgtttgaatacaagccccaaaattacctcaggcaagccttaacctttttaagcctaatttccaaagagacacaagaaaaccttatgctgtgttaaggaagattagacattcgcactgacagagggttgggatttgaagaaactactttctcaaaaccatcagtttcactaatgggaaactgatgtggggcagagggtcccaggcaaagtactagaattttaccttctgtatgggatgatgtaaactttcacgtgtgtatgttttacttatacaaccatcagccttgaaagcattgtcacttacctctaaggattctttctaggacatctcaagacaaaagaatctccttattgtcatcggttttacctgcatgaacttttcttaggctatgcttagaggacctttaatactctctaagtacttgttttacttatgtgacccctttgacaaagtccactggatttctgcaggtgattttcatgaagatacagtctttgcactgcaagagcatgtagccgttctagctctctcccaggctttcatggcagctgggaaacacccaagatgagatgctcttagctttccctccagatccacattgtgccccaaacatggtattgctggagagccaggattagaccacacttctctttgttgttctctatagctaggagtggtatgaagtggaagaaagatggcctttcaaattgtcttccattcctatctgtttgactgggaggcagccacttggttttcaggcattaggatttccactttttccccaaaacacccaaatagttctaggatttattttcaaccactttcagtttcctaccgactcgtgaagcatgctcctatgactattgtatattcgggaataaaatgtctttttcccgtagaacacattcaacctgacttggagaagacaccccacctggtaacacactagaatttaaacaagctaatccacttgaaagggtggttgttctggggatgtgcatttggctctgataaatccctaattgctcaggcagggcacccacagagaagcctgaggaaagaaaggccagctgccttgctaagcttttacatctgtcttcccaccgaagggtgtcagtgcacttgtggcttaggtcaaaataaattagtctgcataatcattcttaatccggtttctaactgatcttatctgtagtttgaaattagcttacctcttggcagaactaaacactctgaacttaaaggaagttttgctaaacatgaagcacaggatgttatttgtgtctatgacgtgcacttgtttattgaagtttactcttcaaagactataatatttttagcatctcatacatctctcaacggtattcttaagttggcagatgggtttaaacccttgccacatggctcagctctgaagacagaacacgtcttcttttcccagtcattatacccccaaattctattgctgaatcaactggaatcccaagccacaaagaaaatctgctttaggaccaggtgagaagtggtgagaatcaactgtaaggtcagagatttccaaacagaaaagcaagcatacaaagacccgtaccaaccggcataagcacaactctatcttccaggcactttctaggtgacaggttttggctgggctccctcgtaggccatatccgcaaagccatctgggacagttgccattcaaatctcccattgtgctgaggaagaagctgaacagcttcttgtgtggagtcacacaaataagtgttaataagtcttcaggattatgttggatatgacaaatgcctcttgataaccatcgtggaccagctccagtacgttctatcatcagagaataacaaaccagaccttcttagtcttctcagcttgacagtgctttacgtaaaccacctcagttccataatctctgggaacaaaaacaaacaaacaaacaaaccagatctgggctcaggacatcaaggcagaaatatcacaatagtcccttgatccagccatgttcagtttgataacaagacaagccccaatgtttgggaagcataacctagaacagaggcgcccactagataggtccatgccaagaaggcaattctgttctaagcagcatcctcaggcttgtatggcctgagggtgaggaccacaatcattgcacatccttcaggtcacatgtggaacctcccttgcgtcttcaacttcatttgcatatcttctgatgctccacattcagcgtcttcaacttcatttgcatatcttctgatgctccacattcagtactgagtccacatgtgtcctcttggagtagaaatgtcatgtcctgtgcccagtgactgcccaagagcctcactgtagcaacattgccctatcatccttggctttataggggaaaggaattgtggctttccatgaatccaagcccacactatttggatactataatgtggtccctgacctgtgtcatgcatatcagtcccggccaaaatttttcatattcactgcatatctttccagaaaatattcatttatctacaagactgcctaatgatcaatcctctgagcctctttcataatggcttctctgtagtccttaagtgagatgtccgaactgatgtcaaatgctgaacttgccacaccatgaaaatttctaatcttctggccttatgtttgaagaagccattagctatcctatttcttatgttttccctgttggtctgaacttctctttcaggcaagcaaagagcagagaccggaaggtggagagctagcgtctcctgagatgataatgtggggagtggacactgttccactggagcagacatgctctgaccttatgagcctgagcttcagtctcacctgtacaatatgatgtcactttggggagactctctctgatgcttgccctctttaatatggctgggagggaagcatgcctttcaggtgccctaagcagaaattcagagacatctccaaatgtatctgtcatatgtcccttcagtagctacatatctgagatgtttcccctcttcacctgtgtcttaaattatatcctaatgaattcttggttaaacaactgaagctgttcagtaaatgaccctcctttccaggagtctcgcaaacacaacacataacctcagtgatctttctaacatgttttcttaaacacagcattcaatcaagagtccccataattcagcctccagacactgtagtgtcttaaagcagccctgcctgcagtctgactgttcagcacattccaaccttcttaatgctgctgtggcttgctcaacctcctcttcttttgccacaaaccccagtgtcacttttcagtatccagctcttctaagaagcagacttagttcccacccagcctcccactgtcagcctctttattggtacattcccactgttagcctctttattggtacattcccactgtcagcctctttattggtatgttcttattgtccatgtgtgatgctcctcacaccacactgtactgtttctcctctctggagcttctctttcccaatagatcttgggccagtgatggcaggactcctattattgacctttgtatcttagcatctgtcatttacagaaaatccatccttggtcttaacctagattgtatttatcacttgatttaaaccacatcaatttctccctaataagaagagcataactaatactctgtgactgtttcttgggtggcagccagtgtttgtgcaccttatgcatttgcttgtttcttccttgttgaaccacttagttttcattgttaacttgatacaagtaagagccaaatagaaagaaggagccccagttgaggaaaatttggtcagttgatgaaattggcttgtggccatgtgttttgggacttgtcttgattatgtgggaagagttggcccactctgggaagtgccaacccggggaaggaggtcctgtgttgtataaaaaggaagactgagcaagccatggagaccaagccagtacgcagtgttcctctaggttcctgctctgagttccaactctggctttcctcagtaagggattaacctggaagtgtaactcaactaaaccctttcctccccaaattgcttttagccatagtgcttaccaaagcagcagaaaacaaccgaaaatatgtgtaatggcccataaaatggatcctgcttactgccatttacagttgagaaaattaaggtttaaagaggctacaacaagtgtttgagggaccagggagcgtgcagatgaagacactggtcacacaggcctggtggcctgagtctgactctaggaacccatgttaagttggaaatcgaggacaattccacaattgtcctgtgacctctacatgcatgttgtggcacattcatcaccaccttaacatgtacacaaacacatgtacaccatactaataaataaaactttccacattgcacatgcaatcaatgagagctatcagatttgaaaccccatggcccagactctttactacagagtcatactgaaaataaaactgaaatgtatgtatatatgtgtgtgtatgcacacatatagatagatagatgatagatagatagatagagatatataattgcttctgctacttaactttgatttactttcttgtctcccaaagtcaagttaaaatattttaattattaaattggactaattttaatcatccatagactccaatgatatttaatcaatggatgtggggagcggtgaggtacagtgccaaactgtagtccccatttagtaccctcaagcccacataagagtacccaggcattagccgatgcctctcacaccgctccattgtcaagctatatttatgtgttcaatatccagtcacccttctcttactgagactcctttttaatactgtaccatcaactgcaggtctgagagggaatggtttctcctccttcacttcgcagcccatcagtagtgggctcaaaagaatcaaaagagttcctaagacgactggaattcacataatgaaactaagtcctagtaatatttcaccgccccaaaggttctaagcagtaagaattggaaaggaatttttggctttaatgggaaaagtgaaccttttgttagtcacttcgcttgctttcctgctaagaagaaaaaaaaaaaaaaaccaacgttgaagcattcatttggctatggttgggtatgagagcatccagagattttaatatgtctaataaaatccaccaaagaatggaggcgcaccgggaaagggggagcattatggtccacaagagatgcatttactctgaaagtggagctagatgctcgctgtaaatgaggagcccagagtgagatgttcgagggcacagctgggaatatgtgcggagctcactttcatttccatttgaataccacagaggaagcgctccgctcacttagaattaaaaagtacatcaagaatgcaaaatgtcatataaaattttaaccatactttttagctgcttttgagtcccttcactggcttttcggcgctccgctttcagataacgtcttggccttctgtgatgtgtgcacatctgctcttggcctcctctctctgcagctacctgtgcatcagctctacctgcctcctgcacatcttcttactgtgaagtcttttgtttctcttctgcgtgtttccatcttactttcctgttttcttcctgatcagctttccccattcttccttttgcttgttagctatcttcctttgctttcactctattaataaatcatatatatatatatatagaaccccaactgagaaaagcagacagaaatgataccctttagtccagttgtggctcaatgtggctgttgatatagtttctgggatgccttagtgcaggacctaagggtttgtccagagacacaggtaagtaacaggcatggtaagtctggaccctggtgcttctgacaggaaatgctgataataataaaaattaatgtcgacatcatgtgataacatagggtttctctggggagccttggctgacctggaaattactctgtaaaccaggctacctttggatctgcctgcctctacctccagagtgctgtgattaaaggtgtgcagcgccaccacccagctgcagctaataacatttagagccttctatgcactgggttctaaactaaacactttttataatcattccattaagtcccattgaattattactccctttgtactaataaggaaactggatagagacactgtgcatggtccagaccatgaataatgaaaaggtagacctgtttcagagcccaggcagtatggcttcagatcacccctcttcacagctgggttttactgatacatcaaaagctgagagtggccctggagtcgatgggctccagtaagggctgggaaacaatacagagctctagtttgtcctgtagtgtcacctcagtgtagccacacaggtgaacagagggtaagccaaagtcaccacagacaaaacaaggtaaactcagatgtacacagaaactataccaggagaagtagttttcagagagggtgaaactttcaggaaggaatctaagacctataaaggcaggggagccatagggacagaaggaaagagaagagcaaagtttgaaagcttgagaaagaaggcaggacatcacagacacccagaggcagccagtgtggcccaaacaacaaacctggagattggagggaataaggcgggtcatgagaaaggcatgagtggagcgagacatagttatagcccagagccagtctcagctaccggcataggcatgaagacaatggatagacaggaggcattaggtcagattggcagaagggaaaccttgacacagtgggagaagtgtcagagaatcttgagtatcgcttacacaggttggacttcatcccataaaccccttgatttcacttggggatctgcgatgtacacatgtgggtgtacacacactggggtgacatcgtgtcttgtttctacaatcccttccaaacccatagggtgtaagtgatctttaatgcataaaagtgagtgggtgcaaggttatcctgaaaatatgtttctttcacattctaacttgcttcctgaaacagagcagtgagtgagacagatgcaggcagaatgttttcatagccctggggatgctgtgtgagtgtgccatgcatgccaatatccattattacatacaacaatcaagaaaaagacagaaaactacccttagagagatcaggggtttaagctgaggttgtacgaggcggggtaagaagaaccgagtgattctgtgaactgttctccggagtttgcaatttgttattatataataaacctaaaaataaaaacatgtccagcttaattatcaagctattagtcccactaaataaaaagtggtgttgcggtgggtgacgtgacacagagaaaatatgctaacacattatggttgcagccaggaaatcaagagagtctaattggcagatttaaaaaataataatagtagttaggagacatttaatgtggccataaagaggttcacacacctctcagaaatcattatgaagtggcaagcattaggttttatgggaccaagggcgatactgagccctctagttaagaagagaacaccccagcaccctgtgtttaaggaggcaagaagccaagcaatatattttggcaagatttttttttaaatcgagaattgctgaagtctcaaatggatggtgtttcttatgctattccctcatggcaattaactaccgcactttttccctaaattttattttcattaaaccttccacacatgtggggccatttctatttgctcacccagtgctcactcaggctgccccgaaggcaagtggctctcaagtgctgcctcctgtctttctccaagccatttcagatacctactctgctgtcagcaaagaccatcagcagtgtggccggaaacagacatcctccagccggaaatggtctgaggtggggcggggcagggcagtgtcttgttcccacccaagcctctgagatgctttgcacacaggaagccaaagcccataatcagctgacatcctttctcactttcagcaggctgcctgaataattgggactagaagtgtctgctttgattgctgtggggagaaatgcttaaatgttggtgaaaaccctcagtcctgcctcttttatagctgggtttcttaggaaagcccatctctgttctctcccatgcttcaagcagaacactagaaaaaggccccaaagtggtacagcaattgatgcttgggcatctccgcatctccattcaatctgcagcccaccagggtgcccagcagccctgagacaggttggacctttgcttgttgaaatggagcctcaaaggaattttctgcatgagcagaaagagacactctaccaatcgtcctagtgccaggaaaacgggacagcgtggaccggaccgccacacatggaacccctgtggccacacacactctgtggccactgtctggacttggtgggggcggggagagtgtcttaccttaattcccttctgctctctcacctcttcacccactccaatcccttctgtcctccctttcctctccttttctccctcttacgcttcttcttagcacatcccctgcgccccccctccacgcacacatacatacataccacgcatgtacccttttctccttcttaagtgaaataattgaaaaacttttccccactcgactgagaagaatcaaatgctagtccactcgaagccctcaccatcagcctgaatgccacagatggagacaataaagagctgctccttttgggtgttcaagctggggggctacctgtgcgcagagcatcctgatttgcaggactttcaaacaggtctcgttttcactgtcctgccatcagctcatagctcaagctagggcttctagcttgctcggtcttcacccccagccagatgcctggaggatgactgagagatatttgagagcagtagaggctgatctgttaaaggcagcctttgcagagctctgctggagcctgacttaagccgggcccgcccactcaccagcttcctcccacactcccagcccacccccaacccaaggggctcactgtgtgggagaggaaatgcaaccatcagggcccctcactcgctctggctcttctggaaccctgggaagaaccacagcgtggtgttcccagggtctgtgtttctgtaagatttgggagaggagtgttttaaacacagattaaactgctgtttcatctactaagctccccactcgccctcagtcttctctgataggatggctgtgggcaactggggatccaacccaggagcagctgcggagagcacgtatttcatgcgcagtgagtgggatccatttctaagagccacagtgacctctgtgtgtgcaagtccctgctggtcatcctggagtaggaaaagcttagagaaacttagtgtaatggctgcaataaatgtagacatatctcttggcacctggcagcaaaggcctgtgggtatcgagaggggtaagcccaaggaatgagatacacagagccagaagcaattctggagaatgaaaactcagttctctttgatgcctgtcaaaatggagatgcggaaatgtactcagtaaggaggcacggggagagatcagtacactgtacattgtttatggaaattgcatgaaatttatcaggaatcttgcattcggcagattagcatgacagggctgcatggagcaagccagtctgggtaagaaagcatgttttattgccttctggttatcaagaacttgagtcttgctagggaagaagattccctcttttttttcttcccatcctcgtgtaaaatcatcagatacagaaatctcaaagtgtgcaagcaaattttacagcacagaaggcgattttagagatgtgccagaacggtcagttaaaacattgtggtgatgatgttgttgttgttgttattttgtgagattggttgcagccttacaaaatttcttatttctccttttctagagaatctctttagaacatcccatatttgtcttctatattatttccttaaaacacacacacacatctacacacacatgcacacacacgtacacacacacatgtacacacacacacatgtacacacacacatgtacacacacacacatgtacacacacacacacacaccgccaattctataacgttccggccctgcaacctagaccctccctgaggacaacccacatgaatctggacaaggcttttttttttttttttttttttttttctctgcattagagaactcagctccaggctagggatccatgattctgagacagtttgcttggagaatcctgtggggtagccctggttttgaggatacagaggcctttctcatgatggctcctatcccaagttctcagggccgtactcctacactggaagccagtagcaagcgatgaactggtgtgtgcgctccatttttcctgctgtgccaagcccagctgtgcacagcctccctgtgatcagtctgttggggcttctatttctaaggaagccagatggttttctcaccaaacctttgctcgcatttacgttgtgtttaggtcacctgatgatttgattaatgctcaaggtctcatctcctccgcaggacacttatgcttatctactcttttttgttttgctttttttaaacagagttggtgtggacctggatgaaagtctgaaggaagagccctcctcacagcaggcaagttccataaagtcatggataaaacatggactggtccactgctcatccgtgctcctagagtacatagccaagggagctatttctaaaatgggttgcctctgctgatagtgcctaggaattcacagtgttggttatgtttaacatatgaatgctcagaaccaactcactgccacctcttgggatatcaagaatcctgaaaacacaatatgggatctagactagaacccaaagaatgagcctccccatggtgcctcccgcccagctgctagcccattgatctcagtgaagtcaatcaaagcttgttcagcacacaacagagggtcctgtttatcctgaatagcttcttcttcaccagatctgggtgaggaaattgctcagaataaaatactaaccccttaagtagaggaaaattgttctccaaccctagttttgaatctgccatcaaggtaggatcagccatcagtgatattgccttagtcattccttacttggtcactcaccttaaaacaaatgaaccaatgtgtgggaatcttcctcgtttgctgtaatcagaagtctgcagacgtgatcagagtaatgtggtaaatacatggctttgcttggtaaactgtgttttgatcgtgtttggatttgaggacaacccctgctttgatagtaagggtttccccctcgtaccaacaatgtaccacagccagctggcattcctaggcaagaggccacttccctgggtcagacaaagaaagaaggaagagccctgttgcacagagaagtctgaggaatgaagtttgtaatgaacatgactcttgtgttctatgaacatggttgccacgtgtgttctggggccataggtactcttttcacggactgattgcccagggaacagcatcagtgggggacagagcacagcatggctgctggaatattaggactggggacagcttgatgaccttagagacagaatcaaagccatcgcctgggctgtaatgagtagtgaggaaggtctggctgtggctgaggtttcagaaacattttcatctaccataggtcaaataatctattctccgaccttgaagcaaaaccttcatctaaattctgtcttcttcatgtgcgtctttctttagaagacagaataagaaaagtcatcaaagaaaatcctttgccttcctctaatgacctaaaattttataatcgcatataattattggtaaaatttcctactagcctgagtcatttttaaagtttatacatattttagctttttcatacaacattttaaagttcaccactgttagttcggcagtgactcttacctggagatattaccataatgaaaggtatttttttttttttagttgttttagaaataagattgtgctgcatagaaaatgaacatcatgtgacatttgggtcttggaaaagctttcacatcttgggagtttcaccttccctgtctgtccaaagtgaatgataatggtgtttatctcaggaagctgtcacaaaaaaaaaatcaacaagaaaaaaacaaacctaagcttaggactagggagatggctcagtgggtagggtgcttgctgtgtaagcaagaggccctgagctcatatctccagcacccatataaaatctagacttggaggtgcacagctgcaatcacagggctgggtagggatgggaaccggttgattctggggttcattggctggccagcctacctggaacaaagagctctagtttcactaagagtggcaggctaagaaaaactttaagtcaacaaacaatgggggaagacctccagtatgaacctctggcctccacatgcattcacatatacatacaagctagcatgcgcatacacacacacacacacacacacacactgttaatacaaaccaaactcaacttttaaaagattttagacacttcacctcactacattaaataattatgtgttttagatttcagtagaagaataatcagaacagagagtaaacacacaggaataaggagaatccaaatcagcaggttgcagggcctccatccctgccgagctccaactacaaatgaatattacgttccctagagacacctggcagaaagaggaaataatcagtcatatcctaagtccttatccttcggggacacaaagcatgtccctgccctggtggtgtaaagagtggtgcttactgtttctaaccagatctccccagagcttcacgcagagggcaaagaaggggctctctccatgttaagccattcccactctaaatcacaagctcctgaaggagcctttgtggcttacaaataactttcaggggattctgggcatcctttctcaccatgttctttagctagcaaaactagcaaatggcaaaacccgttttggaaagaggttggagtaattatccccttagtgtcaagtacatgaagcactgaactccgaccagaagtcattggccacgggatgcgtgcagctgccattcaacctgggcgaagtgtgtttggtactttgtgagccttgtgtcaagatgctctctgctgtccttctgcctggcaatgccttacttgtcatctattgatgccaagcataagtctgagttttagcaagaccatgtccctacttactttgcctttactaaaccaagtttaaattaacaagattaatatgtgggatgatctctgcactggctaaccacaacagcagttcctaatgaaaagctaaaaatgtttaaactacttacagccattcctgactccgcagtctcagagtcaatactgtataattaaatgcagctgcttataaaagaattcccatcttcttagcttgtagagaatacttctgggctgtaagcttgaggcacagctccctgtgcaacacatgacagtgcaatctttattttgccaggctcagaaactttgcaaagcatgctccaaatgcaaccattcagctttgagtgcacacagtttatggctttgctgctttgagaagtgtatgttatgtatactgtatgttatgtatctctcactcatgtttgaaaaacagatagtactacccttcctcgagccccagatagttttcctgttcttggaaacacgcccttgtgaggtgggtaaagtctctggactgtggtgtaaatttccagcacttaagaggactcagcagggcgtctcttcccttttcatcagtctgtcaggatctccccgttgaatgctggctatggtttttaatattattctaagcatattgcatgctttacaccagtttcagagataaccctgaacaggcactatatcatcccatctacacgcaaggaaactgtacacagagaagttagataacatgaccacaggcacggagaaggcaaaggtagaatttgaatccaagtaatttggttccaaaatatcccactttatcagataagagtgcgttcgtgtgagtagtcattgaccccacacctatcaaatataagctgctatgcagagaattcaactgttactattttgaagtcttttcccacacagaacttctgttccaaggaggaacacctatcagaaaaaagatagtatgtaaaggttgtgagttcagaaaaagataacgatgaagcaggtgagggggtggagaagggaggagaggtcattggctatatagggcagatctatgaaagtaccatttgatagaaaactgaaatgtgcggaagcaagccaagtggaaaggaaggcagtggtccagtcagatggcacagcaaggatgcaggctccatgtcagtggattggtgtgagcacaagcagaaccaggtgcaggccaatgtggctgaaggtgagtagccaaggcagaagtaggtaagtgagctggcagtggtgaacagggccagtattggagctgcagtggcgagtttgatcttactctgcagaaaatggacatacccaacaatttctcaagcttagaagtttttcctttctcctaacccaactctgtcaactattacttttgtcattactaacataactttatttttaacacagtgctagcctgtgtagggtttctcttaaatattagcttgcacttttctattacttcctgaaggtctggttgtccattctgtgtggatatgaccttggtgtcttggttctgatggctatggctccagacagttcaagcccagttgcaaaaggtcccaaggagtgcagaagtatgcctgcaataactgagcaatggggatttaaagataagatttctcacccagaaagactcatgctaagcaaagacacaaagaaatgcctgtcaaatatgaagggcataagtacagtgagcaaacgcttgtctgccaagtatctgaaagccatcaccttgaatacctttgaaacctgcaattactggtgcagaatagaggtatttgttccttggcccaaatgacacttcttatcactggtcctccagagccccagagcacagagccataggtaagttcatcagggggagagactaattagctataggtggggccatttggtccattatctatggattaccttttcattgtttatattttcagatagtcctaataaaattttaacaacagaacagtgaagtccacctagagctatcacacttagcagtgaacattctcatgtacatgtttcatttcttgagcctttacagttggcattggttttcatgggatgtaaattccacacgacatcccacaagtgttttaggaatagaatactaggctcagacattgatatggcccagatgaaagtttttaatgccacattgtaactaaaactatcttgatttaaaaaaaaaaaaaagaatatccctaagcgaattccttgagttttcccttggctgacactgacatttttgtttgtaacacttacctatgtcatacacacccaaaggcaaatgccacattaacatgtttacattatagggccaatgtccacatgtttttcttagcatcaggccctttaacttcatgttctagaaagtaggaataacgctgaggaagcagagggtggtggcagttacaacctaaggagcaattttacacattttatatacaagataaatcatctttaatttttactttgcccaatcaggatatctattattagagccctctgtaaaagtgagaatatgaatgttttaaaaaggaatcctcccaagataaccaacccaggatgtgttgagccaggagtgagagccaaagccactcatcctgacagtcctgcatgggcacttgtctagtctgtataaagccacccttaccattggcattgaagccagtcactttgccagtgagtctaacttgccagttctatcaagaatataagcagatcttcatttcaaaggcccatagcatagtccccatcctctgctcgattatctccacatggaatcctccccttctccaatacccactaggctaaaagccttgttccattgtctaggaagtcatctacactctacacagtatgtcaacattcagttacaatagagtaggctctacatcctcccccgtaccattattcaatgcttcttaattcctccttacaagagctgcctgtctaaaactcttgttcctgtggaggtctaaaggaggaacattctataagggacaaaaatcccaaaagaagggacactcacagtctgtgtgatgaatagaaatgatgccgttacaactggaatagccactgggagcattaaagactatgaatctgtaagagttagaggcaggagccagcttgtgtgattatctgtcaccacattatgctgggtaacacagtcagaatctaagaagtgtgcaacaggagtccttctgttgtgaactactttgtgaacaccattctactggcaaggacagagagcaagaatgtaagggaaagcgtgtaatgtttcttgggactagcttcagttctaatattctggcactgctgctacattctattcctcagagacagttccaaggacatcatagaaaagagataactagacaactcttctttggtcagaagtaccaccaggtattattggaaatgttacatgttgagagatgagaaattgggatcttttatataattgatctgccatatagatcatttggactatggtaaagagtttctattttataatagataccattctaatcttttgaacatgcatggttttatcttataattataattgattcatctttgtaaacattccttgtgtactttaaagatgtgtcttccagcaagtgttccaatagcacaagcaacaactgcagaatatagttgatataatattacagaggtgtcaatcattggaaagaggatgtaggtcagttgttgacgtgcacgcctaaaggcatggattcagtctatggtggtacacaaacttggaattgtgttacatgcttgtagcccctaagggtttggagcaggaggattaaaagttcaaggtcatccttggctacaaagtctcactcaaaatacaaggctggttcaagtgttgcctgcgaaaacatgagtgcctggtctcaggtcctcagcacccacataaacaagccagccacagggatatgtgcctataaactctgtcctgcagaagcagtgacaggagggttgctgtcattagccttgatgaatttgtgagctccacattcatcgagtctcagaaaatacggtagagagttaaagtcatcaacctctgtcctccatctgtgcatatatgcatgcacatgttcccacatgcacatatatgtatatacaccagacacatgcacacaaatgtcaactatgtcaggttgattctttgttgtaatctacccactgtgccagttactggtgcaatttgtacccatttgaggcttgcatggttctccttcatagtttggccaatactgcctcatatactggagaaagtctacatatgcagctagagacctgagctctgggggtatagaactcagtttgacactttgaaaattgtatcttcttgccttcaagcctttattttacatgaaacagtagaatttattttagtttcctgaatgttctagctggttctgtgccaaactgacacatgtagattcatgggagaggaaggagcctgagttgagaaaaagcctctgcaagatccagcaacaaggcattttcttaatcggtgatcaaatgcgggagagcacagcccactgtgggtggtgccatccctaggctggtggtcctgagtgctataagaaagcaaactgagcaagccagtaatcaacactttttcatagccccttcatcgggccttgccaccaggttcctgccctgcttgagttcctgtcttgacttactttggtaatgagcagcaatgttgaagtagaagagttttgatcatggtttttgttgcagcaatagaaatcctaattaaaataccaaacataatttgatctgctttaatatcatctcttttaaggttttttgttgttgttgttgttgtttaattttcagttttagaagtctgactatggtttactgttctttaaatttatcctaatccagattaactgagtttcttgggtttctatgtaaatgttcataatctaatttataaaattggattactgtcttcttaaatattctgttttctgcgtttgctgttccctccatgtactccagtcatagaatacactaagtcatagaaaaagccactttatacatttttctaatgtcatataggtactttcttattacttaaatcttacctcactatgttctattagttgggtgctttaatctatatctgttttcaagttcactaccagtttattctgcagcacccagacagcccttgtgccaatatagtagagttttctttctagatattatacaccctttttctggaatctatcttccttccttccttccttccttccttccttcctccttcttttttctttctttttcttctttttcttcttcttcttcttctttcttccttccttctttctttctttctttctttctttctttctttctttctttctttctttctttctctttctctctttctttctctctttcttttttttatagatcataattttcttcttaggtttcattttgtatttgttatctcaatttatttaaattctccagcatcttttttttttttttacagctgtcttaaagcctttacctattaattctaacgtctgagttatttcaaagtttgtttctatcaatggccagtttgggtgtctcattatcgtccctactttatctgtagcttaccctatctgctgccaattacccaatcattgagtcctgttacatctgtgataccagtcagtccacatggcacaccattacattacattctgaaagtgattttgcatagtgtcttaattagggttttgctgctgtgaacaaacatcatgaccaagacacctcttataaggacaacatttaattgaggctggcttacaggttcagaaattcactctcttatcatcaagtcaggagcatggcagcatccaggcaggcacagtgcaggaggagatgagagttctacatcatcatctgaaggtccctaggggaagactggctcctagtcagctaggatgaggatctcaaagcccacccccacagtaacacacttcctccaacaaggccacccctattccaacaaggccgcagctcctaatagtgccactccctggggcaaacatatacaaaccatcacacacagggaaaaaggatattgtttctttcactttgtttccagacacatgaagaatgctatataaaggacccgagagtgctactatgaaaccacctcacagctttagtgtggtggttgtgtttctgggggttaatatttcagggtagcttgagctgggaccttgttttgtaagatgtatcttccattatggtgtgcatgtgaatgtcattaagtaaaagggtcaccataccaactaaagcattctaaaagtcagacatcaggtaaaagtgctatgaagcaagaacagtgacattctgtgaacatccacccatctttaagttcatccatccttttttctttttttgtctttgtcctcagtcttcagctttaacatggtcattttgaacccatggttagtttttgatgtagtgttaagagggaaaataaaacttctaccttaaaaataagttatttggaaaaaaaactttgtagatgaactataccaatacaggcatcatcatttattacatttttaaattcccatgagtgccttttatatctaaagttcacaatagaggattctctagttaatatccattaaccactgttccatgatggcttaaaataccacatatttattagctcaaaggttttatggctcaagagtttgaaagcaacttaactgagtgtttccactcagggtctgctgcgaggttccagacaagatgtcagctggaatgactgtctctggatgacttgcctagatccagaatttgtatatctctgttggtagaagccctctgctccttgctatctataacagactccatggtaacccacagagcactccatagacctgttaccgagccatcacttggaagacaaccttttaaagcaggcagtccaagaaagaaagcaaagagaaagtcctggtgccttttgatggcctaatttagagtgtgacataccatcacatcacttgtatactacattttattccttagatataggtttttaagcacatccgactcacagtgtttgagagaaattaggttccagtttctaaagaaagtagaatcaaagaacttgtagataatcaatttaaacattaatattgcattttcttcagccaaacaattatcttccctgtatgcatgtccatctgttaccagcccaagtcgaatggaccaggccctttctttttcagcttaccctggagctggcccatctggtagtacaggctagctatgagtatctggaggtacctgggaggcatctcagagttttgcccatcttttgatagttaaatgccttaatgtttccttcttacacatacatttcctaactcccttctttggaacatttacaaatgtatctgggttctgggaaagtgagagcatttgcataaactgcttctgtgtggagactgagaattgatggttgaccttttacaaaggtaacttcaaaggctttccctttaccttttggttacgtgataatctccctttggaatcctgaaatctttctctttaatgcaaaaaatttcattctctccttgataattagtaaatcaaggcataaatttgagattaccacataaaactctccattcctgagggaggtcgtaaggcaaaataccaaaagccaattctgtgtgcatgaaccacctgaaaagcaacttgggaacccagagggggcctcctagcattgttgaaataatttcagaatccttataataatcatttcatttgcttcttgcttcaatgtctggcttttgtagatttctggccagagcctttggtttatcctttatctgtccaaataaacctaaaataaataagaccatcataactgctcctctcatggttctgccacattttcagggctcagtaaaaagaaaactatccacttcctgctgtgcacagtcatttcccaatctctactccattccctcgtttgaaggggggagggagaaagaaagatcagattgcctagccatttttaaatgttcccagaaatagaagataataaaggagccagaaattccatatacatccatcattctgcttctaagatgtagcaaggcaaataaaaggtacaattcaacactcttgaatttccagttcccatgcagagctgggaaacctgaggctccaagttcgtgagtgtatcattgttattcaatggaagaaagtccaaatcttggtcttgggaacacttaagaattcatctgggaataagaaaggtgaggatatgttgtatcctatgcttgttctaaaacgcatatcccttctctagaataagggaacttaacagagaataactctcgctggtaataaacaaaaacaccatggaaaggtagaccctcctacagatggttgttcacatccgttgtccttgaagcatgcgttggtccctatttcagaatagtgcagataggttgatggcctctcctggttctctgcacactgggacccttccaggaaactactctctaggttgtcctatcatataccacccccaatgcagtgtgactgcaaaggctggcctcccttagcacgtttatctttagctcccactgcacaagcgtaacatgcattggactaactcatttatttctattcatttattaatggcctttcataaccaagttattaagtcatcaataactccagagaaataaatgaatggatccagaactgggccaacagatgtttaaaatacgtattgaaatttttaactaggatcagcaaaacagtcatttcttgatcatcagaggaatatgtcccatctgggaaaacacattccacccctattttattagaattagaattcaacttctttccaacgtactgcgatgaataacatctctagtcagtcaactaaactaaaggttatttttaagtatatattgcacccatcagatgacaaagaaaaaaaaatccgtagacatttttacagaaatatgtcttcttagtgtttctaagttccaatattgtagccttaggaagcaaaatgaaaaagaggggacagaagaaagacaagagagtttctaaggtcatagaaaacccttgagaagatcccagggctctaagttgtatatagttattccatctctgtgtctgtgagcatcccagcatcctgaccttgctttcctgctcagagaccccttttgccctcattggctttctgttgatgtgccagagctctagctggacgaaggaattcctgtggctggagaacttaaagtgtgtttagaaatttccatgctccccactcgtcttgggtttcttgtccttaaaacagaggcaatgacaaagcatacgttcatgatccacaagatacaaaaatcacctacgatgtcctccaacattgaagggcatacgctccagaagtatctcctgctattatagtggtcagtaattcaaatacagtaattccaaatagttttagttccttagagaccagaaactgtaactcctattgagtatgctatactcctagcttttgggaggctgaggcaggaggatgtgaagtttgaggtcagcctatgaaagaatctgaggaaggaagaaagaaagagagaggagggagaaaaagaagagctatgaaattatgctgtgcattaaagaatggttatgctttccacagtttaatatgagacagaaacacttagaggaaacaccatctttagcgtctagcaattcagtcccagacttgactccctgctgtttcttgctaactgggtgactgtgttcatggcttcccttctctgggggtctctaggtccttaagtgcaaaatagctacaactcaaccaacctagatggattgtggtggaaattgaaaaataatgattggaaaaactaatggctggataatgtgacaagcacgctgcctggaagttaatgagcattcaatagctaggaactgtcattactgcaaagtcactcagctgggctgttgaaggctggcagctgagcctccaaacaccacccagcttacctcctcaacctttctttaaaaaagtctggggacgtggttatggtttcaacactttacttagtgactgttacttaattagtaggtgctactcctactttgccatggaaatcagccatgcccattgatgggtaaaaccccccaaagtcctcatacttaaggaaactgagaaaaggagacagaaagcttccacatttggtacagagctttttgaactacttctgtttatgatgagttttgctctggaaccttagccctgcaatgatgtgggcagtggagcccccgcccccaaacagcttgcctgggtcgccttgtgatgcagaaactgctgtgtgaagcggttgctctgacactgttaggtgaacagggctacagagagatgtagagaagcacagggatactgagccagacgactacatttcctttagagggaaatgggaagaaattctaactactgtgaccaaggcatggcaacccataatgcccataatagacaacagggtctcatgaaaggattaggaatggaaaatgaggtctaacatgaacctgtgtgaaaacattaccctgttgataatttttttctcaatggtcattatagaaggtttgaagtggcggcataggtctttaaccccagtattcaggaggcagaagcggaggcaggtagtggtccatgagtttgggacagcctggtctacacagcaagtcccaggagagccaatgctacataatgagaagctgtgtcaaataacaacaacaacaacaaaaccgagaaaggttggctttagggcaccttcaaggaactgtctagctcatctgtcctcattgtttgccatggtatatcaaatatcaagaatcacataggaagctttacattttgaacctagagatcttaatacacaaggatgatgtgtttgggtttggattcagtgtgagtctctgctgcatcgtttctggcaaagggtaacagttaagtaacaatgggacacacttgccttctctgtagtcccttttcttggagctgtagtgtgtactggtagagattttacagagcagaatgtagctattcattgttatcagtaatggagctggctgtgaaagagcaacaaacaagttaaattaaaaaaaaaaatcaaaccatcttgggaggggctgactttggtgtagtgggtggggttttcatggtctcccatacactatcatccatcagaacaatgctcactctattccagatcagccaagtcatagaatagtttggagtggaaattcagggcccagacaaagcagaaaatccacactaagtccagtatatgtgtccatcacaattgaaattgagtagaatctactttccttaatatgcaaaatggaagatgcagatatgaaatgctgtggaagatccagcttaccacagtgcaagtatctttagcacaaagtgtttccatttgccttcttcctctgcctctccacttcatgccatcaaatacatcgtgtttctcttttatctttgtttccttctcccttcctttatggtgtttgtggggggggggggagaacagtcaaatctataattcttaatggcttaccatcaggagcgtctctttgaactgtttctaatcctaacagaaaggtgtcaaaacccaatcacagcctaagttcaaatcccagcaaccacatggtggctcacaaccatccttaacaagatctgactccctcttctggtgcctctaaagatagctacagtgtacttacatataataataaataatttttttaaaaacccaatcacagcctttaaaagtgacatatcaaaaaatgtgcataaaccggtgtcacaattataaggctgttctttagtaatttcccagtaatccataaataaatgacactcagatttgacttacatggactgccatgttcccacaacacccttggacagaagcagctttgacactgatggccaaaagtgacatctcttagctacttaataaaattgagatgattaagaaagcaaatactgaattgtgccaacaactttcatctacacagaaagatctctgagataatttgaaaactctttgaccattaagatgaacatgcctaggcttttttttaaatgtttctttaatgatgtagttaaattggatttggtttgacacatatttaagatgtaccattttctatggtctctttccaggaagcaaataagttggacaaaaacatgacgaagacagagagtgcacagctcttcagaatgtggtatggatttgaccacaagtatcctttgtaatgagagcctggcagctcctcctggaggggcaggctactccacaccccatcatggaggagtgaggcctgtatcctgaggagcacacaaaggtaaagtaaatccacaggcaaacttacatcgaggagtgatttcaaaatctagaacaatgtggaccatggttgaaatggtagacaaggtttgaaaaggcaaagtgtcaaaggcgtgtgatgatttttttgtggtgatccgatattttctaatgtcagataacaaaatcgtatggtgctgaagaacttatatattttgtttttctatagaaagaccttacttccagttgggttggctagagatcactggctccactctacagtctcagtggcctttgcagtctctggttggtctgatgggcttggacaggacccagctatacctgcctcccaggagcccactgtatgcctttgtttcctgtgtaaaatgatgaactggggactgggagtcggcttcgtcatagtataaaatagcgccactctttaatttcccctcaggaacactgaggtaaactctttcctctgaaaatcattgtttgtttttacaattctacccatcaccatcacggtgaatgcagcttctcagacatgctctgccatgtgagtttgagggttgaaaaatcaggctgaagtgctgtgccctgtagaagcaagcagcccatggctaatccagtcaggagcaccattcgggagaaaacagacaattgctgtgaactgaatgtgtttggtcttcacagctggctttctgcaatgacaaaatccctctccttttagtaggaaaaagtcattcactgtgtgattaaaacccaaagcaacaattaaagccacaacacatcaatgggagaggagaaggtgagatcaaaaacaggatctttttttggatgtttgatagaagtcagcaaacagataaagaagaggaaactatgatagaagggagtgaggcagtgagcaatatcataaattcacatcagggatgaaaggaaagcagattggaggaaggccgggaaattagaagggaagactaagaaggaatgaagatgcaagaagatgcaggggtaagcaagaggatgttcatgtgcaaattgggaagcatccctgtagtgccccagcatcacatggttctgtggagggcaaaacttggagctttgttcttgttaaacacatctctctgctgtctgtggccagatgccttccctcatgtcagtcctgcatttgtgtgggcaatccatgttaccatgctgcaaagggcggtgcatcgtagtcattggcaacctcttgcttgctctagcctttagttacctggaaccttcctgaacctagggggatttgtaatcttggcagggtgttgcaggcttatactcctgctgaacctctcttccaggaacaggattggctcctgccattgatttcagtctctgataaccaaatttataggaaggtatgagaaatgattgaagcaaacacctaatgaaatacacagctaggaaatgggaaatcagaaacccagtacgaggttttttactttcgtcctccaaattctgaaagtgctgtgaagcagctttgcaatggagaaaaagaaataaagtagaaaaattaactcggagacaagaaaatgaaatttggagcccactcaaattttttgctccaagcagtggctctaaatttagatgatgtcatagtttttaatctcactttccaccaaaggtttatttccatacgattaaggacatcctagtagaaatgaaagcagatttatcctctctgtaatatctctctgcgttgcaatttgtcctcctgtgcattccttctggaaactgcagtgcagccgtcattgcacaaatatattttttcatacacaacaggggtttgtgccctagttaaggtctgaattttacctggggaggaggagcatgccaaccggttccaactctctgacctcttgatacaggtatatttttagacaagttatggatttagcatttacattcactctgttggccactctaaaccctgttgatgttccaggtgaccctaaccctatcaggttagaccataccagtcactgccaatgtagggacagttcctcactggatcaggttgcctagccttgaccaaaggacagtttagggtactgatagaaatggactatatagtacggagctgttgatccctcatatgttagaataccatcatataattaaagcaagataaagaatgtttgcttatttttatagtactgagggtttaagaccaggatctttcacattttagatgggcctcaccattgatagatagatagatagatagatagatagatagatagatagatagatagatagatgataggtagataggtaggtagatagatagatagatagatagatagatagatagatagagatagagagagatagagagagagatagagagagagagagagagagagagatagatagatagatagatagatagatagatagatagatagatagtatataaaatatatgtatatattttaatcttgaggtagcatcttactaagttacccatactggtcttgaactcagtctacagtccaggcaggccttgaacttgacatcatcctgcctcagcttcctactgagaagaactgagaaggtagttcaataataggacacttgcctaacatgaaaagtcctgaattttatccctagctccataaaaggggaatttttgacaagagagaaagaattaacaagccttagaacacacctaaattagataaagttctccatgaaaacaggaaccacactgctggaagtaatttatgtatgtttatatgcatatacagacccatttcaaggaaccggtgtgtgtcattgaggaaactcccaagcatgcaatctgaagggccgactctcagcctaggaactagggaagctgctaatgctgtaatcttgaggcagagtcctgcagagcagcttcagttctgcttttaaggctttgctactaattacaagaggcccactggataatttatttcacttaaaatcaactgattgtacattcagccctatctacaaaatgcttttggcagcaatgtctaagctagggtttaattgactagcggagtacactcttagaaatctagccattagagtccccgttcctacgtagttgatgcccaatgttcagactcaagaatggctcattatttcatcattattagcaataaaacaaaccactggagctcacataaatttttttgttttacttttccatgtcattaagcaattcactcatatattctcataaaagttttcctcaaacttacagtgattggggagagagtgggtgtcatacaaatgcatacttaatgaagatgagaactggccaaggctttccattcactacctcactttcttctctgcaggaagttggagtggggagagttgagaacacacatgaagagatcaatggttagtctcttgtatttccaaggtcggactcagtatagtaacctgggttctcctgttcaactgtggtattggaagcctatggtgccaaaattgatgattaatgacaatctcattacaattcaacatgggcagcgattctgaatcatgcagcagaaagaagaaatttagacataagggggtgataggcaaacaaatgctactgagccccaggccactgtgagacactgcacttcatggatctcataaccactctttctgtccgtgtgacagaaagccagactcccagatcacttgtataactaacatcccattatcccactgctggtaacattcaattccatgattcaagcccaggtctctccaaaaccctagctcgctgtgaatgattctcttacattacttataaaaccccatgtctcaaggagatcatgcagttgtcctttagacaaggagccaacctgattcctcaccatgtagtacactcacctctcaaatacctgttgacaatattcacttgatatcagggttagaggtcagtgctggtcacacagagaacactaccatgaaggagccgctaagtttccaagtcatatcttcaaagttttggctggaaatataacaaaacaatagagcagtcagaaggtgtgaggtcctcggttcagttcctagcaccatgaaacaagtcatatcttcaacatttcaggagtagaaaaccaagggactttaagtactccaatctcccgagggaatagactcagtctaaccaagctcaaaggaagcagaaatgtaaaccagatatcaaagttctggattcccatgttcccatggagtggaatgtcctgtcctagccaggagaagactaaagtcacagcctgtccccgagtgcctagaatgtgccagggccagcttctcgctagcgctcccctcagactaaaatgcctctgtccttccgctctctcattcctcctctgcaggacctccctggctctgttaggaagtacccatggcattcacttcattttccccctgctttagaattttcctacagtagtaccttccaatataccatggactttgttttaattgcctcttctgacaaggatatattctttctggagatggagattcgggtctgttcttgttctgtgttttttcttatagcatagaacaatgcctagcaaggaggggactcccgctcaataaatatttgttgaatgaatgaacaaatgaagaatgaatgaatgaatgaacaccagacaggcagcaaacaagcaggcaatgttttctatacagggcaccttcacttcaggtattgaagtagcaagatgtctattaattatctgaaggttactaaatgagtcttcaattaggcccaggcatagtggtttttatctaggctaccccatgtagacaccgatgcatagccccttgacctatttatctcactctggagacagacagacatacaaagctaacctggatttcaggtattttaactggtctaaagtctacggttggtttcccttttcctagtccctaccatacaaagggagaaataaatgtgtttgtgtgtttgtttgtttgtttcattaattttctactgtaagcactggaattttgcaactcattaataacacaggagctcaaaatttcatggctaagattctggtttaattaagatgattatctacttcatacaagggaggattatttttcatggttgaaagcagtccaacctcttaaaggataaactcaaatgacccagatattgcatgtaggcactttatggtccaccactcaactgaactgctatgttcagtctggccctggcttagaagctgcatctgctctgtgtgggtgactaaatgcatctaatcccaccatttacatgctagttctattaagaccaaacccaaaatgttagaaccacctatcaacctcactgacaatctcatataatgagcaggtgggacactaaaatggatgaatccttattcatattttaagacactgcatagaattatttgcttagtgtcagggtgttacagctggtactggaatcatgcacgccttcttcatgactaatggtcgtgctgggctgtctgcttcgtggagtctttttccattctgtcatttatcatcgttctccttaaacatgtgtatatattagtcctacaaaagtgaatgacattagataaaaaatgaccttttccaaaataaaaagggcagcataaaatcattttgagcactttccctgtgccaacatcaaagagtgtaagaacttagtgtgtgcttgccagcattttacatggtatgaagaatgctcagagataacaatgagttggcaaattgacccagtaataaaatttcagaaaaccatgtgggtagagatctctcagaggctcacagggagtaccactactagggggtgtgacctagttggagtaggcatggccttggagaaggaagtatgtcactgagggtagactttgaggtttccgatgctcaatccaggtccagtggcactctctcttccatatctgcctgtgaaccaccatgattcctgctgtaatgacaatggactaaccatgtgagttgtatactggccccagttaaatgttgtcctttatatgagttgccctggtcatgatatctcttcacaatagaaaccctaagacacccaccagatacccaccagatgagaggcccagtgcaggatgtgtggatgctgtgactcttgtatgttcctgctggaaagactccctgtgaccctgaagtatgaatttttggaactccactccaggagaaatagacattgtgtatcttttgttgttctcccatattatttgagaccacatatttggtagacttaaatgagacagtatactaatcatagcagggggacagataaacagataaggaaaaaaagaaaacttctcctaaaacttgacaatgctttctatcccacacagtcacacttatgttaattcctaggtatgaatatcatgaacagcaatttccattccaaatgatgattcccagcaacgcagtttccctatgctgactggttgaagcagttatgagtcatttgttggagtagtgctctagacttcgtgaatgatttgagtttgccttatacagtgttccagagggacaaggacctttcctatataacggaggcactgagcccaaaggaggaaaaggctcttctgagatgtccattgttgctgatgtacctaaagccaataacatagtcaactcaatgtgcctatctgaagaacccgtctcctgattcatgtggtccatctactgagctccagtatctttgatatgttgtgagatgctattgctgcacatgtgtctgacattatttttagtgattttaatgtcatcatttctttagtagttcattaaaagctttaccagtctgggaatgaggcacattttattttcattagcaagcaggaaccatagcagaaggtgtgagtaacacattagagtacccactgtgtgccacttgacacagtgggtttcagaggcaaacatagtaagtgggcatggttgtccctcatgaggttctgctattcaccaccattttgaagtgagtgttggccccaaataatcctgaaatcgtgagtgagaaagagacttgggggtaagggggatgtgtttaaggggctacagattatgttcactagcaaaatgtaatcagatgatcccaaagtggtttcgagaagcaccatgattggtacatatttgagacaagcaaaaataatccacttcctgaaggctctccatgaagatatccctggtggctttctaatagaagagtgcctacagcccctgtatctgcttccctgatgaagctgaccaggaagtgcactcttggatggagcaggagagcaggacagctgccccctcaccctcaccctgccacctctagtcagtcccttgggattcataggtgccattgctgaaaaagcttgtgtctagcccttgacttgagtcatcaaaatacaacaaagtaaaattaactacaagaaaaggccatcttcctaggcctctgggttctcatgaatttttggtggaaacacaagggactttgtactgccatgttcaagtcataacatggatcttccctgcttccttctcatgtcataggatgaatgcatgttatcccttactttgtctgactccatgagaaagctgactagttactaaaagcctcttgctaaaagcaacccactcagtagcatctcagaaccaaaacaatgaatacactcaacaagtgctattttctcaaaaccctacagcctaaatcaatagttggagtaagttctcctacaaagtacatatgactacagattaagccctctgaagtgttgtcaaaacaccacagcctccaatcctgattgtgaaaatcagggtcagaagatggtgactgagttttccacaatagccctaggttgtacaggagcttaaagcccactacaatgtttttctctttttcccataaacatgtttttaataatatctctattagatgagaatgctttctcatttcacgttcactttaagcaaacaaaatgaaaattgtgatttatataaccacgaagtcaaaacatagctcttctttttatagaaaatagatttacaaattcctttaaactccaacaccaaagcaatctattgagtattttcccaatatacagcagtgtcttagacatccctcactgattcattctttgatttattacataattaccaagagatttccatgggccagtgggatcctaggcggtggatgcatgatgtgacaaattccacagagcctgtgctctaatatggttttgtttgaagatttctggtttatagcatccttttaggaaggcatttctagaatagataaaggcacactcagatgtcccactgttactttttatcaaatagagaagatctgctttaatggttgggcattgattctcgaccatgactcctttgccttttggcttaaatcatctatgatctgttgttgttgcctacccaggactggttacataatagtttggcttgttttgatcattagaagaattcacttggggcacttggagtgatgcttagtaaatggtagagttctgttaactttactacttattgacagccacagatctaagagaacagcatcatctagtgcatctaacgctcattatcacttggtgtctgagacttgcccagctgccattattttatatcccagtatcaatgttcagttaaaacagcaatttttttaatagcataaggaagacttcagtctctgtaagcaaaaggcttcatgtaggctgtgagccagccataattcccattctatctccattcaggatggggtctaagttgctcttttttctctctgtgctacacacacagttgtttcacgtttaatctttcctaagttacgaaccatcctcctatagttatggttttttttctgaaaattacaccatagatagcaattcggacttgatagagaagagcagtaattttttttttgattccacaatggaagcaatacgaggctttgatgataattattcctcttgtacctcccatgataaaggaagcctttgaattgccccttgtaggtgatgctgtgctgtgttaccattagtgaagtgatgtcaggttgatgatttctaggttagtactctgtcatttcgtttaaaaatattcaaaggaaaaaaatggaaattctttcaagatcaaatacatatactgcctcattgttgccagtattgaatttcactttcatatttttttttcttcccggtgagggctggtgtcttctgtttaaaatttaattgttacttagtcactcctcaactgtggcagccagggcatattcaagttgccaacaagttcatgagctaccagagacacattatcagcatgaactggctgctgctggctacacagattaccacctgcaggaggcagaacctggtgtctctggaagacagcagttcctcagcacctgcctgtctatgaagctgttgtagagcccacacagcagagaccgcccttaattaacatttccttcacagggtggagatgttgatgacaccccctcagtgatgttacaccacttcataaatgtgtggacaaagctaactgcattgatgcttaacagaggaagggcttgatggagtgataattaccattctttctgtcgtgtgggaaagggtccatggaggagttgaagtttctgaaagtggaattcaatagcgagaagggagcttgagtgtcctaaacaaggagagtaacaagatggaaaatcagtgacagatgtggttatccatggataaaagaaagcatgcaagggcaggagaaccagaagaaagagatgaaaggcagtgtgtgggggacaagctaatttccagtaaggaaagcatttatgtattccacacttacagtgactgtaagaatcctcagcagaatgtgtggtggtgcacgcctttgatcccagcacttgggaggcagaggcaagtggatctctgtgagttcaagaccaaagttctgtatgagttccagggagagcctgtcttagaaagagttagagggaaggaagaggaagaggaaaagaattctctcttactgtgattgatttatatgttgtctggtggcttgggtggctaacactgaaccaaagtgtctttcactcatttccgtgacagtcatttatcaggcacttacacactgaatacttccaggattggacttgatttcagtgtcttccttcataaaaagggcaggtgtttcacttgcattttcttgatttttcttccttgggtattgggggccagggtatatcttaaagcctcttctgaagccccagaagtaaagggatcaccgggtcctttccatagggatggaagtcccattcatgagagcagagccctgtgatgggagcacttcccaaaggccctgcctctccgtgccactccactcctgggggttaggcttcaacagatgatttctggccgcacagatagctgaattgtaaaggagctgtggaagccataaagggttataatgggcaccagctcaggggagacagggagagcgccagcaccatggaggatcattctccatacacaggttgtaagtcacgcacgtcatgggcaagaaaaagactttccttcttaagagcagaagcatgcttaagcacagagccacctggtgcctttgatatgatatctagtgactaagtatatggatatgacagggagaacgaaccgttgatagaacaataatgactagtgaccaggtgtactatggtgatgtgacagggagaacaaaacgatctcagagagttgtttcccaaatacccgccagtttcctgcttgggtaaacgttagggtggtgacggtctcattcctactttgaatgatgtgctggggccttcgacgtgtatgctaaaacataaatgtgttaaaatacaaaagtatcctcccatgaagagattgagtcttatatttcccctaatgaagatgatccagtggtataagtattccggccaaggttaagtagaatgctttcaggctaaaaatgcagctgatctggcatttgactagcaatctactcgcagagactgcaggatttctgacagaggccttaactaacctaacggaaagtgtgtgggtcaaaattcgctttcaatgaaaaaaaaaaggtgctttttgaagtttagcaggtaaactacaatgtcaccagcatttcagtcacactcagcccccagggcaacttgttgcctacagaagagctaatgttgctgtccttcaaaagtaggggaagaagcccaggggaaccaccttcctcccaaaggaagcagacacatcctgaacccattgcctttgacacccctggaagctatttcctcaaaattccttgaaaggcagcagtgtactgggtttcgttgacgagttgcctgtaaacacagccaggacacaggatgctatgcaaacccatgcctgagctcccagtgtgtgccaaggagcggtcactggaagggtctgcaacagctctgtgctgtcctctcggcttttctctagcatctgccaaccagcactgtcctccgcatctcatgtgctgctggcccaggcttgggttacaagcgcctttctctctcctgttcctcgtgcactgagtccttctgggtcctcacaagtgtcgcatgctggtacctgtctggagaggctgccggcatggcaggttcagggtgctgagaggtgaagggaactccagaagcaagcaccccatatcttaagcagctccagtcgtgcaagctcagaagcctgctctttaattgacttgaccaatgtttctccttttgagaggaaaaaaaatcccttcactctatatgtgaagtcctcgggcccgtctgtgagctacaatgctcagaagatgaacagtatggtgattggtaattgtacaagcgcttcgcaaacatcaagtgcttcataaagttgaaatgatactaaattcagtgacaggtttacaggcctgaaggcctgcagacgctctatgcagatagaaaccaaaaaaaaatgtattacatttttattatttttaaattcctgctgatttcccagtatatccaagattatgatgagcatgtaattttcctctcagtcttcagacacagcatttgagaaatctttccgcctgcatctttggttcccacaaatgtcactcctccaagatgcctcactgtgacatggcccctgtgacatggccacctttggccttcctgcaaggagctgatgtcctctggctgtctaaggcttccccttcctgacccagccttgtcgggaatgtttgtgtttccagtaggaaatgcacctaaattcctgctgagcctgtttctctggtgagcccaggctgtggcaaatggctaagaagactgtggggggctttagggagatttcagttcgagattttccaaacttctcttctggactcataagtaggtctcgcaatcagtttggtaggctcttacccagaagtttttaatacatcagagcacattgcagaattagaaataaatattatttgtgtcgctggtgtcagggcatgcatgtgtttgtgcttgggctgaaaaaatatgaaaacaaaacaaaacaaacaaacaaacaaacaaaaaactaaaaaacaaacatcattccttgaagtggtcagaagtggtcatgttcaaaagatcctgaatgcctgagctctgttggcgttgtgccctgttgtgccctcgtgcaggaattctcaggcttttcccccaattgttttaagttgtcagcaagttagagaagttgctatacaacctcagaggagagccctcaccccttggttttggaaaagtacagaggtgatgcctttgagctggactgggagaggaaggtagaacttgacaggttcttggatggggaggatgggtacaaagcacaagttaaggttctgacttcttggatacgaaacctcaggctccctgccccctccaacctgccccctccaagccacggttttttaaatccattaaatgagcacagtcacatgtgtcctacacaaaaactgtaatgtccaactggagcgagcaaaatccgtataagtcaaacgaacactaggtgtgctcactgtctccaggcaaagccacattcagagagaagacaagaggggcaagtgttatgtgtgcttggcaggaagtgagagctgcagcctggcacattgaggactggccagtagaagagactctgaggagccacatgaagtgaaatttgtaaagagcctaagctctgagtcctgggggatttgtctgaatgcaatttgggagacaatgaagaatcaggagctacatccaaacaggaatgacagaagctgcttttaggaagattgacctaacactgatttgggagaagtcacggggtacctaattatggtacttacaacgggaagagacaggaaagaggcaagagctaggaaattgttgccctccatcctcaggattgggtgtggtatttgtggggacgtcagagctacagagagaaagagccaggctgtaaggaagcaggggtccaggtggccataggtgtccagctggatgacactagtcatagtcacagactaggggaaggacactaagaggtgaagctccctctcacccagggaaactcatttttgaggtgctcacgctgagccagatcttgagaataagcaagccacttgcctcacaggtggtgttctctagtgaacttgctatttcccttcctgcagctctcttacagaggagcactccacagttaacaccctgcgcgaagaagaggcagaacatttatttcagtactttgcgctaatttggtctcatcaacttgtcttctgtctgcagacctcactgaaattcacctcaggctagctcatgttatgaataggcacggctgcaccacatcctcccaagccaagttcagactcattagcctgaggcagcacagcatgagtcagacagctcagttcacaccattggcacttaccagctatgtgatgtgaggggaacctcttgaactctctggaccctgatctttaaaataaggatgatgacaatgataatctctaccttgcaggggctgggtgagactcccacggctgtactcagcatgtgtaacaaagagcttagaggatgggggtgggctgttattactcaagggcatgaattgatactgcttccccataatcaccccatagccttcccctttttctatagaagagccttcctaggctctgtccaggggcagtaagtgatcttactactgcccctctgatctctggatacaatgaaactcagctacatactctcccagcaaaatatttttgttttatctcagcttgctttggaaaagaagaccaacattcagagatgagactacttgctctctagtgtttcaagagctgaggacagagtattgtagggagagaagaaaggagggagggagggaaggagggagggaggnnnnnnnnnnnnnnnnnnnngtgtgtttggctgcaggcaaaagagtcctggggtcactggcttcctctgcttcaccaccctagtagaatactgcccatattttctatcataaattgtgactgtaaccattatgtatacaagtgcctttattcaagtgaatagaatgcccactgtaggaaaagtcaggtgtttcccaaatagaaacaaaactcatcatattcaagaccatgcagttcagctccagaggtctccagcagcaagatatggggccaggggatcaggccatgtgatcttgaaccagtccttcaaggacccgtgtctttgtctgttaaaggaagctccctccttgttcttctgctacaaaagcagcttcccaaaaccaattcagcctgcgtgcaagtttgtgtaagagctgacccatcctgaaaacctgagttttacattaccttctccatggtttcaagaggcttggaaattagagctggtgtttttcatccaaagccacactgcagagtttctgtgagaataagtcctctttttagccaaactaaagctacttatttcaaaaggaataaatatttctttatggttttatttgagcagcagaagaaggctcctgttctccattatgtgtttgaaatctgtcttccagaacttaaggggtgtttgccatatgtttatccttacaaattcagtaagatgtaataggtctgtttgatggcatgtactgaacaggtgtgccttcctggcctaccaggaggtaattgacaccttaacttgatgtaatttggtcacaaaaatcatgcataaatatgaaagggcatgatataaagtccagcatactgccctaaattagctgcctaacttcagacatagcgcccaacatggcctgcctttcccttccttctcaaagaaacaggaaagcagccttgcctcactcttgagaagtcccaaactcatcatctaatctacgaggctctttggattgattgtcaccttacaaatgtatttttccctcaactttgccccattcaacaatcatttccaggacaaatcaggagctgttcgctccacattacccagaggcacatctccagcatttgggaaaagagctgaaaagacagctgtcccccaccaatcagggtggctgtggatggaagacagacagtaacaatgcttggtagcctctctgtcatacgacagaccaggagcaacactggatcctaagaggtagatacactgaggctcagcaaagctaagactaacctctgggaccaggactccctttttcaagggccatttccctatcctacactttgtaacactagacttgaaagacacatagtttccacttgattgctgatttagcctaaaatggtggtgttttctttgaatgaattctctttgaggaattgttgtttcatttttcccattatctgcttttttcaaataaatatcaccttagcttcccttcttatctttttaatgattccatttgtcgatgtaaacaaaactgtgtgggttaccttcctaccctcccacctggttagccaggcagagagccccttgctccatggaagccctcaagacttggcagctatgcttgtagaaaaggatgcgctctgacgctcaagggtgttccctgcagaggggaacccgatccctcatctcagttcacacaccaacgtgttctgagattcctgcagctgtatcggctctgtggttatggtacaggttggtccctgagcggttaggttaaaccatttctttttatttgaggtctggttggtaagcagaaatgactggttgtttgcctctctagggagaggggattagacttcatattagtcatcatttgaagaagaaaattggggactctgctaaaaagtgctgtgaagtctgactgtaaattatctcattactatttttctattgctttctatgtagcgaatgcgccattacttctctaattcatcttatctacatgtttttataaaagtaatgtcaaaaggccacatagtttagaggaaggaacaacactctagaatgagcaaaagttctgttttacagcatcatgaacctgttttctctggcagttagctcagatctctttttcccggggatgacagacaaacagggtgaggaccctgcttgaacagggtttggttattcgtcctttacctctgctttctcctagcctggacagcaactcttccagacaatgcccctcttcttccttggtcaagggaagaggaaagacaggcttttcagacaagcttcttcttctgcatatcagaagaagttcgtattcacataagaacaggccttagcctggacttccctggtttgtttgtctgctgttaggcctcatgcgaacctgaggggaaaggaaactgttgaaagttggatccatttctctttctcatttattttaattccaaaagaaattctttgtactcagtgcctaaaaaacacaagttgcaactttcaaaggaacatatgctttccctagcccatgttaaaggcaccatgccagtaaatgaggcccctcttctagctgatagagaccctggctccctagcacaacccttcccccacattcctctttgaccaggtgggaccctgcttctccatttcacaacaaccctgcagatgttccagaaccctctacccatgcagcaacattcctaccctttgtttcctgagcacccacagcttggttgggttaatgtcctaaactcagtctgaatggttgtactagggagccacatgcatgtaaagactggattctgccttccataaaattgttggatcatcaacctctaactcagacccaccaccccccactccacatctcattaccttgtcttcaatgacttcatagcataccccgactttccccaaatctccagtcctctgacttctcactctgaacaactgaacttgcctctgcctcacagagagtgcagaagatattgagtgggaactgctcccgtaaatctgtcaaacatcaaaaccaatcagcttctaccctttttcctttcttccttagtcaaccttccaactaaatcttctgaacataacttttaaatgcataagttctaactgcttaacaacgatgacatgattaaaaccctccggtgacttcacaacccctcacaggtcaccgtctcttcctggtcaaggcctcagaactttgatcttacagactattcttttgttctagctgctaaaactgctacctggctcccctctttcccagtgcagcttgtaggtacccaggggccaccgctttaccaaacaatgggttgcttactgcccgctctgttctgatctgtcttttagcagcagctgatactgttgattgttggtgccctcctcgttcttgtaaagttcttatccatgtcttccagctttgtactgtttggacatttcccaccaattttatggacaggcatttccaggctcatcttcctttgtaaaagtgtttgttcctttgtttgttttaagtacaatgtgtgtgtgtgtgtgtgtgtgtgtgtgtgtgtgtgtgtgtgtgtgtgtgtgtgtgtgtgttcagaagcatgtgtaccccattgcaccttacactgaacccagatcatcaaacctggtggcacacgcctttttgcactgagctatcccacagatggaagcttgcctttctttgtcctaaatgtcagaggcaactatgcttccttaaagattttcctttcttactactcaaggctctgtcttttccttctactcttggattaaaacattatggaaaccaaaatgacacttcaggtatcccgccaccaagctctgactctcagctgctctggcttggggcccatcacgcaggcgcatcacagccatttcccaagctgatctcaagagtcctcctccaagtccgatccatatccagtcttccatccaccctgttactgaaagagatgttccagagctttctgggtactctttctctcatctgactgttatacaagttgtcgtttgcccttgtcatcaggataaatacttcagagtgctgtaattatcattatctggctggcttttttcttttaaagaacaacacaatacttccaccccttcctgatgcactaaaacaagaaagtagtaagactggggaaattatgtaagtataaaagactatgcaggaccagacatgtttggcacaaaggaaaaaaatcacattccaggaaatattttgttgctgtggttgttgttgctgttattgctgttgttttttcagacagaaagctagtaataggtaccattcttgttgctccctaaatgttagagtcaccaaattacacagaaacaggcaaaggaccccaatctgcatcaagaatttcaaaaagccaacatggattactgtctcgccattgtgaatacatataccccttatatttggtggcattgtaacagatttttaatgttaatatcctgatcattaaatcttataaatgagatgtccacattggattttccaaaagatctatattgtggcctataaaagagacatttcttaatatatatgaaaatattatcctttgcttcaagcgaagagcactatacagcaagaataaatatttgcccccattctctttaagtcctgacggtttgtgtattagtaaagaaaacatattccttcacaaagccctaggagaatgaaaagagtttcaattgtttgggaaataaatggtacatttttgcaaataatctcttgtaccattattgaaagctcagtgtgcataggcactttcccaaataacatgcttccccctgccagtacacagagcacccttcagttaatgcagaccgtgactaattgtgacctgaacaacagatgacatcagagaaaacaagcataaattatcccaatatgaggtgtaagtggatctatccattgagggaagccaattttcatgatttttctccctgctgtcattttttgtaagtaatcactcatttaaatagtgtccaacacaaaagctggaatcataattattgcgggagttgtatgggtttgatgggtaagccatcctttcagccataacttgcaagcagagccagctattgatcactacccctttgagtggtggctgtcacccttcctaaagctgcacccctttaatacagttcctcgtgatgtggtgacccccaaccataatattattttcactgatacttcataactataagtttgctactgttatgaattataatgtgattgtttttagagagagccgtttgccaaaggggtctctgcccacattttgagagcctctggttaagatggactattgctcagatctctgctcatagacagaaagtccccgggccgtagaggcagcatgggttaaactcctccacacaccccacccccaggaagcaacaaacctcctcttacgttttaagtgtacagaaagcaaacaaaaaggcttccctttttaggtaaacgcctttgacaccaaaacagtgacagacaaatgacccaaaagccccaggtcccagcagaaggtctccttcatcatgaaggaacataactgggaaccccacagctgtctctagtattctgctactgcagccaacaccacatatgtcattggcttgaccaaggcccactcatggcagctcttgccaagctgtcgaaaattacttttgaccccctctcgagttacatgttggcagaacatcttcttctgagaacggacttacctcccacccttttgttcccatactttgctaggaaaagaaaagaattttaaaagactgcacacctgctcctggcagctccacctaaaagactttcatatttcctgccactcacatgctcatgtgcttgtgaccacacacagtcagtctcctgaaccaaggatgaaaacaagagaaaatatctataacttttcctcgtgttgtgtctatgggattcactacataggttaaaaagcctttgcctccacagctgggtgtctaaactgtccgtatcagtcattttggtgaattaaaaaaaaaaagattagaaaataggatagttgccgatttgagcactccaaagtcacagtgccgtggaccacagtggcatctcttgtaatattgcagtaatttttctgttgctaacatttgaggcgtatgttacctagcatctgaggagtgctttgacagcttgctcacagagaggtgagacgggaagagggagcaatcttctcaagaacaggcaaatatttccttgcgtctgtgtacacgcatgtgtggcctgccacttgactccacggcagacatgctatccctagcctgcatgattaaaaatagatctctcagtgggggtttttgcagctcattttcagccttatccgtcttttaaaatcaggtggtatcttatgacaaggtgtgtgtgtgtgtagttttttttttaagcattgctcacttttagcaatttgattgagttaatctcgcaaatgctggttgtgggcaatctggccttgaaggttgtcttagctgtggacattgatctcgttgcccaggggcactgactgtgtatcgaagatagtcaaatactggctcaggaagggtcagtcacgcacttggtaaacttccagctcagtggcttctggaccaggacctggttggatcagacacgccagcctttgttccaataatgggtctactcctccaaagggatccagctgaccgcatctgaaaggcttggcatatattataacaaagtattaacgatgagccacggaactgcagttgcatccatcatcgttgtctgcctcctcctaggtacaagcagagctgggtcccctacagaatgatgtcttatgacacacccttccctccagagacagacttcccaggatccaacacagctcagcttttagtgcccttcagttacatgtgtccctcttaaggagactgtgtttgttttatattcaaacgtgtggattgtttttgataagagaaaacgtataaactgggtagtcttcaggatctactgtattcctgtccatgtgagtacaagctgggagaaaaatcaggcaatgtataatctataacattaattcttataacaaatcacaattgtaaaggctctcaattcctgcagggcattgttttctgcacttgcctgtcagtgtgcttttggtaaatggataatttttcaatgtgttggagaaaggttcagaaattctttgtttaactctcaaatttgtatcctgtattaacccccttcacatctctttgcaaccattctgtagagctttccctatttggcactcaggaaagcaacatgtcagcttctgaagggtgtgtttagaatcatagataggaaatagcaattattccagtacctttcattctcccatcaaaatgtacattatacagtcgtggcctagaatgagccttctaccgttcctctgcaacccattctactgaattgattattacttctataaacttctagtgggttccccagacaacaggcatcagggactcccactccgatccaatctcaggtatgcatttccaagtctgaagttcacaggagctaagcatccctgagcccaactgctccaaagagcctgcacggcagaggctctaaagaacagtgggaaggatcctaattaaagaaaattgcttcccaatcataccaaattaatgctgccctgagacaccctcagagaaaagaatttattatatttactggaagtgccaaaaggtatttgggcagactgttcagccttaaggataatgagtgagtcagtcttcagaattttgttaaggatttcttcaagaactttcttagaatcaagagcccttttaagttttaattatgattcggctaccagtgcagaagtgcttaaattcagatgggtcttactgaataaaatatggctaagcgaataaagccattcgtcatggtgaccaacacctctcaatacattttcttcttcgagttcctcacactaacccatatattctctaaccttagagcaaatgaaaggaccctgctaagggtttcaagaccttaagagaatgctgagtgagtacagagagaccagagcagaaggccttttctgagtcagttgtgaatacagactgatgaatatagtagggaaggtaattagtgtgagctacatccaagaaagggtagggagtcaacgcccctcggcagcaggatccccgaagaaggtgaagaaaaccatgggaaacctaccagagacccagctggcacctctgtgagtctctccaagacttcactggctacagcatggctgaagagtataccatctggctttccattgagaaatcgcaagtgtctgaatacactctacaggcccactgtgtttggccatggcaggtgctccagaaatacctacttaatgtttaatctgcaagggatgaaaagagtccttccattccatgatagcagaaactccaaggtattccaaggaaagacttgctgtgttccaggttggtggtgggcattgtcttctgacggttattcattcttttactgatttgtttccttggcacttaacttctgtggtttggcctggttgtgtacagaatctggagcctagagccgtattaggttggtcaagcatgaaattatagtctgttagcagctggcaatgcacaagaatgaacaggagactaagcatgacccaacagtaccggggacttccaacatggatttccaagtcacttattattattctgtttacagtgtcactatgcaacaagtttccatattgtatcctctgtgcttttgaggtttcaactttgtaacaatctttgctttttaagcatgttggttaacaccctttggaagctatgattgtggctagcacagcccaccattcagaaagcatcatccttttgcagacgtgtttgtcacttccagagtgctagtaataattagaagaacccagtggattgagcaacagttgctaacaccaagcctgggaatgggactgagtgcaggcaggctcagatgcccactacacatttctaagtggtgtggcagtgtggtgctctggaagacttcgagaacgttagcgaaaaggagagtaattcattcacatgaaggagcaaagtgggtgtcagtgcaggtgaaggggtgtaaggtaaagagagacggagaaggaaaggattgccatccactgagtctgaagtgagcagcctgcaattcagagaaagcccccagacctagccctgagctctcacaggtgagcgagctggaagttacccttctttccttccagcctctcacttcacatgaagctgtgtaaatcacaattaattacccaggaaagggatgccagacaatgcatactagtagagaaggatgctggagggtccctctcccaggaccctcccacatcaggaggcagtgctaatgaggagactgtgagacagagtaaggtggaattccaggggactcacaaataattactagtgatgactgagagaaaaaaaacttcagttgtagcataagcaaagcaaaatactatgcctcgggctgtcagtccacagggggctttgtgtgagaggcagcaataagatttaaatatggcatctgaagggtcccagatttctcaacttcttcttgtctataattccccagcaaaccagcaaagctcggtagggaacagaagcagaggccgcctcgatcggcatgctgtccttcgggctgtagcacagacagtggtattcctttgtagagtgtctattttagaagcaggatcggaacccctggctcttcatttaacacctgtgggatctgagcaagctgtgttttcaaatccctggtttcaattattcaatataggagcagtgccccttcacagaggtacagtgtggagcaccagggctggatgcaccacccgtaattcactctcgtgatccctaggctgctctgggttgttttagcataaaaattgcccattcattcctattcttcctctgtccggtagctgctgtgggtataaacaagcacctctgagcccatggggtacagccagatatgtcgttattttaaacaaatcattataagatgtgtgtgcgtgcacaccaagatctgcacatttatttaagttgaggaggagttaatcagagtatagaattaaaccgagctgactggctaccatctttttcactcctcctccctctccttccctctcttcttcctccccctcatctctccctgggagtcacaaaggtgtttttaaatatagtcctaccctgtctgcttatcagtttgacacagaataacataaagacaaaatcaggcccaaactgatatcaatgattttctctttgtgccgcaagctttgtacaaatggaaacattgcagaaagcagaatgtagttttacttacaatgaaggatcttaaaatggacttaagcccagccaggctacatccataagactgacattgcaaccaatgtgaatgctttcttctttcttgaaactctccaggtctccagaaaaggaacctggtggtccagtgggagtaaagaagtggttctactaaacacacacacacacacacacacacacacacacacacacacacacatatactcatacacacacatatctatatacattcatacatacacacatacactcacacatacacacacttgtgcacacactcatacacacacacacactcatacatgtatacccatacatacatgtacatgcactcacatatacacatacactcacaccacacacatacacacatgtacacacagacatacactcattcatacataccaaaactcacatacactcacactcacatgagtgtatgttttaaaagggcctttgatttatcgcatattactttcatgagggaaaaaagccacttaattggtgtccaggggtccctcttttcttcatccaaccttaaggcaggccatctggaaacatgtgactttgcaccaagggccacagctagttgcatgctgatcctgactttcaaagctgctcctgtgctaaagagaaagcacaggtttcaagtgaaaatgatgtgagaggccaaggcctccataggctgaggctaccctccccattcagtagattccaagaaccttcctcaggttcacagagctgcctcttggggcctccaaggcagaaaggctccaggtgcccacgtacttgtttagagatcagctcacttgtcctacatctaaacactgggtttccggctgtctggaggaagggccaagaggtctgtattgtttaacctgtgccagggggattctgctataaaatctaccagaaagtccaggaaaaatccaagccctaaggaggtgccgtgacacgttcaggcatagcctgcctgacccaggagcttcatgagtgaccagatcagataaatcaacagttctcagccttcggggtcataactccgttgggggttaaatgaccttttcccagagtttgcatctcagatatcttgtatatcattttacacttagagttataattcataactatagcaaaattatgattgtgaagtagcaatgaaaataattttatggttggggtcactacaacatgaggcactgtattaaaggccacaacattggaaggttaaaaaccactgaagtaaatgaacaggcaaggggaggtttcctaaagcaggcttgctactgggggtgagctggttgttcacatttcttcaacccactgttccctgaacagcagtgacacagaacatcttttcctaagctccggagtctctcacataacttctgtgagtaagtgtctcacccagtcctttgaccattgtttcaggtgggttgtttgtttctgctgtctgttcatgagtgtttctatatgccctgaatattagactataatagctctatctatagtttgcaagtattttctcccatcctgtaggttgtttccccttgactgtttcctcaactgtaaagcttcatagtttgttatcacatacttggcttgtttccttttattattcctgatgtcaaatcaaaatgtaatttctaagcccaaaacaaggcttttctccttgttttgttcttttctatgagttttatactcttgggccttcatccactttcagtttgtttcctttacagtatgagataaggatccagcttcactgttttacatagccgtgctgtttttcaaagccatttgttggagaaactgaccttcccattctatgatcttggcacttcatggaagataatctgaccatgtacacaagattatttatatttctggtttttttaccccattgatctatttgtatgcccttatggcaattctacactgttttgatcactgtagctttgaaatgtgttttgaaataaggcagtatgaaggctctaccttttgtctttgttgtccatgtcttgattacatgacagctcctctgattccatctgataaaagaatttttggttttggttttggtttttctgagagtgctgttggcattttcatgagaatgttactacatttattagatcagcttgtaatgtggacagttccactttcacgatcctgtcttctgacacatggcagcaaggggtctttccagttacttctgtctgcattcattctggtcttggcccttccctgtgtttatttactaacatctttatccttttttaccatttcattaacagcactgagttcttaattacctttctttcttacttattgtcggtatatggtaagttaactcattcgtgcacattggttttgtatgctacaactttctgatctaatggttggttcaaatagtcttctgtaagatttttatttaagatcttcaatgtgtaaacagtgatcattttattacttcttttcaagatgaatcacttttctttcttcttgcttaattaatccagctaggacctccattgttactctgttcaatagaagtgacacaagtaaacaagcttgtcttaatcctgaaaacttgtttggctttacacatgaaattatgtgcaaagttttctaaaatgtatagccttctgtgctcttagcccagcctagtgaacctcttttatatagtttgtaattatacaaatctaaggatacctttttgagttagtgtgtgagttacagtgctgtggtgacctgaagagttttgaccgataaagaaaaggacttgggtcacttcctaagagagccattgttaccatgtcctttatctgtcaccattgcacatatgaatgctttaatccacgcaaacatcaagagtgtggaatcacaattcagcccactttgtagacaagaacactgaagtttgatgtcacaaagaaagtcaaggagaaaactggatggtgaagcaaaacctgtcagtctctggcatccatgctggctctcagtgagaaattctggatgtaggctggacctgggctagcctcttctctcccagagatatctattacttcttaggatgatggtgtcacaccacctttgctaaggatatttccccaaacctagtaaccaaggatattaatccagcaatcacatctttatgccaactgtctgctggctgtggtaaagggtctgcttatgggccacgacctcactcgagaaccaagtctgtgtggtctttgtggtatgtggtcatgtcactcttggcagacatgtatgggatcaagattgaatatccagatgattaaattaatacattcaactggttgacataactaaatatttgacccagagatttcccctgtccagggcagtccatctcacagcaactgtaacaaatgctttcttcagtaaagaactaatgagaagaagctggctctctgtggagatgggagggaagtgccgcttcttctctgctttcttttcttcctatagcatgtgctaaggtccgctcagccagtgtggaatcttggaaggaacccagctggaacggttgggttctcttccccatgacaattttagaagcagatgctaaggaaatgcatggagttttgtcaagagagtgaacaatagcaaatagactaaaggccccttgctagaatccattcctagggaatgatacgatctgatgactgaaggcagcagattcagagttcagtactccacactctgctgtgtgcctagtttccagcatccttcatcgatagccagccatgaagctcacaagctacaatcactcccttctcctggagcccaggctgcttggccttcagctctggtcaagaaccagcctgtggctttagacatgggatccatcttgggtgctgactatttgtgtagagagtccagatgtttcagaaagagtaagaacccagcatggacatgaatagtctagctaccaacaatgtcctgcttgtcggttctgatatctagacagacatggaggattattatttggttcgtaagtgacatcagcaaaacaaaccaaagtttgcaggaatctgtgaaagattaaacaaaatgaaggtgcatttgatgaggacattttcttttgagttacagtggacaggaatcacagtagggaaaaatcacctcccaggaccacagtattgtacacacaccaggaggaattgagaccaccagaaaacactggaaagcactttatgagcaacaatgatctagtctcaccctaaaagagatgctcatgtaattcatcattcttccaaagaattatgacagtcagttggcagttgcaattgccctgtgatcttgaacaagttaacttaatgtctccaggtctttggatacttcatcggtttactttgaataataagtacatgttcaaaggataaaggtgagacagtaataatcatatacttatatacagtatgcagtaataatatactataataatataacaataatatgcctatatacagtaataaccatatacctatatacagtatgcagtaatgaaatattatgataatataataatcatatacatatatacagtaataatcatatacctatatacaagtcagtcgacacatagagaaataagcaccaaaagccgttgtttggatattctctcagcattgccaaacccctcctcatcttcctcaacttgttctctcttatctatgagtctatattgaagaaggaaagattccactaagtacctacatagatacatgttttttgaagaaagactcacaaaaacagattgcaatgagtgaacacacagagccacctggtctagattttatttggattaaatgttaaagaattggcctggggcagagccctggtttggtgttttaaaaccatcctggtggtttcaatatgcacccaaactgagagccagtgacttaagccatcagctcccttcttactcatgagtctccctattgagtttcttctttaagatactgcttccagaatttccccagtcatcaaatctgaccttgacaccagcctgttgaaaacctcagattcctttgcctgtagcaaaaacgctaactggacttctcagtgagccacttccagtaagttggttgtggtttctgtacaattctgcagtgtacaggtagcctgagccaggcttgaaaggcccccatcaggagcccagattaaagaccaatgaggcctgcctctccagcatacagcacttgaacatggaccaaagaacctgcacagactgtctctgagccaaaagctatgacccccattaggttcttactgttccataaagcctgagacccatggctttataactgccagctccttgctagagtgaccttgccctttcttcttccaaaataacccctaagtctgactctaagactcaagctgaaatgtcaccaccaccactatcaccattcacccacccactcacctcttaccccccccaccaccaccaccaccaaagacctgcaactgtcctggatgtaatcagcctctgtctccatctccaagctgcaaagtatttttccttctaattgactgctgtgccatgtggtaatgtcccctagttcatatctgagtggccctcctagtccgctgaacaccgctgagagtgagtgatgagtggaggccttaggtgcgcatgctcatcctgattcttactcatcctggttcccagtgagtgactgacacatagaaggagttcagagagagcctgatgagtgacacgcagcgtctgtgggaccttctgccacccatctgctccgagaatctgggctccttctgagtcatgcagtgtagtgtgccagagaacctccatctggagagacctctccccacagcagccttcccttcccatcgttaggcctgtgttgtttcttattcaacaggaaataattgaatgctaggactgacgcaaaaataactcggaagctataaaaatcataaactgtctattagtaatattgcacaggatgctttcgggaagcgcagctcagcaccatgtgtttagcatccagggtctttgtgtgcatcatgtgggcgtgcctctctggctgtgtcaaggcagctagcagcccctctcttctgtgcagttcagtctcaaggcttgctagggggtcaaaatcagccatgtcttatgcatgtaaaggaaatgtactccatcatcccaaattagtaaatatatgcaggagaaaacctgaaaccctgggttctcactccacccacctgaacccccccccccgtattggactttatacaatacagaaggaattctggcccgaagaacagtttataagcacaactctgatattcacaaagagttaagcttttttttttcttgattcctggtgatttactcatttaagtcagtatcattgcagaacagaaactatttcagctctcggcataagtggaatatctaatagagaattacattataatgaaatatgcattaatgcaagctccatcaagtacttctcatgttctgtgggcatccaaaagtttaaaatgcatataatcttattttagttgctgttcaaatgatggtacattgggttaatatggttaattaaaaatcatattcgaagcattcagcagggtggttaattcactattgacatttactataacatagttatgcatgtagaaacaggacaatgggatatgccactgcagggtctggcaggatagaaggaggacattgtgtagtgttcacaatacagcaggtgcttgatgcgtgggaaaatgcagctaagcgtgccctaaaatattggccatcgataataagtttttggataaagagacactctcagaatgacatgcagtctgcttcctgtgtttagatgaagattggtaatcaggattgtttcctaaaccccctaaaccacattcagactccccatgggcacactgcttggagggtacatcagctgcccatcagccaatggtgagcactgtcctaaggcacaggctcaatgtgactgccattcttacaccattgttccttcacacctggccccgcccccatcatttatatcctccacccaaaccaaaacctgatgtggagctcagggccaggccagattgttcttcatcctaattttgccaccaacatctttcagtattttaaaggctttctcagggtctcctcttacctaacccctctcaaaaacctcaggtccaaacccagaaccagccagggtgaaccacagcagagaggtccaggagcatctgaattgagtatttggctgggcaagaaatgcatggtttgtgtcctcccaccaagggctttcaaccccaagctgagatgagaatttacagaccaaaaggggaaccataagatacaagggagggaaaacaatgggaactccctaagccagagaggccgagtccctcctccagaaccaggaacctgaggcaacaggaaacaccggatcaggcgagcctcccagtagacaactgtgagtcttactgcgaatggtagcataataccaacccccactacaccaccgacaactagatgaaacggtttaactgctttactgggcagtggtctccactttcatgtcagtaaggatcaaatggtaccaagatggggcattttcccaggcaaaccatacacctgtctcatgtgggcatcttctttctaagtggtgctacttactgtcctgtctgagcgtctcgttctttttcctatgtcccaatcaagtcctttactgatatgtctgccctaaccaaccttccccttttccccttcttctcctctctcgctcccttcaagagaccctgaatgagaggatctgaaaatagccccgacaggaaattcctcccgtccgccaagtacagcattggcttccatttgcttcaagcagggaagcagagcgtgagctctcggttccaccaggccttggaaatggctccctgataagttgtcttttgactctgtgatcttttccaaacaatgccactctcaaaggtcagcataagtggaaagttcaaggcccacagtgggtgaaaggtttaatgtccactaatgccttttgacctgatttttacatcaatggaacatattgaggcaaaatcaacagcagaatataaacaccgagactcacgggcagacaggcaaagaaaaacagtaccgtgcagaaaagtctgtgaggagattgggacttcagtcaaagtagtcaggatgaacatcctgaacatcttctagcagctaaagaaacacagacatctgtatgagcttctgtaacctggggaagttcaagaagttcccagtggtgctcaagagtgacagaaatgacatccttgtggggactggaggttctgatagcgcagagtgcattgacctgggctcccagcaccatgtggagctggatcaatgtgatgggaacaggagatgacccaggagggtcaggagcatccatccagacttcactgttatataggagcatggttagaatggcgaagacattcatatggctctgtaaggtaacctcttatacattcaggcccagtgcttaaaattgatctcccacccccaattcagacacatttgtgaggagtcccttttagagacccctccactaaataccaccacagtctaaacttaccatgagggagaccatgactgttcagaaaagaagccctcacttggatttatcattgccccttcgggggaccgtaggcttttttctttccatcctatcaagagcctctctcatgaactccaggtgaaattctacaatagcacattgctggttccctagtatactctcagaagacctccaagagccatgcgcacttgctttccagtggaatgaacctaaaagttcatattcttttaacgagtattctatactatgctgacagattcaaaggggtcattatcactgaggaaaaaaatatgtgttcaccatatgggtgattcctattcctatttgtaatccatgattagaagacaagagagtcttgtgaccatcaagtacacaaaggcataacaccccactggataaacgaatacttagtgcctactatgtgctggtgtatgaatgaaagatttagcccctattttcacccatctttcaggggaataatgtagtgggaggtcagattaacaagacgaatattatacaacgtgatcataattgatgtaacaggaaaggaggagctgggggccatgtgaaaggagatagtgagagaagggttttctgatagtgaggcgaaaaggcagagtctcctcaggaactgagagaacattctagacaaaaggcatggcttgtgcaaagactaggaggaacagcctaagcacgcttaagaaacagaaacctgactaaaatgtaggaaaaatcagtgagtgaggagggaagtgttaaggggaagccacaaggcagcttgtcccatgggtcacagtcaccttagtggagcttccattttaaatggagtacacaaccatcagggtttaaacatgggcctgatgtgctctgagtcacttctcttcagatctctctgtgctgtggagattggtgtatgaagccatttaggaaactgttgcactgatgtagataaaagatggaagctaccaggctagggaatccaggaatcgagacaccatggagctcttatagtagagttacaagacattacatatgcactagacatgggaaggggatgaaggcaaggggaagttagggctgactccccagggtcctgactcatacaaacctgtaagtgatggtattatgtactggtaggagggatgtagtgtgtgcatgcctgtgtgtatgagtgtgcgtgtgcgtgtgcatgtgcgtgtgtatgtgtgtgtgtgtgtgtgtgtgtgtgtgtgtgaatgtgtgtgtaagagagtgtgtgtgagtgtgtgtgagtgtgtgtgtgagcatgtgtgtgagtgtgtgtgtgtgtgtgtgtgtgtgtgtgtgtgtgtgtgtgtgtatgtgtgatggatacagttgactgtcagcttgactagatggagagatacctagaaaattcacaaagcatacctctgggtatgtcagtaatggggactagatcatgagggctctgatctagtgaatgataaaattagtttatgaattcaaactttgaatagaccactaggaggcaatgaaaccggaaaatgggtccttgctgggagaagtgagtcactgggggcatgccttcaaaggatcttgttggcctgcacatctgcctcaccactgaggtaatggagtgccattggcaggttgctcacagaaggcaggacacggtcccagcctgtgttcttccgggtgagaaacagcgagatctgggaccaatgctgtggttctcggtctacggtgtgcccggatgcctctgaggaccacggggagttgagaatgggactgggtctgcaagtctgagcctcccctgcgtaccagacagaaaggggatggctgagcctggcactgggtgaaatcggatttagtttcaggtgagtgatgagagtacacaggggctgaaagagagaaggccttctctgggagatttaggctcagctctttatgatgacgcaatcgtgggatgaccccccatagcgatccttgatgaaagagacagtccttccttgtccaaaatactttatttatggcaggtataaatgcacatgtcttacttcaggtgaaccagggataaaatacctttggaggggcagaatgcatgggaagggatgctcattggctaaacactcagtgcctatcaagatacctaatcagcatggaaaactccaggtctttatgctatgttgtaatggtcctctccatgaggtgtcatagttaagtgtgccaggacaggtagagcctgccagggaactggttccatgcctgctgttctcaattctgagattccctggagttttgaacctgcttcaacctggccagttcttctgtctggtggcacgctccacttgccccacagggtctgaactggccctggcccttcttgtttctctctttctctctctcaatctctcaatctctgtctctctctctctgcctctctctctctctctctccctctcttcccaccatcatcaggtgggtgagcagcttcctctaccacatgctccctgcactttaatgttagacctcacagtggcccaggaacaacagtcaaccaagcaagcacttactaaccactcagatactgagtcatggaccatgtactaagagttctgaactcctgggtcaaaataaacccttcctacctacagatgttttctctggtacattgttgtgatgataagaaacagactagggcacaggcacagaggacttgtctgtctgccttccttccttccttcctttgttacttttctttccactgtaaatgcaagagatcccttgtactggaaacatacttgaatggccatggctcaggaagacagatccaacatgcaatttcaacgtatatatactaagcttgaggttcgccaaaggtgattggtgagtagccatctggtagatctaggcaagcctggcctaaccctccaaacctctcccacctctttcccgatgcccagctgggctctggggctccagcgcagccttgtgcgtcaagacctctagcagctcatgcttcaaccatagcaggactgtcctcggcctggtatgtgactcagagcatagctggaaacaaagcatgtctgtgactagaccaggccagcctgtcacctcggagcactcccctacacctccccacacagatctcacttgttcgggaaggcttgtataatcctgatgccctcacctgtgtctcctcccagatgagcaggcactgcaggcccagtacagggaggggaataacagcaaagagaagtagcctcttacctactgacaaatatactaggaaggatgacaacacactgagggagtatgtaggaccatccaaataattgatggttgcataaccactttcttgtgtaaatggactagcaaggactaccataagcatgccccaagcatccatttgtaaaatatcagaaactcacagcatgtatgcattccaaatggaaccaagtgttggaaacaaagcaagaataactactttttatgactcccagagtgtgaagagcatgccaacactctaatttggtaggtcttcttcaaagctgtaggcatcctattttataaaagttaatatcctacaagtagttcttggaattaagaattcaaagaagcaaatgtacagatactttgaaccatggagggaaaagtggttcttttcctgcttatatctgtggaggaggaagatgaagaataggaggaagacatggaggaagaggagggggaagaagaggaggaagaggaagtcaaagaagaggaggaagaagagaagaataccaagccagcaataggatagatgaatggatgagcagacaggcagacagatagataacatacatacctgtgcagatgctaattataaatcgtttagttttagaaactgaggagtccccagataagtctcaggtagctggagccttggaaagctgatagtgtaagttcttgtctaagtccaagaccaaaggcaggaaaccagtatcaagctgtgacgtctggtagagaaattctttcttacccaaccttttggttctcttaaggtcttcaactagttgaatgagacctgcacacttaagggctggccatctgatttgctcagtctactagttcaaatattaatctcacccagaaatacctttacagataccccaccactaccacatgtgcacccagtgtgatgctggacaaaatatctaggcatccctgtagtccaaacaaactgatgcatataattaacatcaacactagtataaccattggaaaaggaaaaggagtcattagagattgaccaggatatgaggattgtggtctccctgctaaccaagggccacatgccccactctgcctagaagttagtagaggaatagcaagaagctgcttctcatggcccaccaggggtttaaagcaaggcttcctaacagaggtcttgggcccagtgcatcccaatgttaacagggtgaaagtcattgccacagagtagtacaatctgcctaaaagcacaaaaccactgaccttccgtcagtatccatttaaaaagactccttattcagaggatccctggctatatcactgcagctgattctttgggccttacttctcgcacagtcattagttgggagaagaaatatcctgaaatttaactggcatgtggaccacagtgcccagagcagatcctgagtctccttggaaacagagaacacaaaccagacaaagtgaaagcttaaagcttcaaaaggatggtcagcctgtgaaaagccagtgcccggggtataatagggaggtcttcaggtgggcagactggaaaactaacaaggtcagggatgccctggtacaaggagaaggcatggtggactccacacattaccctccctgtctctacacatctatcatcactagcaaatctgtggctgaaaacctgctgcttggctctgcagtggaagccacagtaaactgagcttcaagcaaatgagatggtgcttgccaccttgctctctatgggggctctgattaagctatacgatatcaggtattcgttttccagggtagctgtaacaaagtacccctagctaagaatgactgttgaggtttgatctgttgctatgcattgtgatgctaagggtgggcccaagacctggttgccccagaaagtctgcttgtagatccaagtgactctatgtgaccttgcccccaagttacttctgattggtgaataaagatgtctacatcctatagctgggcagaatagagataggcagggtttggtcttccagcctaggggtaggaggagaccacaagaaaaaaagagaggagaaaagatatgggttaggagtcaaaggagcatggctctaaaggctggccagttggagttaggagcagcccagataaataataacttagagttattggtagtaaagtagattctgatcgcatagagggtagacatctgtgattaaggcttattgtaaataataaaagtttagtgtcttttatctggaaactgtatgatcaaaggtgggatagaaaccccagtttggaattaaattttttttaaaacaaatgactttaattacaatttagtcctcacatccctgaaggatgcctgttgcaaatgaagatgttagtagtccatgtaccttccaccactagcttttggaatctcttcttgcctcttcaggcttgtggtggtggctggcatccttggcttatagtatcattcctgtctctgttttgtcctcttgtctgtgtttctatctccatatatacattgcctgctaattacatgcgcctcttcccctgacagatgagatgataggggagatcttatccaggcactagagagaggtaactacccccacccctgagagtcagcttctcttctaagagaactgactttcaaatcagggagttctgatcttcagagtgcttgacaaacccatgaaccccatcgtcaccctcatacccaggggtcactcactgcctactgcttgctgataggaaacaatgcactgtagcagttggccttgggtcctaggactccaggagacaatcaagaattccttggttctagattgcttcaagtggccacagctgctccattgaagactttgttgacgtgagtcagagaagatgccaccccgagaccaactgtgatagagttcctatggtctctacataccaggtccaggtctgagaagttatttaaatcttaacgtgtagtttttaaaagtagtatgagaagttgtaaaactgaaacgtagtctttgttgttccagattggttgtcggaacaaccatccatggtgagggcctgcaaagagatcagagaggaagagacagaatcaaatagagcaatgtcagacctcacaagtaaataaggaagtctgcagcactgctttctctaaaggaaagaaaatagacactcgtcgaatgggcagatggtccacatctgacaaactcggggaactttggtcccccaattttcattgttgcactccctggtgacctcacaacctcctgctattgggaacatcaggactgtgagtaagaaaatgttctagttaaggggaccctaagatatcaatcccaagagagaaaattggggccgagggggtagggtgtggaatacaacaggctcgtccttgactctccctaaagctggcaggtgcttacctgatttccttttgcctgtagtcaccagagggtctgtgttgggttgaatatatgagggagaatcatgtttccccattgaaagagaactgcagtagagattcatttgcacacgtgcaatggtggttaatggttatcaagtattgactacttcaggctgtgtttgtagtacatcgcccatatgaaagcccaactctagaataggaagtgaggtcaaatgtcatccttactacttagtacttggtacaggacaagtactgtacttaacccctcctggcctcaatgtgcttgtcctagaaataaagttacggctgcccttccctctgtggcttgagccctaattgcagaggttctagtacattatatcttctcatgcctttgctcttagcatcagctgtattctctcctcccactccttcccatggtagcccagaagaaccagttttcccctctgccctattttgggtccatgtcagagtttggacagttatgtactgtccagagtacagtactgttgtcaggtatccaccagaaaagactgctcagacatggatttaagttagtagaaagtctttaggagccatctggcaactacacttggtgtttaggaccccagtgtagcactgagccattctcggggtgagcttttaaaacacaaaagccatgctctgggatgacatacttcagttgaccagagtagttcacaagaagtggaattgcaggagccaaagagcaaggctagaacattttgagagtttcctggaactatatactttaatgtattaggcctttgctttagttttgacaggtggattgagtttttcagcctgaacggttcttctgtcgtggggtcaattatgctaaggtctgggagcctattaaggtctgaaggtccggttagtgtcttctacatacatacatgatgtgggcccagcaagatattctcatcatagaactgatatatcagtgtctacataaccttacatgcatgtccaccaggcagttcaccgcatacagaatagcctgctggtcactgttgcagcagtgctataacatggcagaggtcctcttaccaccagctttgttattagcacctctcctgacactgccagagattcccatcccgtgtctcttggttcagtgagcaaagaaattgaagtcctctgctgattttcctttttcttactgagatagaaacaaatttgagggcagagactgtgtcttggggatagttgttgtttttctcattggctggtgaagtctttgatatcctagacatattatacatgttggatctgtaaccacccaggcagaaatgaagatgttctaaagagacacttgtgtctctcaatctatcagactgttaaagcaatggactccaaagaaaggtgatttccccccagcaaagggcactggctgggaggaggaggactccccttagatggaggtggaaatttgtctcctggaaagagagttcatagaatcccagcaccttgtcagaccatcttacagtatgaggctgaaacccacatgctaatgggtcagtggtgggttcgaccacatcttaaccatatgcagagatgtgcatatcctgggccctctgtttaaactttgatctcacttcaggacaccaaaggtggacttggtggtggaggcaggggattcactgggtctctagccctcttcccaatgtggttacattgaatgatctcctttttctgctttcactgtttctttggttctttcaacttggcttattggagatggtttgctagacatggcttgagacccagcttgtgactcccatggttgataatagatctattgatagcatgaaataaacctggcaattcactctctccatataaccagcctttgggccttgagggtagtgggtggggtccaatggctaaagatctagggaatgtttttacctggatgagctcaacaacagggcctttcttcctcctgtcctacattcaggcattcaactctctccacccccaaccaccatcagcctgagctgcctcagccagtacacgctacccatctgctcagaaaacagtagataaaacacagagcccaggcaaggacacttctcaccagctaaagaccttcccaggccactacatctctccaaccagattggcctccagtttctctcctccttacagcagagggccacgagatggtgtttactgcaccattgcacaataatatacatttaaacactaccccagggcaacataaaacagagcgtctatttttaactctgtccaaatgggaatccttacaattaaagggagtttaaaaaaaaaaaaaagcaaaactgaagttggtacaaactaaaagtgtcactaaatttctttcacaaaaggacaagccatccctgggtctttgacttgtctatagttcctggcacatgagcctagcacatgagcctagcacatgatttttatgttaggagaattgcttggtggatactttcagttcctgttggggtgaggggaatacctggctagaaccagaccaggagtctcactttgtacaaagccacagtggggacagcagcagacctctgagctttgttttgcaatgccatgtggcaacctcacgagctccagaggcacagaggatgcactgtctgcccggatggagtccgtttccatgcgaggttttccccaccactggccttgtcaggaggagccagccatatctctgcaaagatctaattttagagaacagagcttgataatgtgcacccaatgtaacaggaataaagtgtgacttccattagttagatgaccagaagatggactacgccttggctttgctggggccctgcagctggagcattttaaatttcatttattcttgaaaattgattttctttattcgatttacctcctcatcaggctttctactaagactgccctattgtatagccgttaataaccacaggacactctgagatttccttgagtgtcacacctgggggttatttgtttctgagaattagactcttaactctaatgagaacattcaaaaacccaaacaggattttctgtttaacatcctaggcggggaagggctgagccctgcccactggccaacagctgctcactgtgcagtacagtgatggaccagttcgaagagtccctggaacagttctgaggttaatctcctagagtgtggctcttgcccaaagcaccgtgaggctgcctgggccacctctgtcacaagcgatatattttgcctcctgctttgcagacagagcttagcatttgctggagccaatttacagttctcacgccaagcatccagcagagaggaactgggctccggtgcatgtccatgacacagccccgaggagggtttgtccatggggagaactgtgttgaagatccttggtcatcagttggagaaactttttttttctttgggccattctggaatgattccgaatgatttgtttccatggagttttgttttaaattctgagttcatttgtagtgatacttgttaatcaattttaagtggaaacagctgctgtgtgtcactcccaccgcccccctgcaaaccctagaaaactataattcaaaccatcctctcccctctctcccagcccattcagcatgctcatttgtatggctctatggggtgggtttctaggcttttctcttgaatcagctctctgcacaatagcttggaaggatagggtatgcacggtgggaggaggtgtgtgcagggaggagcacgggaattcagcagacatctgatgagatgaaacagtgtgccacctcaacggcaaagaccaggatccgcaggaggtatccatgtttctttcctcattggtccagaatgcatttattaaaaagttactatgagcaagcaaacagctgcctgctgggttttgtagaagagaaaatgcagctttcaaggagctcacagcccagtgggggcagtaaagaaaaataaaataaaaataaaataaaaaacatagctcagtaaactaaatgagaaagctgcggtggccatgataaacaggcactcaatgagggggtcactgaactcctccgtcccagatacatcccgcatcctgcagagaggcagggatgaggagcatgtcagctccatgcttgctagatagcctggctcctctgcagatgggttctgtgtggtatagataggattgggtgcactgtgccttgtctatcgccatgttctatgtagctcggcctatgaatggtcagaccatttccaaagccagcatcagagccaacacagtctgccagcagtgctaggcagtgttctccaaaagccataagattagcagtgttcatttctctatcgctcacgtggacggtgatggtgtctcagtcaagtgggaagaatgcccagactatgctagaacagtggttctcaacctgttggtcacgacccccttggcaaacctctatctccaaaactatttacattttggttcatcacattagcaaaattacagttacagagagtagcaatgaaaataatttgatagttgggggggttcaccacaacatgaggaactgtattaaagggtcatacgttaggaagttgagagccactgttctaggaaggatgcaaaagggaaaacagagctcttgctgttttggccaaggagcatgaggaaatctcacggccggctgcctgtgatgagagaataaagaaaactgtctctgtggatgtggctttcagcctccaaactaccagagccctccatgcattttctgagttaaaggtactcatgaaactgttttcctgtggctacaggaaagaaaagaaaaagagcctggaagggaatttaatctgtgagatacagttcaccccatcatttgccctccttctgtgagtagctgtgtggctgagaacagctttagtaacagcaagatactgatggctgaacggctgaacccaagctccatttccacagccactgaagtagcagcagccaccactacctggaaagacccccttttggggacagtggtaggccttgtgaaagcccttggcaagctctgttgtctccagcaggagactaattccagcttttggtggttgttttcctaactcctggagtctgagtctatgtccagtagtaataaagtcttgctgacatccccaaaaaggaccgagttcactgttgcccagataatgagttcactgttgcctagacagtagtctgaaagaagatatttgaaaggaaaagaggggcgtgtctaaagtaaagcctgctctctagggtggaaggttgacaggaaaccccctgaatctgcaatgtaaggtggcggggttgtcataaggcacaagatgccatcttagtctgagcaaaggttagaggtgtgagggacaacattagtcctcaacaccatctgaaacagtgggcatctcttctgaaggaagagaaggttggaatcagacgacctttagggtagcttcaggaatgagctatctggggaaggcgcacaaaattgcttctcagtcagccatgtaaagcagggtaagtcttcatctgctagaaggaaggtggggtgatgaaagagctgacttccctgggatcctcttaccctgctggccagtgtggaaggctcacacttatgccttggtgggtcacagcaagccgatcaactacttaccagttctggaagagagtgtgagatggtcaggatggaggtttgagcaacaaccagccccttccatacatatgtccatgcttctgcaaacagcccctctcaggacaactgtctgaaggccacatctgttcttctcccagagttacccctgttccttttgacgcactattgtttcagtaatgcctttgaaactctccgccaccgacacaccggctcttgcccactaaacaatacaagtaggtcttactctgtacctctgacacaatgacagagcgattgattattttcctgagatgtttcaatcctctgtatctaagaaatcatgcaacggacaaaaatgtcataatccaggctttgttccttcatgaatagtggagcttcctgttttgtttctccttctaggagacaaatagaatatttctgcttgtcacaagtactaactcgtataaacttttacccattggagagagcatggtgtattttcaaaatattctctaagaccatgtctagaacattcttagacacactgagatatggaatgtcagtgttctctcacatttttcatgatatttaaggttggtgttcaggattcatgggggggggggggggacaaagtcatccagagcaacgagtagagcaaaaagaaccctcctaacgtatttcctgtcctcatggctgtccgcacaattggatggacatcctaaggaaatatgcagcgagcaggaactgtcctcataatttctcctttatgtcagtaggttgacattttgcctgcttctaatagaactgtacttgggcctaattctccgtgattgtccctttgttctcaaggtcaaaggtgtagtgcttgagaacagaaatgcccagcctgcccaagaggaagtctgcttttctctgggaactaagaaagactatcttatgacttaggaaagttaaattctcaggcaatacaaggaattttgaattggagtaagaagtcccaggtttagaccccacacctgccactttaactgtattcttgttattaagtcatcctttctggtgcttttctttccttatctctaaaaagtaagattgtacatacatttggaaacacaagatgatgtatgtgaaaggtcaaataaatggttaagtcctgccctgtcctatataacagtctgacatttaaatgcctgtggcattgacttcccacctagccataggagagggtcataaccaaccagggagaacaggcatgttggtttattaatgaaggccatttctgaccccatgccaaagtaatacgtcatttcactcccaagctgtggaaagtctctgtttggcttagatagaatgaaaatagcaatatcaaacttggaaagtcatgcttgtgtttgctttatggctctcggagtcttctctgcctttgctttctgggatggtcttctcttcattgctgattgcaaactctcctcagtgggagggaggtgcttacctctaaggaggtcacaaagctcagaaagacagcttcagttagtatacagtgggccttctctttagggagtgttggtgatcaaacctaggagctctcctgagctaggcaagcactcctctcggcagctacatagagccccagccatttttaatgtatttatttttaaaatagtgtctcactaactgccctgactagccacagatttactctgtaacccaggtaggccttgaatttgtatcatcttccagaagagcgggaattaccaatctgaaccaccaggtccaacttcaacttgctcttaaggaaaagactacctgggaactggaaaaatagctcaatggttaagaacactggctgctcttccagaggaccagaggtcagttcccagcttccacggggcagctctcaactgtctgtaactccagttccagaggatccagatgccctcttctggtctctttgggtaccaggcacatctatggtacacagacattaatgcagggaaaaataccagcacacatgaaataaaaaccgttcaaaagcaaagttcacttcaggtagatggaagaaagagcccattttaatctgtgctgagctagatggcaaagggctctctggaaatccaactgtttacagttattcccttttacaaccttgacctttctcagaattcatttcctggtatctaaaagaagaagcctaaggacatcccacatccttccagataaacaatccggtttgactcaacgacaatcttagcactggatgattagaggcccagaagatgtttgctagaacttaaatatgattttctacatatgaaggttacaactctgtgggcttgacattgtttatacagtcaagtgaggatgtgggagtccccggggcacagactcttctgaatgccccaactctcatcaccaccctctctgcacaccatggcacagtgcccctactattctgaggctcgctagcataggttccatctaactacacgttcttcaaagctcacacaaaactgtccacacagagagtgtccattatgccatgagagcgaacaagaagctgaagatattcacctcccaactcagtgcaaattcagattctaaatcgggatttaaaaaaaaaatgttagatgatctggttttgttttacaaaggccaaaccacccccacccccacccccgcagttcactcctttactctgagcctctcagagctcgtgttggcttgaaaccaattgtaaatccatagcagcctttgagaaagattaccccgcagccccatgaaaagctaagaaagcagccactggaatagttcctgctttacgacctcactcatggtcccacgctggcccttctaatcatcgtgcctcagagtttgagcacttgtgcttccttacaaagctggacatcttgttctgaagacctgctgacctgaatcctgccagcaaggtctccatgacaggaggagggtggcacccagctcagaagagaccaagcctcaaaaactaagaaaacaaaacaaaacaaaacatcaacaacaacaaaaccaaagcaccatgttgttccccaggaatgagcatgcatttggccccgagccagttcatgttcaaagtgaaacttttaatttcttctttaaaataaagtcataaaaactgcctttaaagtgagccagacccgttgcaccaccaaggctcattttgtgagcacacaggacccagggagcagccaggctttccccttaactccttacccctgagaagagctccaaactttccaggcagggacaagacgccccacggagaggcctgggaggaacccaggactgaaaacattccttcttctaacctttttctttgaagggaatgactagatggcccgaaataccacttacatagagattcaggaagggctcctttagtacagacagtatccatttactcaactgagaacgtgagaaaggacctggaaagcctccactctcctagctgaatgtaaaccaactacagaaaaaccagggagcccaggcggtgctgggtatccacatttgtcgggtatccaggctctgagaaaacaagaataatctggttttaaaagaatcataaagagagccaaaataacaagcaacaatttggtcttgcttttttttttccttttctatttagtcttatgaaaaaattattgcagacagaataattacaaagtgcaatcatagatgaaaacacccctgatgtcgccttagtctattaaaaaaatataatgtaacgctgtggaggactaacttggattccccccatcacaccacatggccccctgagccctgcaaccttcccaagctaagcctccagctactcatggatgaagtgagtaaccttcggaggaattttagagataatctaagagcccttcgtgtgtgtgtgtgtgtgtgtgtgtgtgtgtgtgtgtgttcaaaaggtagaaacttctttatgggaacggatcttgaaatccaaagagagtctctgcaaggctacggagggtgaaagcactcgagaagcatattccagccctgctcatgtgtatacgtgtcacgtagccaaccaagacaggtctggagctggtaagctttttggagatttctgtaatccctatgggacacacagcgggaaactctgatcctagaggagctggagtgacttctggaaggccatccagttgagtcagtcagtgttaagattaagattcaggccaggcaagctggggtagtgaagctggacaccagggaagcaatcacactacatgcatggcatttacctgggccgtgcgtgggctcagtgcagttaatgttgggggctgtttaacccccacaagcctggttctcgatcttatcatctccagggccgggttgacagacacaagaccgtagtcaccaaggtctccactcaggtccgtgtacttggtttaaagttccacacaactactggtttgaaatagtggttgtttttaaacatttctattctgcattgattcccggaaaattaagtagagagtcctcattatttccattttacagatgtgtaaacaaagacttgagtaaattcaattgttcttggcctcgggcccctttccaagattagtctgcaaacatcacaccaagaggaagcaggagcagacagtgctgagccaagggggaagctatgtgggtggcatgatttcagagccctttgggactcccctgctaatgatgatccatcccaagtcattgctctgcggtcatgtggccaaacagcattctcacacatcccagtttatcacagactaattatttctctgtgggttgagttacttattttactgatggatcccaggtaatgctttccagaaatatcccagaccttaactgttcagccattctgtgcctgatgggccacgggttataatctccaaagatgagtctcgcctaggtaacaaactcaagcgcctgatccagacacacagctgcctgagtatctttgtaaggctgagagcccggccaatgaacacagaggtatcagttagcttgggaactagccagctgtgggccatatccagcgaccagagccagactgtcaacagtctggaatgctcagagcagcagaatggaccagaacctatgtgcagcctcaggagatctgtagcttgcctactctgtgacccagccaaatcatttccctttactaagtccacattttgctgtttggaaattagggaagtagtatgaaacttgtaagtgagtgtgaaggtcaaagagcaggtatagagtgcacagttcactgcggccacatggaagggcttcaacttatgtttattcaactctttaaatatttccagagctctgagctgggctctgcaccagaggctgagatacgtctggcatctacagactaaaccagtaacatactcataaatgtttaaaaatcagttatctggagaaaaaaaataaagatgactttatggcatatgccagtttgcatggtataattactgcccctgtggtgccatctgtcactggatacagaactaggaggagatgtccattaccttactctgtggatcctacaccagctgaccaccgagaacagacagactctggtaccatggcggagaacaaatcagtcaaccaggacagagtgggaaggccttccctaaaaagacagagttccaccagacttggcaaatgtctgggtataaacaggacaaggaagcagcaggtatatgggccatcccaagtcattgctctgcggtcctgaagggacggagaatgaaagcaaagctgagaagaacccagaacaggaagagacagggctgagaaaaatcagagagcagaagaaccccccacccccacccccggcagcggttggcaagttccagtgctggattctgcgcagaggactccatggcacttgtgctatggtttagatcgtcattctggctgcactgtggcaaatgcatactgtactggctagttttgtgtcaacttgacacagctggagttaccacagagaaaggagcttcagttgaggaaatgcctccatgagatccaactgtaaggcattttctcaattagtgaccaagggggaaaggccccttgtgggtgggaccatctctgggctggcagtcttggttctataagagaacaggctgagcaagccaggtgaggcaagccagtaaagaacatccctccatggcctctgcatcagctcctgctccctgacctgcttgagttccagtcctgacttcctttggtgatgaacagcagcatggaagtgtaagctgaataaaccctttcctccccaacttgcttcttggtcatgatgtttgtgcaggaatacaaaccctgactaagacacatactgatggctaatgcaaagggtaggcagggatagcaggtcatgtgatagaccaggcagaagaggttggtgacctgggctgggtttttataatcagtcgtcccctgaggctcccagcaacccccaagggtaatcaaatcaagaaatcataaatgctcaaatcccttacataacatgacacagtatttgctgagaacctatacacatctttctgaatgttgtattttatttacttaattttgcagtgctagggatggaacctaaagtcttgtccatgccagcatctaactcctgtgtgttgtacatcatctctagagtactgacaaatcccaatgctatgggactacctcgtagacagttatttcacaatgtattcttttgagaatatgacaaggacaaactgtatacgtgtatcataccatattctttccaatactttcggtctatggcttgttgaatccacagatacagaacccttggatatgcaagatatagttgtatatttgttaaacaggcattcactgactttggccaggcacctatcattatgctaggctctggtagctcaccaaagagagcaccaccatagccttcgtgagactcacaggcaagtagaaacgtcctcaaagccataagaatggctagatctttggagctcatgacatgaccatcacagcacagcactcaatgtttggcaggcactgttcctttataaatcttacatacttatgggggtagatgcaagagtttcccttgctggagatatttagtatggatctgataggactgcagtttaggtgcctagagtctggccagggttttagctgtcatcttcagggtgaacctgtcggggctagaagggaaggggatgctgaaaaaggagcttgggccttctgaggaactcctagccttctgttaataaggcccaggttgcttgtcagtggccacacctcagctcctctgcctctgtaatgatgcctccgtggcgcacaacagtcttggtccaggaagcagccacagaggttgggccacggaaaagcagaagaacgctctctatgtttgctcaactcgaacttctaaaacacatttctgaaggaatctatcttacgattttgcagaccaaccacaataggactaaggggaggatcacaatcctattaagctgccaattagaatatcatacacacacacacacacaaagatgttaaccactattttgtcctattccgcaataaatctgacacatttctccaacatcacaatctaaataagaagctatagagaaagacctgtgaccatgtctcactgtcggccagaccctagccgctcatacacttcttatcttcagccagttcttttttttatgaggtgacgggcagttagttttgatcgtgagctttaaagtgaaatgacctcggctagctgcagctgtcatttttcctcaagagtttccttgagaccagtccacactcaaatattcctatttgtgtagatggcctctttccagggatttctctccctagcaatgtatttcccctcagccacccatcatagcacacaaagacccgactggatatgactttgtgtgaaagataaacccctgatttctttattttaaggtcagacagaaacagttcaagccttcaagtctaggtttccggccatttatgagctgtgcagctctaagaattacccactttctcggggcctgtttctcaagtgaaaatggttatgtcctcactttctgtggttgtcaagaaagtggaatgagaaaagacataaagcagtcaatactaagacatgaactgcttccgtgaacagaaagaacacagcagcagtctactaaagtgattgtaactctgggagaggggctggagagatggggacaacctaccagaacatggggagatgtagccatagacatggctagtagcacttccccaaaaaaatctgtttccagccctctcttccccagcccatccaaacccctcacttccattggcattttggattctcagggaataatgatagaaagggaggttctatgccctgccactccttgagtaaattaaaaggaagtctgtttcttagtactagtaattagtagtaattctgacatcttgttccccatcagatatcaaaatagaaatatattctcctaagctacgatccacagacgcaagtcagttggctgttgtgaagttgcgtgcagagtaaacagtggccaggaagcagtgccagaccaccaaagactgtgtggggcctggcttggagaactggctgtgggagccttcctcccaggactatcaggaggagggtgcacctctggaacgatctgtggaagtcctcccccatgctctaggacttccgtttcaatcatttcctagaaggaaggaggggtgttaaatcagactttcaaagtgttattaatagaaggcaaattcttaatgtccaggggaacagtttgggaagagtcactattcacagtatctttctagagagaaacttcaaggagatctagccttatcagcagagatgataataagttatcggcttctttaaagttagatcttgggtatcgcattaatgagtcaaacttggctggacttctatcagatctgagaacttcaaaccgagttcctcccagcctcagagccaggatgaagggaaggctgagaggggtatatatgtcctccttcctccagtgtctctctggaaagctacagaggtaggggctctggcttttctctgagtgctatgtcagccttgggaaccgtctgccagctcctccagcgttcaccactgctggagtctaaggaaggcatgtccacacagagccatcaagccatgcacttcctggtagctcagccagtgaatctccaggaggtgatggccacagtgtggatttttcccatctctcttttccccaaggccatctctaggttaaccttacttagagaagagccaggggaatgtcctttctctgtagttaagcctgctataaagtcaagtggaaggacagacaaagtgctgtctgtagcggggcttactcacacgccatcccagctggtgactaagaattgactaagaaaatgaccgtttcccacaaagccccaagccttctcttctcttcccccacctcatccagcagaaatgttgtctggaattttatgtcagacaacagccaacggggcatttgggtttcactttctaaatagtaacatgatcacctgttgagagttggaggaaagggagatgcttacgccatcacatctttaaaggaccaagggtaatatctgtgcctccccgatcctggtcctttctggctttagcagtggaggagaaaagctgccagctctctaggaaaatcttgcaaagtcacctagagctgaagtgtgggtgaaacacctagttgagcttggtaaaatacagtccagttctgggccaaccgctgggaccaggtcacttacaaatgtctcattgaggcctaattctctcctagtttaaaaaaaaaaaaaaactctcactttcctggaatgacatttctcacaggcacacttgactctgtcttatctctgtgtgaaaccaagagctgggacccctcttatctcttgttaccttgtccccacacttaacccccaacaccttggacaaacatgctctccagtactgaaaaccacccttttctcacccctgcttttgttcaagcctctgggaagatctctccctcaggcagccttcctccaaaatgcatgcctggagcagggagcatctgcgctgcttcccagggccttcccgaggctctttggtaactcacttcagatattgatttctgtgagaaactttcctgaactttccgctgttgctccacatcccgcccagaacacaggagatcttcttccgagatatttgattgtctcattttctcacctgaaccttctccacatcatctgcccaggagccagtgagttcccttccctaatttatacaagagctatttgtaaactagctgtggccttggaagagtgaggatctgcaggacaggaagaaggcttgaggccatatttggaagggaaatacaagaggtccagttgtgtctctgttggggggaggggcaggatgtggtgggtgggaaggctgccaaagaaactatcggtggtattagaagaggatgtctgctgcttagctgaggtggatttgtcatgcgggagagactctgctgcttggcgaggatacttgaagatgaggaggattgtgcaatttgaaaacttccaggtccagaaaccgtgagatttccgaccattcacctatattggttctgccctgctcaggcccaagtccttgaacaaacatgtcctccctcctgaaagctccctggcccttctccctggctgttcccgtcatctgtctccttcttttagttccccatcactgcccctactgtcttctcacctgtggttttactctccccacccccacccgactgacctcctcacttcactcaagatgatgggctccaagtccttcctgcctctcccttgcagggctctcccagatctgtgcttcatcctccttgccgcttattgacagcagtgccacatgttcaccctcgtccttcctttgatggccttcccactctgttttctagcatccttcatctcctgggcaatgcctcatcttacatctttctactgctccattcattcattcattcattcattcattcattgctccagcaagcatttctttctaaattttattggaggttagaggacaggcttgctgcagtcagctctctccttctaccacaagggtctcaaagattgagctcgggtcatcaggttggtggctaacacctttaccttctgagccatttcactggccctgagaagcattccttaagttccttcttgatgaattctggcagtatgcaccatctttctgaatgaaagatgcatgccccacccacttttgcaaagccatggtgcaatacgtcagtccttaaagccccacactcccgaattcctagctctaaccactgtcttagggttttactgctgtgaaaagacaccatgaccacagtaactcttataaaagaaaacatttcattaggactggcttgcagttcaaagtttagtctattatcatcatggtggaaaacatggtggtatgcagacagacatggtgctgaagaaggagctgagagttctacatctagatccacggataacagaaggaaactggcagccactctgggtggggcttgagcctttcccaacctgtgggttacgacccattcacaggggtcacctaagaccaccagaaagcagatatttgcgttaagatccataacagtagcaaaattacagttgtaaagtagcaacaaaaatgattttatggttgcagggggtcaccacaaaatgaggaagtgttaatgagttgcagcattagaaaaggctgagagccactgctctaaaccatgctcctgccaccggatagctctgatttccagacacaccacctggctccatctactgaacctctttgtcctgtgactcccacttttccactggaagaccaaacagcagacgaaccctgccattttttaaaagtcattcctggcctctggctgattctctgcatctcctggtgcatttatcctaaactctgcaagagaagaacaggagacgtttggcaccattaaagagggctccagtttaacctgcaactgattctcaagagtcatagactctgtgttattgtacctaaccacaggattcagtcagcaaggtgtgtttgaagctgcatctaatgatgtgtctgtcctgagatcactttacgggattagccaaattttgtgaatgacaaaatacagaaacataaacataggagagtcccccaaggtcatactgaagtcagtggtgaagagggctagggagctttttttcttaggcccattcttagctactggacaacagagagtatcccccatagcagctattaaataggattttgcctatgaagtagggttttttttttaagttcttatttggccatatttcagtgcagatctcatatgggccaagggtccctctcaagggaaattaattactataagcctttacaagatgagttgccgtctccctgtgtttaccaagttctagtttacgctttagtgtgtgtttcccaaacttgcttcaggaagcatttaaaggacagtgatgctcaggcctgaatcagagtccttggggacaaagctcaattgttattcactttagatccaggatgcagccaacttagagtggtggtcctcagtcttgagatgcttggaagcctttaggtggctgcacctgtgaggcatggtcctatcccaagacactgcaatctaaccagcagggagtgtggctaggacttgtgaataggctcccacccagggaattcgaataaacacctccttctagaatcactgcccaaagccttgcaactcagagtttagttctatggatcaggagcctggagccaagagatgcatagaaccctaagccccacagacctgtggactcagatctgcatttgaacaaaatcttccggtaatttgaatgcattgaaagcactttccagaggacctatttttacactgaagaggcttttagaggataatcatcctccaattagacacaggataggcacaaaatgaacagaagaattttagaatgacaataattacagctaatgaataatatacacactgaggaaccgtcttgcattatttaatttaatgttcatcatgaccctgggtataggtataagctctgggcccatttcatacctaaacaaaccgaggctcagacctaggtaaacaacaaaaagaccacccagatagtcaggtcatcatcacctgactatcttaaaggctccaggagtctggatgtggaggggtcacttgcttagtcactgcatcagccctgcctgtcagacatctgagagggttacagttgtgacctctcaatatccagcagagcagacgtgactaaactagcaaattctaccttaaacttttgcaacatcatcctttctacccatcgctcagcagagaggaagttgtgtcccctggggttaaattcccacgtaaggtcacccaactccttaaaaactagggtaagcacagagtgcaggagtctcgctgcttgtaggcagtggtctgtgcctgtcctccaaccgacagagtcttctcatcagggaacttgtacggagaaggttccccaccacacccataagcctctgagtggttctaacagagttccttctgagaatggcgagatgctctgggagcccagcctgagagccagccctgagcaccctggcagcagaaaacccctgtctcaggcttcagcatctccgcaaagagaggtctcttaaggggcttagctttaaactaagctgaaatttacatgctgctttaatcttcttagggccttgtttgccccttgggggaaaaaccataatggtttagaattgaaagaatgagtggtggctagcagatggaatatgaaatgctctttctgtgttttaacccactttccgctgaggctataaagagatgaacatcacccagaggaaggaagactggcattcatgagcaggagctctgtgctgggcttcaggagcacagatgggtcagtgtgcgactgtcatcccatttaacactgtccgaggaaactgagattagagacaggacaccttgcagatgatcataaagcagcaatgatggcctcagggtttgtcttatcccctgagctcctttgttcttaaccatccaggaccagggagagagagaggctggacatactcggatgctgcccgggctctaggacaacagcactgtctctatcatgcagaggtcaccgttgaaccttcagtaatgcctacacagttagcaggaccattaccatgttcataagaatatgttcagagccgggcgtggtggcccacgcctttaatcccagcacttgagaggcagggggaaggcagatttctgagtttgaggccaacctggtctacagagtgagttccagacagccagggctacacagagaaaccctgtctcaggaaaacaaaaacaaaacaaacaaaaaaaagaatatactcagagcacactgtcatttcaaagttcttaccgcaattagttaatcaatttccagaagttgttcatctctgctgagcattattgactactacagggccttaaagtagaacaatagagagatgcttcgtgccaaaagagtagggcctttgttctcaagaggggaggggccatgggcagagaggtagacataggtggcaagagcatttgcacatttctgcacatttgttctatttagttttatgttatcacataattacagggaggctggaaatggtccgaaagcacaacagaagacagtactggagatagaatggaagaggggcaggtaaagttaaaggtggagttcttagaaatgggttggaaagtttacaacttcatcatcaggtatagcatcctctgagacttggaggtagggaaaagacttctttttaaatgagtgacttggagatatttaatgtctactgagtttatttagttttctcttaaccaaccattatcccacataaccaagagtaacctgagcttcatgggggttaatgggctagctcttggtcctagaatagattgtcatcaaacccatcttggtgggttcttgaaaaacaagtgtctcgtagcttttgtaccttctctgccctctgtgtctgccctctgtgtcaagaaagccctcaacatgcctagaaggcgtggcaggtagtgcaaatgaaagaggcttccagatctgaagactggaagaagcaagactatgggctcatttgcctttcaggatggggagacaataaaacgttgtggggaccatctcagaaaggagagctgcagacaattctaactcatcagctgtcacctgaatctaattctgtcacacaagtggctccaatgggtatccatcagtgcctccattatatagacagaaaaaatcatgtcataaataccagtctacaatataatattaatcttcctgcaaaggatacttttgacataacagttgtattattaaatgggcatatgtagaaagaatatgtatgttgacatattgcatttgaattccaggtctgctaggtgggagatgtgtaacctctctgagcatatacaaaatggggacacttacatgtgagttagagttgagataagatttaaatgaggaaatgagtgatcagacattattgtacatcagacctatcagaaggagttgtgaagccttggcagtttcttctcttcctgctgcccctcagccatccctactctgtgaatcgcttggtttcagcattttggccacctgtttggaatccagtggatttgctcctggagtcagtgtggaatagaaaagtgtggcttctaatttgacctgcagatcaatcttctactacatttcttggccggctggttgaacactttctgggtacctggtcaagcagtggaatcatgaaacaaggttgtgagccccaaaaccagtcacatgtgtcatgtgtcaccaatccctggggtcctgggaggcagaggcagtaagattaggagagcaaagtcatccgcagagctagtgccaggctagactgagctacatgaataactgtcttagaaggagagagagtgggtggagggaaggaaagagaaagcaaggcagaagaccctgagctttgccctgcaatcaggattttcttagtctaacgcagagaaagcaaaggctcccaaatcgctcctcatcatgtctctggtgtacgaatttagagtattctttcctactgtaaacgccaacatctgggagaaccagtgggcaatttgggcttagttttgcttagttttatttgagactaagcgaatcccaaagcaatgaaaaatcaatcccgtatttggccagatagacattattgagacacctggattaaatggaacataaataatagtccattgatttttttttttacccaacttgttgtaatttagtttacaagaaacagaataattctcagcactccaagcctgtcatgggtctgagcatgcccatgagcacctgtaagaatccctggagcctcacccatcatcatatctgctctattgctcttataaacatggacaagactagggacttatgcattctccttgtccagtttttcatacctgcccttagtcagaagctccattttaacaatgaaagttccccacaatcacttcaagacattgacttttgcaaaagctatgacaaaaacttgaggacccttccgttaagatacaatcatgatgattaaaccaatttctgacttggagactagcccacacctgggttattattcaagaattatttaagactttccaattctttctgggccaaatgaggctcagatacgctgctgtgattggcaggtacatacttgaactcatagacgccagtctccattgtcaattagatcctttcccacaatgcacctctgctccgtaagcctcagtcctcaggtgggttgcagtttgaaggtcctcccttccagaggcaggagatcctgagggctgttagaggggaaatgtcaattatggccagagtgagcaccactaatatcctagatagcataaactggtcttccatctccaatctctacctaaagcatctgttcctgtcagttactcaggtaaagtgtatttgcatagctacctttatgtacatagagttgatctagggaggagggataaagtactaaaataataggtgtgtggaatctgtaaagatgcacagctcactgctaagtgacgcttggaccactgcatacaagtaggtcatcgacagtcaccacaaaccagaggctgctcccctggcagaaagcattaacctgcagaaggaatcttggcagcaggtgatgcatttcagccaggcaggtgtatattttatttatgaactggtagaagtgtgcagatacatgagaagaggaatgtatagaaaatgcatccttaaacacactccactgtgaagacagatggggaaaagttgaagacctgtgcattttctaatttaccatgccaccaccaaagagaaggggaacctcatgctaaaactctggggtcctgattccttctcttttgtcccccagcaggggaaatattaacacaccaggatcctggttcagttaagacaatctatgcttcagccagaagtaccctggctggaggcacaggatgataaaaggtctcgcatgtgcacttgacccaaaatcataagggtcttgtagtttggaagatgtatcagaggggacaaatttatcttcatagtgtctattaggtatgagcccatcttacacagggtacatgccagagacatagaaaaagagtctaagaagtgaccttcaaaatcaccaagcccatatacctagttttacagctccaggatattcctaaccacagggtcagttcagtggacacagaagagcaggggaccttggtgtggtcaagaacatggcaggttctgctgaaagtgggctacgttagattcgggtctcagatatatgaaccgaggaacatttcctaaatgttctgactcttgcttcgctcatttgaacattggctacaataccataagttcacaaactattttctgcaaagttaatgtgtttcatgatacattttcatggtaagtctgacaagaactgagctaatttggaggcaaaagctccgtaaagtaagaggaagctgaatgttacctctccctatccctcggcagccaagggccaagctcacaggagctcactacagaattacactgtgacatttcctggctcttttctgtcccattttaaactagaaaggagacatcagaataggagaagatacctggtccagtgacgaatccctatcttcctaacatttggggagggtgagacaagagaattgccacaaggtcccaagtcaatctgggcctgagagtgaattccaggatagtttaggctacacatcaagaagaaggaggaagaagagaaggtattcccctggaatcttaggagaatcccattattctataacacagaatttaaagaatgccatttcaaaagaaaacaattaagtggcccttcaacaaacccataagccacgttttgctcagtgagtgctggattctaactgccatagccaagaccatccctacacattgggacagtgataatcagagtatgcagtgggccctgctcagaataagactaccacctagtcctctgccactcagtagttttccttgaaggtcgggatggttttatccactaggaaccatctgaggcaagtgcccatggctacagccaagtctcatcagtgtggcactttggtgtcagagactgacagctgaagggctataggagtagacactgggatgctaagatgacaaaaagctgggtttggtggttgtttatgggatggatccccaggtggggcagtttctggatgatcataccttcagtctctgctccgaactttgtctctgtaactccttccatgggtattttgttcccccttctaagaagtaacggagtatccacactttggtatttcttcttcttgagtttcatatgttttgaaaattgtatcttgggtattctgagctgctgggctaatatccactaatcggtgagtacatatcatgtgtgttcttttgtgatcgggttacctcactcaagatgatatcctccagatccatccacttgtctaagaatttcatgaattcattgtttttaatagctgtgtagtactccattgtgtaaatgtgccacattttctgtatccattcttcagttgagggacatctggattctttacagctcctgactattatttataaataaggttgctatgaacatagtggagcactattgcagatgccagcaagatttttggtgataggagcctgatatagctgtctcctgggaggctctgccagtgcctggcaaatacagaagtggatgctcacagtcatcattggacagagcacagggtccccaatgaaggagctagagaaagtacccaaagagctaaaggggtttgcagccccctaggaggaccaacaatataaactagccagtacccccaagagctccctgggactaaaccaccaatcaaagaaaacacacagagggactcgtggctctagcttcatatgtagcagaggattgcctagtcagtcatcaatgggaggagaggccctaagtcttgtgaaggttctattccccagtataggggaatgccaaagccaggaagtgggagtgggtgggttggagagcagtgggagggaggaggggataggggattttcggagaggaaactaggaaaggggataacatttgaaatgtaaataaagaaaatatctaatttttaaaaaatgacgacaagctgatgctcacaggaaaggtaagggacctagccttattaataaccttattgtgcttaggtcattctcaggcaagtcagaatcctttgtcctatgccacctatagtgctggctttccagacgccatgacctcctcaacctcaagctctctgtcttctgtcaaaggcagacttccagccgacatgaagcaagactcttttgagccttggctgagtcctgggcaaggcactaagcagatgaataaagcatacctctgcctatgacagatgtaaggctttcagctacccccaggcatctgagccacagcattggattgattctcaaagaaggtgctgtcaatcacaaacctgggtgacagagaagactgggagtagggaacaggccagggtaatttcaatctgaaaaaagcattgcttagaaatagtctgaatccacgtggtttatttgggttcctgagctcatctgtcatgtagcatcagttatccaagctgctggtcctaaaacacactttgggatctggccctctgcttcatctctacaagacgctccttgatattcagaaggttggtgctgttagcaaggctatccagttcgcccatgtgggatggctgatggagagcaggaaaagcttagctccatggggtatccaagcccactggcagtgtgcagaggcagggcttccctgggtcctggaacctgggaccaaatggacaagctgccatttgttgccatcatgtgcttcccttatacactacatttctgttggggctcaggaatcacctcacacaccacacaaactcggggtacagattctgtaattgaaccataaccctgagttaaggttctacagggttttgaagtccaaaattcacaaacatctgtgccaggttatttcaccaatcaggatagagggataaggaatttccttaagagtatgtctttgttgtacactgatcctgctcccattgcttggggtattcaactgtggcaggggacttgccttgtctaacattcatgtcttaacttgactactaggatgggccttatctaacattcatgtcttaacttgccagccaggatgtcagttacccatgcccatgtccataacagaaagagttctgccaagtaggatgtcagttccctagaagatcgtgggaactaaattttgcttgcttgctaatcaaaatggaatttttattccaagtggtttcttatattggtgcaggtgtctctcttatgttggggtccatcccatgggcagcttatgaaggcaaatatcataaaagcttatacataggtataggaattgctattgggtggctgtttggagttcaagctcattgtgggtaactatacaatcagttctactgatttctattgtgattggtttccaagggagcagaacataacagactcaatcttggcattagaaagtttcctaggagcagcagaaacaaaggagaaagtttccttatagtggcaagctagccaagtaactgttacctaggccttaacattttatctaggcttaaatattttacctaggctctagcattcccaaatctgtactgaacacctactgtggaagtcaactatattgcagaaccaggcattaccaagcaccagtctctgagatactcctcttgcccctcctttccctggccattatgtcctcagttatccagaactcaactcaaaagttagtttccatacccaggtagaagaaacagcagctacaaaacaaagctcagcttccagaaggagactggtctccgggaccatctgcattacaccttttctaaggaccagaggagccttcaatgttgattttcctgtaatcagggaagccctgtgattcccatcagctttacagaagacttcctctggctctaagaagaaggatagcaaagatctgagccaatcatcactgcctagagacatgaacgggcatcattacaactctgaagagaggtgccaacaagctgggtgtgggaattagttataggctggagaggaaggaagaataaatgagtgtctggaggacagacacatgattgcaaggatactaggaatgtcttaggaatgtggaccagacagaacctggaggttgatttgacatagtggagaaaagggaatgaagacttgtaggttaagcccatgtttgaacatgaagcaagaggccctttcaatgagacacagagcacaaaggaagaaaagggctcagggaaatgagagatgctacacaaagtgtgggtccgggtaagtgtggaaatgccttgcagtgtctctgagagtcctttgctatttccaaagcttcattgccgaatgggtaaagacaatgggacatttgggggaagaagaaaaaaaaaaagaagattcagaaacattcttgaaacaaaaagccaagtcaaagtgaaccagggcagcctcgttactggtaccacgaatcactgctgctgttgtttagggggcagtgaattgaacttccagtgccaagatcttctatttaagtgccctctgttgtgagactagagctggtacgaacaaggtccctgtaagcatccttcccatccatccaccgtgagcacagagtcttagattccggtcggacagcccagctgggggacgaccagtcatcaaatggtctcaggtttaacatcagctgatggatgatctggaagtcatttgccagctgtattctctcccttgccatgccttctctatgtaccaaacatcgctgcggtcactgtgaacgcagagagagggtcaaggcagtgagatctttgttgctcttgacccagagaagggcagagctttatcactattgttcttgggtctgtcaaggtcttttaaagtcctgtagttggttctctagccactttgaggtgtgcttcaaggcctattaacatttttcatattgaccttaggcttaaaaatatttcccaagtgctgtggtggccctactttgtccttattaaagaggaaaaattattttatgagctgaccccactagtagggttctgctctatagatggaactgcagtggaaggcatcttctctgtggcaatcataaagtcaccttctctaaaaccagctgggtcagtgacagctggggtccaatttctagaaccccatggcattggaagatgtattagtcaccccacaatgcctagtgctgaagtccagaaggccaacctttgcagacaaaacaaagagcttcacatatccttttaagatgcattgtactgccccaatgtcaaagtgagtctgtaaaagctgacctggaaagagcttggagccctggaagtaaatcccgagtcctgtgttgtttgtttgcttgtttgttgtttgtttgtttgtttgtttgtttgtttgtttttaacttggcaatcccaagaaatctaaaggcacttggactttaaaaagtgtggtgtgttctgtgattgttgttataacggaagcccaggcttggcttcttttccgtgctctttctgtgtgtagctagaatggcaatcctcatatccaagcatttaagcaaacaaaaataaccatttgaaagctatttcccatactctttcttagttctcagttcaccacaatttcatttagaaggaaatgctccatttgtgtccattgtagtcctgtcagcagcagaagcaatgaccagctctcaacatataaaattaactccactccagtttttctggataaaaacaaatcaatccaaagccagagtccttttccaggaaggggattttttgataaagacaagcacttaccagagaatgctattcttgttataaagttacttaaataagcatttggtataacttaggttctattttttttcttctttttaaaatcaagtaatttatctttgggtaatgttttaagtcttccaaatgttctttggagtccactttatgtgaatgatcctcttcacccaggccactcctaattgaagggcaaaggtgtgtaggccgatgactctatgaaacaactcgccattattccattagcactgaagaacagaatgctgagcagaaaatgagaaaatgattgcactggcctgcatgagtagcagcattgggaattcttccaaaccccgaggcagaagctgtacagtcagctccttcattgtgcaagcaaggagagacttcaggaagctacggggaagctgtaggtgatctgccccacgttcttctttcaactccaggatcgtgtgaatcacaagagcagccagcaatggcaaacatgaaagagaagcttccagaatacaagcaaggacaaaagaagtgtttttcccctttagatcatagcgcctctcctgcttgcctgtagcaggctaatattcacctcactgaataaaatcccagcatgttctactcgcacactctatacccacaaagtgaaaatcatgtccaacctgtaaactgaccaagccaaagactaaacacaaagttggaaatgttgccagccttgtcctttcttctcacgcaatggtcatgctccatctacaagtgcttccatgatcactcccatcccctacttgccagttagtgtcctccagcccacactaacccaagcagaagggaaagggagtaagaagagacttcatccataaacatatcatgaaatcaagaaaggggaactttattttgctttaagatgtctagtgacatggactctaatgtctcaaggaggaccacattggcatctgtttcacagtctctcaggaattcagagtgattcttcaggagagttcagagttgatatgcattctttgagacctgggaaacaccagaagacgccattcaggtagtcgtctctgagatctgtctactctgctttccagatatgttttaatccagaactacatccccgacctagagaaaaatcaattttagaattgattgagaatgaattttatcccacggcagagactaatggttgctttagcacaagcaaaactactctgtgaagccccagctgaagcagaaatgagagctagaagggatgtcaccaggcattaaacaccagactggccaagcctggctactgcctgtactaaaaattacattggactcctttcaaaatgtcaaattactccactggtcctgaatggcatcaggcttcaggggtcccaaggaagccaagggaaggatgcctggactgcttgcttggcctcttcccaatgctctgaaaggtcaaggccagcctgcctgcaacagcgttgtgttcaccgccaggccatcagcagagctctcaggctagtcctaggaggcagagagagagcacttgagcccttcccactatgcttacctacagagaatgcacgtgcccttcttgacgtgcacccttaagatcagaaatggtgggggaaagaagctcagttgggagaaaacgataactaatactgagtcagcagatggcaggtgcagtctggaacttccagcttctcaaatcatcaactttttgatgccctcggcctctggttctgtgtgtggtactaaccctaagattctagcctttcctgggggaggggcggggattttaagtaaatcctcagctgcttcatttcccaaattcccaaagcgcagctcctgaatataaccttgaaagttggagggggaggggggttccttttccagtcccttctttttctaatttgtcctccggaaacccaaacacaatgagacgaaaatactaaaacttccatctttgcagatggaggtttccagtaaattttccaaggttttgccttacaatctgtggctggttctcctaccatgagtcatttcaccaagttcatgggctgctttcacttactaggttgctagcctagtgtacgaaggatgccaaagcctcaaagtgatattgttttcctaggtgacccctccaatgattcagcctgagctatggaagctactgtactacactgaactccagagataaagtgggatagggacatcagactgagtttcacccagcatccccatatcctgactacatggccacggagtggcctcatggcctcccaatgttccaatttcttcagccttcaaatgagggaaatgataaacagattaaagaggatttttttcatatgaaaagcttggcacagagctttcagtgtgcttcatgtttattagatgctagacgtcaagactatttcaattctgagctgaaaggagagagagccaagagttggctgcttctgattcttagatcagaaactcagtggtactacataaaattggagaaacgacatagcaggtctatatagagagccaggatagggccactgctatcatcatatatgtaccagcaaataggatacccccagatacagttattcagtgaacaatctgaaggtgtttggaatattgtatagatccagagatatcagctgtctgtatcgtgcatttcgctaacagaaagtcttggagagattggaagaaatcctatgaatgatggcatagaccctcccatcattgatggcggctgctgaaaggatacaagtgttcagaagacatgtttaaatgttaaaagactgccagggtgccaaagttctatggggttgaagaggatctgttctaagatccagttttctttactgaattctagttggctaaggctcaggctaagctgcagatagccacaacataaccatatttctggaaaaccatcaactccttcctnnnnnnnnnnnnnnnnnnnnnnnnnnnnnnnnnnnnnnnnnnnnnnnnnnnnnnnnnnnnnnnnnnnnnnnnnnnnnnnnnnnnnnnnnnnnnnnnnnnnnnnnnnnnnnnnnnnnnnnnnnnnnnnnnnnnnnnnnnnnnnnnnnnnnnnnnnnnnnnnnnnnnnnnnnnnnnnnnnnnnnnnnnnnnnnnnnnnnnnnnnnnnnnnnnnnnnnnnnnnnnnnnnnnnnnnnnnnnnnnnnnnnnnnnnnnnnnnnnnnnnnnnnnnnnnnnnnnnnnnnnnnnnnnnnnnnnnnnnnnnnnnnnnnnnnnnnnnnnnnnnnnnnnnnnnnnnnnnnnnnnnnnnnnnnnnnnnctgggaccagcgctaaatcccattgaaatgtctagagtgggcattaagcgaatcttccctcccaggtctcctggcagcagttggatattaacaaggagaattatcatctgggactccagctgccgcttatgtctctttaaagaatgaatagccttccagttccagtcagctgcctgctcacaattgcagaggaatggtaaatcatctaggtgaatggaaagggatttgagagagcaaggctgcctatggacgaggtgctttctccatctcctctgtgacacagcaagcaggatggcccatgccactgccttggcttaagtccgtatctgtaccttcccagaaagggccctagaaccacttattaaagggaacatgaaaacgcccacagcaaacccactgaaacaatttttattatttttacaaggacagaataatcgtattatgagtcacagtttaatttgctctccagtggttttatttagccaaaggatcaattttgttcatgccaaataacatgttgagtggttttaatgaaatgtgcattttccattttctcatcgcattggttccctggtagccatgacctctactccccagaaaatttgttaggacagcagatatagcctaggcctcccttggcagccataatctactagaatgggcaagttggttttgtatttgtgatgaaaggggtctagacccccaagtagtgaaaactttgatctggagcttaaaagcatcttatccaaacatacattcatttaatcttgcaactcaagcatgaagaaccctcccagggtgccttgggagggccgagggcacagagctggggcttacagagaagtcgggcagcaatgcctgaggagtcagttatctgtgatcccctgtcccaggggaaaagctttgcctctcaaggaggctcaaacagccgggcaaggcattcttagtggttagactgcttcagggctttccagggacacagattttgtggcaggaaaatgtgacagcaaatcaggaccgccctgggggaatccatagctgaaatccatagctacagttctttcctttccttccaataacgggttcaaaggagctgatcggccccatgtcccaagactttattccttaccagtaaaatccaaactaaaatcccaagagaatttgcatgtcaactccaaatctcttccaagtctcaatttgattcatcaagcatcactttgaagggattcatggctggtcgctgggcactaagcacttgagggcacaaagaggagtaagtgacaatgttccttcctcaagatgctcacagcctaacaggagaagaaacatcgggtcaaatcattctggcgtaacaaatgtaacagaaatggtctgaataaaagctagtggagccttggtgaagatgctctctcgtgaacacagagaccctagcaaaggagcccagcatgacctgagccctagttctagtccattacttctggttccatgtattagttcctttgggcattactacaagtcacttaaaggagaggttggctttggctcatggattcagagattttggcccatcatagcaggtagacatggtaaagtggctgtagcctggtggtaggagttcaagtggaaagagagcaagccaagaaagcaagcccagttagagaagtctggatgtactaaactggcaggtaacagatgatgtcatttgtgttcccacaatcccgttcctttttctttcttctatgccagtcttaatgtatgctttctatactcaagtttatttactcttgcccctcagaacagcttctgaagttcaagaaaatgcattcaagttttagaaagggaggaaaaggggacaagattaatgctttaaataatttaaaaccctcccattgattcctctacattttgttagctgttgaagaagtagactacttcaaaaaatagagcttttattataaaagaggggagactatgcattggacagacaaataccgccctaccctacaggatttcaggaaagacctcagaggtaggtgtgcaaaagtaaatatctatattgtattggttggagatgaggcagcgtgagtacccagaagagcctatcacgtgcaccctcattcagaagacatatcttgtcttctgaagttaagtggcatttctaaccttggcatatgcattgacacttctgtcattcacaaaacacttcttttgggatgggatttcatgtgaccctgcctctaaactaaaaggctaagagagagagccatctctggttcaaggtgtggtaggaggaagagcgctatgctttaacaatcttgtgttaaaccttgcacctgtataagatagagatcgaggggtcctgggagaatgggaaatgggacaccatggggagttcagagacaatggcccaaactctgcatgtagatgtatgggtaagaaactcccatgtaccaaagtatacaaccagagggaacagcatgtgttaagacccagattcagcagcacatgagaaggatcgggcttgatttccatagtgagaaaggatggtttatgtaaaagtgtggtccgtgaggtgggaaggaagccttgggaggagcagagcaccctgcaggtggagtatcttaaagaccagacaggatggaggcctctcaccctaactttgaccgttcaataaagcagtcacgtctttgcatttactttagtgatcagcaggatacactggaatctgaatcctcaacctgcacaggcctagtcttaaaaagcatggaggtcacgagacccgaacctggattcttgtgcatttttagcaacagaatcccatagaaagaacgagtccatgactaagtgaacttggtccgagacattctggcagggactgaagaagggaagcacgggtgtgtgctctccctcttcccaggagcacctgttcttccctccggggcaacagatgggccaagtaaacccataaaatgatttgtaaactatatgtaactgaccatcatgggttgtggaatcatttcaatagctcagaattagcattttaaaaataaaatatagagagtacaaaacaggtcatgaaccctgaatctaaaaacgcaaagttcaaatctgaaaccctttcagggccaacatgaagccactaggagaatactccattccatacctagccacatgaaattagtcagtccacatgtacgtacacacaaaatactatataaaattacccaaaaagtatttaataagtacacatgaggcataaatgaattttatgtttagacataatatcacctctaagatatcttattataggtacataaatacccctaaccaacccagaatgcctctgagatcccaagcatctctggtaaggcataataagaacattgtagtcatattgagatatatagacagtgcttgtagcaaatgttcctaaaatctcagaggctcatccagcaagtttgtttttctctcacttaaaggctagggaagagatggatgggtctctggtcacaacttctccctgtttattaactcaagataatatgagcactgatgtatggctatactctgtcacccttgggagcactactggagacaagagtcagataaagggtcagctgctacccgctcatgcttccacacagaagtgatatttgtgcacagtgatgggtcccttaattctagaacttgggaggcagaggcaggtggatgtctgtgagttcaaggccagtctggtcaacagacctagttctaggacatccagggttatacaataaaaccctgtaacagggggcagggagtgatacttgccacctgtgaccatggcacatgggctagcctgggtcacataaaccccacttacctccaagatggagatgcttctgttttaagtacctgaaaaggaactggacatcagagagcacaaagcagcagtgggcagactagcacatgctagtggaatggaatgttggtggcttctcctgggaagagaagactaaaagtgtaggagtcctattggccagcccatatctgctcggtgcaagaaggacacaacgtgatgacccgatgagtactgggaggttactgcaggagcatgaatggcccatttctgcatgaacgatgacttacaaaagctgcgtctctacaggtctctgcataacttgcagacagcatctctgactgaagtgttcaagaaatgatactatatgactagtaacaagggctcttctctgtgtcttttcagagaaaaggaaaaagaaagagttcctcatgattattgaactgtcttcattccacagctcacaaataactcattatcacctacgacaactcaacaaattatagtcaacgttgtatctccccccatcttgtggggtgtgtgtgtgtgtgtgtgtgtgtgtgtgtggtgtgtgtgtgtaagcttttgtcttactcgaagagtcagcacagataccctaccaagcagcttgctaaatggccaagaataaaaaagtgaccattgaatgtgggaacgcctcaaggacagccaggaccctgtgaacaaacataacaatgggagaaggtgacacaaaggtggcattaaaaacctactgctcagcgtaaaatcccccacttctaagccgatacctcactttcacaaagacatagtcattcctgggtgaggagagcccttatcctgaagtgcttaattaaaatatcatgctgtgaaactgtgtcactggttatacaatgagcagtatcttcctgggaactttaggggagaaactttgcaatatttttctaagcactccagccgccagcagaagaaacactgtgaattctgtaggccctatggttgatgttactagaataacttgacttaggatgtttaaaatatatttcttttttataggtttgtttctcttttataggtgttttgtctctgtgtatgtatgttcactacatacatgcactgtgtgtgctgtgcctaaggaggccagaagaggacattggggcctctggaactggaattatagagggttagccaaagcctgggttacaaagggtatcaaacccaggttctctggaagagcagccagtgatattaaatgctgaatcatttctccatccccaaaatatatttctaatacttataagtcctcaggggaaacaatgaaaatataatgttagccaacatctactgaatgctagttatatgcccagaatggcacgagaaattatatcttttgttaatctcatttaatcctctctactatgaggtcacattgacaagttacttgcatttaaagtcaaagatctcaaaaaaatttagaaattcatgaataatcagtagcaaagctactttaaaaatgcaaataaataaataaataaataacttggataattccaaaacagttactattatagattgaattgtttgccccaaagaaagacgtatggaagccctaacttcaagacctcaaaatgcaacctcatttgtaaatagattggtttgcaggtgtaactagttaaaagacgctgaggtcatagtagaacagggtttgatatcacaggtttgcttaaaaaatacagatcactcagcccaccgacatgagagggtcaacatcaagggcctagaagacttcattttcacaaacacaacagggacttctgatgcaatcaggtggccgccttgcagagagtgggtttagactttctcctgaggattgaaggatgtagattagatggatgctcaggtgtcttcctgatcccaggatgtctactggtttatcttgagcccatttgccctgcttgcactggtgctttgacatcttagaactctcgtctttcctttcacctttccagcaaacactgatgccctttctctgtctcttgattgtctggatctgaggagccaaatagaattatcttaacatgtgataagtagatcctgcagctatcaatgctaaaactaacccacagcacaaacaggatagtcagcattctaccttatcagtccttaatctgcccttgctcttaatcactcctagatttcctaactcaaggctttggggggatggggttgggttttaaggcctctgggagctctgtaatgtcctataaacttgcctacagatgatgagccggttagcacatttttcagaggtaaatctgatgccaggaaaggaagggaacaatgggtccagacatcatgtgactacccagctcacctggctatgaccttggatgttcattttgatacttctaagggacactgtttggtcatggagagatctcgggcagcttgagcagctctgggggatactgggaaggtggtagtggtaccaacaccacagtctttgaatttctacaaaaccctatataaaaatgggtggaacaattagataacaaaaccagacatccaaaggatacattttcaacaaaattaggctcaaattgtctcacaagacccagatgaaaagtgagtagagccatgagcatctggatggacaaggaaacaactgagaagggtctgggagacactgagggcagcagctcctaagagcagacagcatctctggaagttgggatgcttttgaaacatgaatgtaaacatgaaagatgttcagggagtggtgagtaccaccttctctatcaggggaagtggagaggtctcagaaaggggggataaaggggttagagcaaacagaaggctctaagtcctcagcatagagtcaccaggacagggtgaaaaactgccctgactggaatcaaaagaaagaaggtcacctgggcgatcaaacaggcagggaagctcggaatacaagccaccatttaatgccatgtttgaacagaagaggggctctgaaattggaaatggtttcctgaaatccgagtccatctgtaagttcaagaaaaataatttcacataggaatgaacattaagaaaagaatggaggccaggttccaggtatctcttacaagaaaaaataaataagacagaaataatatacacaaggaaagtataccccaaaatatagccgtagagtaatcagaacattagctgagttagaaagcaatgcacaaatgattcaagatacaaaaggacagcgttaatcagaatcataaaataacgcaaactccaaaaaacaatttaaaagaaaaagatcattttagaaatcatggataaattgcataggctatgaaaccaaataaacacaatgaaaaaaaaaaccctgaagatgaaaaagataaaattttcaataaaaaaagaaaaaactataaaaaggaattttagagaaagtgatgaatatcaacaaggaacttgaacacctggaaaatgggagtccctaaagaaagaagcaaaacacatgtatttagctttctcatgctgtgacagaacacccgaggaaaacagcttatataggaggaaaaggttatctggctcctggttgcagagttttcaagctgtggtgagctggctccgctgctccagcctaaggtcaagcagaaaatcacaacagcatgagtgtgtatcagagcaggctgtttaccccaaggtagccaggaaggagaaggagagaagaatgtaggaccataaataccttcaacatcttgctcccagatgacctacttcctctgccagaccccatccctcctattctttccaccatgaattcatctgtggattgttaatctgttcatgaaaatagtattctcttgatccaaccacttctcgatgttctacctctgaccatcccttagggtcaacgggagatggagcataatacttatggtcagaccacaagagcacagaagcagcaaattctaagtggagagaccttttctgaaataaatgggtttggaactgctcgtagagcatgcctcatgcctgcgaccatcagccttgaacagacagcatcagacaaatggtagtgatattaataaattctaaggaaaaagccctttgagcatcgactagaaaggcatatgatttacattttcattatactttcaggagcaacttctcgtgtcagaaggaatagagtgatatatttaagatactcagagaaagtaagtcaatgattttatttccagaaaaattgactttcaaaatataatgggcgctgactgttatcaatatacaagaactcagaaagtatcgatcccacgagcctttcctgaggaatctattgaataacaagcttcaatcaaaatgactagcgagacattgacagaagatctgatggtgaacatttgatatacagtacttcacagctaggactaggaatgtattaatggttgtacattcaggcaatataaataaagggcccctatctatagctactataggtttttgtaaatagcaagctagaatacaaaagaagtgttaatgcaaatgaaattagaacatgcaaaaattaacactttgcataattttaacataattattaaggcagcaatggtagtgttttatatctgctccatgtgcaatgtgggagataacaaatgaataatgatggaaaattctaattatttttgtcatctcccaaataattacaaacttgaacttcaggtggaggtacctataaggaaggcatgagttatggaaccagaaatacagaagggaactgataagaacagactgtgcatagctttgtgcagctccatagttaatcatgtcacattaggatcctaaaattagctatgaggagtgtacctaccccacggatattatgaagtgctacaaacccacctatacctgtgtatgtgtgtttgtttattatttatttatttttacttaactactagagtgttcaatgtcaacattgatctccattccactatacgtagcagtccttaatatccagagtctgggtttgaaataccatttttcaataaaagatatttcagagaaatctttgattcaaggtttgagccaactatatatatatatgaacctgaaaaccatggtcacatagatgataagaatggtagcaaagacactgaaattggaggcagagacagacagatctccctgagttcgaggcctgttattgtcactatgaataacagtcaaggacacatactgagcccttgactaaaaaacgaaaaaagatattggagtcctgtcactaagactcaggaggcaacttaaaaaagactcccactgaccaaagatgggtcaatttgagcatcaacaataataactatcaaataaatttaaacttaccactttacagtggtatttaaccaaaagtaataattgcttttagaaagactggggaaaggaatcattagcttaaatgcccacaaatacatggaatgattcaggctccatcttccatatctgatgtcccagagaatacagcaaatgaatgagcagtatgcctttttacagatatcctacctaataaagttattctagagatagaattttaatatattgtaattcccaatgagcaaacagatccaagtattacccatcagtcagtggctgctaggaccacaccaaaggagacaatcagatatgagcagagctcggatctggtccaactggaaataggcaggaaatgccaagggcagaagaactggctccaatcagcaagatcccggctgtggaaaagctggaggtcaactggatcaacagcagatagactggaaaaaaccaggcgtgttgggggggtggggcagaccaggaatcagaaaacatagacctttttattagtgggcaagacaaactatagtgtgaaggaaggcactctgggtaataaaactttaatacaagctcaaggacatggttaatataaaaaccaggatgtcaggtttctatgagaggaggaagacactttgatgaggatgaatcaggtttctatgggaggagggagacacttcaatgcagatgaaacatgagcaagggattttgcggtgggatatcaagttatgtttccaagcagacgtggtttcccgttttatgaaaattagcaaccaatgtgttagatttataagatttgtcaattccctgttcctctctataatgaaaatacttttaaaatataatcaagtgtgcttgactgggaaacacaaggccctgagttcgatccccttgactggggggaataaaaccaaatataataaagttcttgccatcaaaaaaggtcagagtctggagtgggaaatcatgttgtaaacaattagttttgaggcaatatgacaaatgctcttacataaatgtgcacacatagttgtcaaagcagcatggaactgaaacaattcagcagggcaggtccaggaaggctcccaggaggaggaaacacaccacccaagcttccagagacaaccttctccagacagacatgtgaggggtgctcagagactagactgcagtgatctcagctcacttggcaatagcttcctctaggtgtccctgggcccctcagcacttattctggaatgtgtagcttccttcgtggccctgcaatttgtctagggcagtttcctctaagagaatagggggtacagttgttcaccgaaagagcatattaatgtgtggttatgtggatgaattaacgtctcctgcttttcccttgtttgaaaaccacaatatcacatatgatctgaattcaaaaataaaaaggttttttttcctcaagttttctacagctatgaagtcaggatcccacccagccatggtctctgcaagcacacttaccactagaattcctccttcggccagggaactgaggatggagaagtttccagaaacctcctcctacctgaagcccacccaccagctccacagagtgatctactacatgtttaaccaacaatgcaagacagtaaatagctgatgataaaatctgacatacccaaagggaagaggaaggacatactttgttaggctacatttcctgagacccaaacaaaaagcttgtgagttgtatattggaatcacagaacaattgggcgtgtgcgagtctggttgttctctgctagtcctgttcccgaatactctataaatagtgtcgtgggccccaggtattctaaggaaccttcaggctgagagtcaggttggcatccagtccagcttgcacttatccttcttgctgatctggcattcattcctcactatctctgctggcgagctggtactagaagctaaaagtaccttgcagttgagaatgggctagaaaagactgagacttgaaaagctgtctgcttccaggtgcattgatttatcaaatggggctaggtcatccacctgtactattaaggagacaacaagacaactgggaaattctcagaaatgaatgaggagtacagaatgtcccaaggacccaacctagagacatgcactgccttctttaggcaactgagtcctggcaagcgtgttatcattatatgaaacccatttaccaagccagtacattacagactccctgatgctctgttaatgcaagaccaacatcaaataaccatcatctcgggccaagtatctgtggggtcactcaagacaaacatcaatgcatagatgtgtgttcatggcctagtagacttttcttccacctatcctagtcttaaactttgtaaacttatggttgtgaaaaggtattctcaataccttcctacctaaggtttgtatcacatggatgccactttgtatcccaaagagattctgcaatgttccaaacttgcctgatccttggtcaactgcattgtttgctacagaatagagtccctaaaaaataaataaagccagagatagtggcttatacccataatcccagcacctgggggctgaggaagaatggttgccatgagttcgaaagtaacctgggccccagagcttacaaaggtctcaaaactacactcaaaggccaaaaatatggatatcttattctgctgtggcttcttcaacaaagtaccatagactatgtggcttcaaaaaacataaatctatgttcttattggtctagaaactgaggtttcaagagtagatcccagcatggccaggttttgatgacatctctccttctggtagagagtgcaaacctcttctgaggacaccaatcacagcactggacactcacactgatgatctcctgacacacgcgaatgccctcatggtacacactgatgacctcatgacaaattccaatggcctccagacatacactgatgatgtcatgacacctcattaaccactcaaagtctccatctctacttagcatcacactgaagcatgggcctttctctaacacaggaaactgagagagagagagagagaaaaaaaaatacaaacaggaaatcttgagtccataccaggggcaatgggactttaaagggagaatttgagatgagtctttgcttctcacaatctgcgcaaagttactcagacaaggcacaaacaccaacaagctgtacaaacattggttggggcaacttaaaaacttcaaatgaacaaagcttactgatggtcagtaatccaaacctcaacacacaccgtagatgagagctgtgtctgtggccaggaacctcggttgttagtgtgcatggctactgaagtttgctctaggatctccagccaaaggagagcatgcatttgctaatggcctctcctagttcatatgtgctaagccccaggttgagttccagtcttcactcatccccgaattgctagccccttttaaaatgagaaaacttactgtttttcctcaatagcttaacattttgtctcagggcatcaccagcttacaagggaagcaacgctagccgtagcccaatgcctcatggggaaccttcctccccaaacacataccagagccctaatgagaaaaataacacattttgcaaactgtgctgttgaggggtttttttgtagatcaaaagatttttcttactttttaataattcaggtaaccttggagatccagccgtttctcagatattgcttagcagtgaagaatcagaaagttgctgcttgcctgattccactcagtcattctataggcaagtctgggtactctgtctctatgacaggagagccgtgagaagagcccatagtctcagatcaggtctgctaggctctactgagcctttatttgccttgcatagctggtgtctttattgagttagcagtcatgtattgagggcattataaagatgagccaaatactgtttgcagataaaaggaatggccctacactcaaggatactgtaggctggaaacaggatattccatcctcacacggaattgttaccctgcttctgtgggtgcttgtctttaccttgtattagtttgacacataaaacaacaacaacaaaaacatatggtaagaaacatgagagagaaaggggtgggagagggagagaaagggaggaagagagagggggatacaagttaatgtctaaacaccttaggctttgacgccgtcactcttcctgggatccttgttgtcagcaacacaagtggtccatttattatttgacctttcttagctttccatcctcaggaaaacctcatgtactggctgtaatccacccttctcatccacctctggagctcatgtagaagctacctctattcttcacctcttgatatcatcctatcccagcaactctgcagatagcgtcctgagcatatcataaggccatcactgagcaaaccaagatgttggagagcagcgcatcctcagctccatgatgtgcatggcacatctctatggcaacgcacagggctttgtacttccctttatgcacagaggtcacgccttttgtgggtcacaggactacaggacagccaaaggcgtcacgtggtgtccaggagtcacacttcagccaaggctgcccacctcctcctcactcatcacttcccgctagcctctgctctatatttttaatcaacacagatgttcggggcacaggatctgcttgagagtccatgaattccagtgctacacaaaatgcctgagtggcagctgtgtttgccctcgctgctgattccccaccctcacttaagcaagaactggaacctcagcgccaaagacaaattttagaactcaggtaaatagttccagatcctgtgacaaaggcatctgatcccagatacatgagaagctgaagcggtaaagccatagttcaagttcaaggcacaggcaacttattgaggccaccccatctcaaaataaaggttaaaagagggttatggatgtagctcaatggtagagtggctccctagcatgaatgaaacctaagcttaatccttaataccatgaagaatagcatctgaactgcaaatcaaagtttagaagccttctatttaggttattatggtgaatatctattacaaacatgaagctcagatttattactaactggaccatcagttgtacagtagaactggtatgtatggccatgtcatctttgaaaaacttgcagagcctatccagaaggagatgaatggtttcattcaggttgaattccattgtgtgcacgtgcacgcacacacacacacacacacacacacacacacctagaatggtctactctaatggtattatagataatttaaagaggcacctcctcagggtttaaagaatgttcttaacacaactgtaaatttgtgttttacttaactgttttgtcgtttttatttctcagcatactgaaaagcatggtagaagttccctgggcctctctcttactcttagagtcttggccatcatggtaccactagagcattattgtcgtgctaccacgtaggtctctagaaaccattgctcattagaaagcttttctgcagactctcataggcctgttgcatatggtaagccctgacacaacaccaggtcctggtgtcctcacccaggaaaggctgtgacccatcagcacaagggagatccaaagtctgcttttagagaactttgcagatcatctgtgatgcctcactcagcctggataagttacctaaggggagatgatgagggcaatctcaaacttgcaaagggcacggagagatggcttagccactcaatgctaggcttacaaccaaaattgcaaagggagactttaggttctgtaaaatcattatatcttcaagccttgatcccttcatccataaaatgaaggaaataacagtctaatgaaaattaatagaatatcatcaaaggctttcagatttgtatatgtactcacaagatgtgacagcaaaaccagtctctgaaggataatttatttcctggccctcagctggcctcaccatccactcatcttaaagaagccagccttccagtttacatgtgacatttcaaagtggcttacaaatcttgtactccctgcataccaaggccgtgttcacatgtaccccagcttcattgctattttaatgccatgccatttttagttggcgaggaacagaggtccattctctgctcccacttttggggatatcatgggagtgaaagaggtatactccagctatgggtcggtcctatagaccttccacaggttctctcacagcccaaggacctgggcagctggagctatttacaagccaaccagtgctaagtgcttccctttttcttctttccctttttattcttgcttttcagaaggtggacagagtaaaatactctccagcagaggaaataatataaacttaaaagtcacttggaatggaatggtgaaatgatttcaccactttctttcagcaaataataataataataatggtgataataataatgccatatgaggccacctctggggattccattactgagaagctggagggaaacgcaatggcttccaatgaacaggttttccctttaactggttagagcactttgggatggagagatgagaaagacaggtgctagacaatagaataaacctagcagcatatcatttgcataattttgtataaaagtgcactgacgtatgaagtatacagtgagtgtattgaatactgaaaatgaagaatcttggaacacaatctatgttgactacccagttctgaaatagctgagcatcttatgaaatacctcttgcttctttgtagaaatgagtggctctctctctctctcccctcccctcctttcctctctttttccctccctccctccctccctccctaacccatgcagtgtgtatgtgtgcgtgcaggtgcgtgcatatgtgtgtgtgttcatgtgcactcatatacaatctttagaaaacacactttttatactattgttctaggtaattctccaaaatgaatgctctatacaaactggccatgggagtggggctggagggaacaggggaatgcttgcgtctctttctgacactgtgtatgtagtagcccctttgccattcttgcatgattaaaggttgtctggagggctacaacagtgtatagagcaaagattataaacaaccatttttgcaggccaaattgcttcctaaatgagagagcagaagatttaagggtgaacataactgtctatttgagcggcatccaaagatttctgctgtgtgggaaacaaaactctgacttccttctgacaagtattccttaacaggccttcccagatacctgaaacccatcctaacacactcaggccctccactgaccaccaccttgccagcgtggtgtggcccagtctccaggctgctcaccagtccgcaggcctatggggtgagtgaatgattgcacgaggcaaacctggtgaatattgatgagctagagacctcagggctcttactccctagctggagaaggaggcagtttttaaatttactgtaccgagaagtgtttcttcttctctgttccattgttgctgaggttggcttattcttctttgtaaaaaggcattttttttattgttgccaatatctttaaccataaaatgaacttagaaaatgtaaaagcgatgtgttctcacaaactgctgtgttttgaagttttggatattaggtctgtgctttatagctcaggggagtagaataagaaaaatcctgagaagcaattaaagtcattaccagcagatcagagtgtcaggcaactggagaagagcagagtgtaggagctgacagcggcctaaggtgccatcagcaggcactcccctgcaaaaagagactcttcttctcagatgtgctcagcagctgggggcttcctggaggaatgtgacagaaataaccctcacacaacagatctgatttaaatagctctcagatgcccctagagtaagctaaaggtgggaaccctgtcctaaggtgaccctcactgtgcagtgatttggtgtcatcttctctaatcagtaggagagcttcaggggaacctctagatgaggtgaccattactggtcaggtctatacatttctgatgttattcaatctaccagggtcagtgccagtcaattctagtcttatgactgacacatgtctcaagaaatgtgccgaaaacccatttacagtaaaatacgacatattcagctccaagcgttttcgggaaggcaggtgcctttcaaacccagcataaaacttctctacaggatttggtgaaggtttgactctgatcaaccttcctgggtgccagtgagcagaatctaccaaatcccattctctccctctcagcccaaggagataggtcacaggcctctgctgaccttgggctaggagagtcttggaggctgtgtagaaagccaagtttttagtgctgactcagcaaatgctgcgctgcatgcaagcatagatggatcatagtaaaatttgccattaaatcaaagaaaagggaatctccagccaaaaagagatggctcagttagtcaagtacttgccatgcagacatgaagacctgcatttggaaacccagcccctggcatgtacctacaataccagccctgaagaaatagagacaggtggctccctagagctcactagccagctagtctcaccaaatggtgagctccgggtttagtaagagaatccctctccaaaaagaaagaggaatacaagagagagagagagagagagagagagagagagagagagagagagagagagagagagagaggagaaaatcattcaaatcagctgaggtcaacctctggccttcacctgcatgtatgtctgtgtgccatatacacaaaacattcccttttcttacatcatggggatgctactgtttcctgccctcatcacaaagtgacctgtctctctatctgtcctaacaaaccaggaacaactgaaagaggatgacgtggaatgtatcgtcaaccaagatgaactggccatgaattaccaggagcagagcccttcacccagcagtcccaccaccaagctagctctggaccagaagtcttcaggccagactccaggcaaggagaatatctacgagggagatctcggcctgggaggctatgatctcaaactggagcagactcggggtcaaccccagatggactaattggtatgatgagtgcagacttaatcacatgtaacacaagaccactgaggaatgccaacagccaaggaggtggtgcagagagagacagaaagagtattaagaacatgaattggacagaatcaaaccttatcacatgtatcctcccgtgccttcagaaatgagaattcattatcttccctctgtattatgcaacctcatttaattatctgacagccatttttactgctgaattaggggccaggagagtcaggtcctagctgccattgggatgaaccatatgtgctgtgtctgcagggggccccttctgttcctcagacagctctccaggcccttcatgtggattttggattcaattccattaattatggaacattaataacatgaagaagaagaagaaaaaaaactcctgagcataaatgataagccttatctctcaacttgactccacttgttcggaccatagggctaaatgcagaaaccagtgtgtgttcagtacccactcttgatggctttggagaattcacatgaattgggggccttgttgtccttgctggcgctctctccatgcagttcttcccactcctccaaggagctgcttgcccacgggtgtgtgcatgttaagtgtaggctcttgccagcttaaggggactctctccagggaaagctggtctctttcccacattctgtgttttattcaaatggtgagcctctcttccttgtgtgcactgggacaacttcctgacaggttccctctgcatgctgggaagtcatgttttgcagcatgacccttccacatggggttggaggattgtgcaggagccctcaccttttccaccaatatctgtaactgattggcaatagaggggcaaaaagaacagagctaatgacatttaggccacactgaggcaccaaggacaagcaccagtcaggatctcccccattcccagagtggccagtggctgcattgaagagaccaacatcatagcttttaattcagctgcatgactcgtgcctttgaagccataagatacctcaagcctagcttctcttgatgtgcagatgttctattaggctccaaagagcaggcttcagacttgggagcccaagatgtaatgggtttacttttgagggagatgaagaacgatttctttctcaggcccaaaggctaaaactaatgcatgcttcactgagtgcttcttaggccttaggcctgtgagatcaggtaccttgcctgcgtgtctgtttttcttgcttccaaatagtagaaactgggagaaacttttatattcaactgagtaaaatcttgtcatgtcaggtaaatatggcaaggagagaggttttctaatgtgacatcatcctaataaactttcttatggagtatgattgcattggctatagcttcatttcaaggcaccccctctgaccacgctaactgagagcattacactcttgtctgggtgcaactggtatgaaatgctaccataagggggatgcatgggtcctcagactcccaaacagccaaaggggcctggcgcaacaagccactgaagaaataaagaaatctgggaggatgtctcagacaagggacgttgagtcaagcaagggggcacaacctcccttcatcctcccaggcaggggtgaccagactttaggaagtgctacaaaaatggaggaaacactaaaagattggaagaagaccataagatggcgcggggggtggggggggttagggggagcacatgcatctcatttctgcccacatcaagtagaaggaaggggtgattgctttgtgtctaaaaaagcacacaatagaaaaagaaaagaagcctaaaaagtcaaacggtcgtgtaaaaagaacaagaagaaagaagaggaatttggcctaccagatgaaacaaagtaatgtgtgtggagggatgggggctgaaccatcggagccaacactgaatcaaaaagaatgagttagaataaaactagcctctgcctcccagctggcttcttgctgagagacaaactctctttccaacctactgtcaggaattactcctgacgaggacagggaatataccgggctgatccctggggtaggctctggatcacaggcccctccgatatataggacagtgttcccatcttgctatgtggctaccaccctttcaccctctaaatcagtccaagactagtgcccaattagcaattcataaagccacgccccgttatgctatcgctgtgaagaatgatgaatcgtgatcttaagcaatgccctgcgctttgattagcggcctcacaactgtgaaattcaaacctattatttactgccagtttctaatgaataataaaggcacaagtgctttattcaagccactaatattcttattcagtattagagctttaaacagggttctcattaattagatgactgggtcttccttgaacttgttaacatgggtacatcacacacatgcatattcacacacacagaggttgattcaatatcagggccccatctagagcctctatggtgctttccataatacttgggtatgtctgagcatgtttgaaacccagtatcaaatgctagtaaggtggttttttttttcattgtgaaatttctcaaaatttcttagagaccaatctaacaatataaatcaaagctgaagttttaagtactctaatgtcatgtgcagagctgtgtttttacagtgaaaagagaataaaggaaaattttcaatgtagccacattttggaagaggtacaaagatacctggtagatcccaagtccaacttggaatcttaaatgagagttgaatttaaatagaaggcaagaaaccttctatttaaaggaagaaccaagctgtctggccaaggtacaattctgcccaccatagtctctgctccagtctctcctataaggctgtcccaaaagttgtaaatccatctccaagagacagattagattcctcctctggtggacaaacccctcctctgattgtcaccagggcttctggactttcttctcccagcaggaaattcctggggaatattgagtttgttggtgcaaattgcttgaatagtatactagccaaagcgagggacataagtgtctctttcttcatgtctgccagctgcttacattttcccactctttgtgtttgttgattgttatttgttttgttttgatttggtttggtttttgagacagggcctttctacatagccctggttatcctagagctcctgtagaccaaactggccttgaacgcacagagatcagccagtctgtgttttaacaactcagtgaaatataactgcatcttaaacaaatagaagcagaatacaagtgggagccaaggttggagcacattcagttagtatccagtatacaagagcaatgtctacatagcctcttggctttagtgacttctggaaaaaactctatcatgttggtttgagacaaaaatctcactatgacacacaggctggtcacaaactcctggtatcttcaacttttcaactactgagactccaaggaagcactactgtgttcattatggctctgaaaatccccctttctttgtctaggaacaatgttccctaaagatatcactaaataaacctcaaagagtttgttctctcccgtgtctcattgccaaggtaagagttatagatgtttggtctgagttgagcctgcattgggaggtgtagtttttgagtagatttggtccccatagactcatgagtttaaatgtttggcccacagtgacactattagtttttgttggaataggtggagtcttattggaggaagtgtgtcactgtgggctttgaagtcctacgctcaagctccactcagtgcaggagaaaccctcctcctgtctgcctgccttcagatcaagatatagaactctcagctccttctccagaatcatgtatgcctggattttgtcatacttcctgccatgatgataatgggccaaacctctgaaactgttagccagcccagttaaatgttgtcctttataaaagttgccttgatcgtggtgcttttcacagcaatgaaaccctaagtaagatagaagagtaagtggcaggtggcagggagttagtgccatgaaccttttatggtggattttaagcagctaagaaggctagaaggaatagcttgtaggtcaagcatttctagagaccattctttttcttctactctcatttcttcatcctagcatctcaaaactatcatccaggtccctttgtcagatgctatacttctgcagaatgttcatagacaacagtttcaatatgcttaacagacacacagctatgaagaataaatactattgaataatgctaacagataatagttacaaagctacacaaaagacacaaccaatcggagtaggactggtttctatatacaaatgcccaatgccttatcatttttagaaggcttatatagtagaataggcacatgtacacataaaagatcccagaataacaagaatcattactgaacaatatagaacgcctgaatattttcagttaacttatacttttaaaactaaagttagttagactctttggtttagtaggataagactacaggattgacaatcaagattttagatctcttacatagtcaagggactgctccaattactcagaaaggttatatacaacttgacctcatatgaacagtcacacaacaaagcagagatacagaccagagtttcaaataacaaaattatacaaatgtaaggttttccatttcactgtactgaagatgacacctttattctggatctgtgagagattacacatatcaaaagcatttattaaaacaaattgatcgtaaacctaagtaataagtcatccatgtcataaaggatatatctgatatagactgagttccaacctacagaacaacaaagctcaggtcagaatacaggctgggtgccatgaggaaaccaagagaaatgactgactcttagaaactggactcagtcaatcttcactttcgtcccttttgagttctacatgctgttgacttagaattatttactcaaaataataattatgactcttatgaaataattcaatacaaaacaataagctaccataaggaatggagtgaaaagccaagaacattgccatttttgccaccatctttgggagtccttaagagtatgagcttcagcacccagagtaccaagcactgactcattcagcacctacaggtaccacacttccaaagctctatgcctcactggctactaaaattgtccctacctctcaaataattagcacttttgagaagagcagtttcgtatcagatagcaaaatataggaggaagagactggaacagtgtgctgctaacccagaaacaaggaacaagatcaggaaaatccagcacaaggtccagaaacagacctgtgaatatatttagaaagctagtttataaaacacggcatttcaattggggttagggatatgtggactaattgatttttcaatttagaaaatgaaagaaagttgaatactcatgtctaacgcatgtaaaaactaaatcccaggtgattgaaataactaaacacaaaaagcataacaacaggaaatttaaatgtaaataaacttcaaaacacgccatgtagtcttcctgagacagaaactaaaaacaaatacaaatatgatttaaagatttgaaacttcctatgttaaaaaaaaaaaacacaataaaccaaattggaaaacaagaaacaaactaggagaaaaaaaatatatatatacacatagatagatagatagatagatagatagatagatgatagatagatagatagatagatagatagatagagagagataagagagagagatgagagagatgagagagagagggggggagagataggttattttccagaatatacaaataattcttagaaatacattaataacatttaaaaagacttccagattaaaaagaaaaagaaaacagtgtcaaggcttataggattaatggttgtgcacaggaaatatacaaaaccattctttagtgtaacactatctgttgctgcaaactgttgggggaaatcataaatacccatcaatagcagaagggttatctaaactatcctcattctgcaaaacactgcaaaaatcacatgctacagagattagcccatctgcatgcactcagatggaaatatttctaaaatatgattgttaggatttaaatataaaatattcccctaggattgtatattgaaagaaaccttgtagccagctggtgttactgttttgaggaggaagaaaacattaaggggtgaggcctatagatagaggaaatagtcacttagggtatgtctttgttcgtacccaagaagtgaacaaatttgctcctccatgccttttgtcttaggtagcgttttaattgctatgaagagacaccatgaccatgacaacttagaaagaaaagcatttaattgtggctgctttacagtttccactgttgtcatggtgggaaacatggcagagtacaggcaggcatggtactggagaaggagctgagagttctatatcttgatgtgaaggcagcaaaaggggactgccacactgggtgtagcttgagcataggagacctcaaggcccacccccacagtgacacacttcctccaacaaggccacacctactccaacactgccacacctcctagtagtgccacttcctatgggccaagcactcaaatatatgagtctgtggaggccaaacctattcaaaccaccacacacttgggtcttaatgtttggcctcctcaaggcccagcaacaatggggccattcacccttattcatggcagaagccctgagccaaaataaaccccacttctttttagagtgtttcttctcaggtattgatcacagcaacagaaagcctgaatgccacagttttgtttgtgaaaagcagtctggagaagactgagagaaatccgaattgcaagctacaaggaatgaggctttggggttcatttgtggtgttgtttaatttttatagtgataatgtattcatgatttccctgtttgttaaaataactttagatgtttaggaagatatgagtaaagtggcatagaacctgttgctagattctgtgtacgtaaagggggaaaccataaaagcagtggggcttgccctgagtgtgtccttggcttcacagtagggaagggaaggtgtgatcaagaaagactccaaagctgttttgttttgttttgattttttttttgttcttgttcttgctcttgctcttgctcttgctcttgctcttgctcttgctcttgctcttgctcttgttcttgttcttgttcttgttcttgttcttgttcttgttcttgttcttattcttgttcttgttcttgttcttgttttttggtgaggtcttgaacaatgagaggctttccagatctcttgagccctatcccatggatgatatgaagaactgaattattagaaaactctgaaggaatttcatcacaaggggagagtgtaggcagagacagagggtaagtagcatctagaaagtaattccacatggttaccacatgggttgctatgtttaaaaatggggagaaatagagaaacaggagaccatgtagaacaaactaaagaggagcctaaacttatgtgaacagggaattagtgaaatgcatcaggtaggggagacaatcacttaggctgggtggagatgcagtactaagaagggtagagacagtaactgccagtctccacccagtgtagatgttattttactagctgagaagtgaagtgtattagccacttctctgttgctgtgataaaataccatgtccaagagcagcttgtagaaggaagaaagtttattttggcttatggtttcaaagggagagtccatattggtgagtgaggcaaggtaggcggtggctggaggaggaagctgagagatcgatcatgtctctaaacataaagcagagactgaatcagaagtgtgggtagactatcaactctcaaagttcttcctccagcaagccttctcctcctgttaccagttgtgacacatttctcattcaaagcatctctgatgatcaggcaactacaacaatgccagaaggcattggtctaggtaaagttcaaaggtaaagtacacgtggtggtaactgatagagtgcggaaggaagggagactacaggacaccaaaatgacccccagcctaagccaatcataatgactcatgattttattctttgggagggagctgagcagaataacacgttcacagaaaagtcagtcagcctggttctgagcaagatgaaactgaggctcccatataacatctctagagatatcaaggagctgtttaagtggatataaattttgagtagggggctacttttggcatggcactggcccagcacatacaaggtatggttttgagtcccaactcttcagtagtgatgatgatgatgatgacaatgatgatgatgataaaattatggtaaaagttctggcctggagatgtgggttttgaggaataagatgtgcatcctgggttcatggagatgtttctcaggtgccatttgaccctttatttctctaactcccataaagaggttctgatatgttctctatgcaattctttgattatcttcaaaagataccacagataccatgattgaggtgcaccttgggagaagtacagacaaaacagaaaaggaaacaagatggggagctgaggcatggctggacaaagtatgcacctgtgaaacactccctagagaatcctgttctgagaatccaagaactgacatttgcatggaatagagactgaacacagagccatgttgattactgctgttactatagctgtggtctcacacacctgctctacctcttcccaactgtgacggttagcctgaatatattaacacttccctggtacctattgatctgacaaatgctttgctcgaaataaaccaccagaaataatttgatttcaggtggcaaagccagcagtgtcacttcactgtcctatgtcagtggcatggaagctttcttaatctgatcataatttagtcctcagggaccctaatgacctttctcttcccccaagacgtcacactggtctattacattgatgacatttggacctagtgagcaagaggtagctattatcctgaacataatggcaagacatttgcctgtcagaagcttggacataaacttgacaaaaatgccaggtctgggaaccttagagaaattgtccagtctggtagcaaaggcatgtcgagctatcttcttgacgatgaaggtgagctgttgcatccggccccttctgagagagaccacaaaaaggtgtaatgtatactggatggaaactgcagaaggagtatatttttcatctgctgatccagctcatttaccaaggttgaattataaacccctcaaaagatatggcacccatgaatgtggctttacttgataataggatctttgcagatgtaatcacattaagatgggatcatagagtattagagcaagccctaattctaaaaactaatggctttagatagaaatagagacatgatagcatatgacagtagaaacagtaaatggagagatgccagctataaaccagtgaaagccaaggatcgctgcaacttccaggagctaggggatagataggtagatagatagatagatagatagatagatagatagatagatagatagatagatagattgatagatagatgatggttttccttcaaagcttacagatggagactataacaccttgaatgcagattcctggcccctgtacctgcacaagaataaatatctaacttttaaagcaatcagtgtatggcaatttattacaacagccctagaaaaatcacatatccaatcacctgaagagctgtgggtttgagaagaactctgaacaagagaaggctttgcagttgatccacgatactgtacaaacttttctgacacttggactctaaaatccagaagatctggtaatattggccatggaaagtcagacaaatcaccattcagagacttaggttttccaagcaaagttctactgtcctttgtagacaactgcacatgattgagaaataatttagtctgttgttggaccctagtagagacagatacttatccatgagccaccaagatgacatgtgccccaagctgttatcatgaacaggatactttatagcacaccatggcgtggtatggaaatgctatataaaataaccagttagttattggaggtatattttaatttatgtgaggatccatccaaatgtatagaatccatttcactatctactttctctttcccagcctgtacccatagcctcacaagaagagacataaaaatggctacctgaggcaggcctggtttgcaggtgttcttacatgcagaactcaatgtatgcagaactcaaatgtggaaaactgacacgctatggttattttcttcagcatctctgagggacagagataccagtcagtcctcacagtgagcagaatgctttgttgccccttttgttgaaatgagaaggaagcaaaagtaaatttctctctctactgccatgggctatagcagggtttttgctagatggcttaaagttagaaatagtgtgactggaaagctggaggtaagaagtccgagaaagaggagtgttcataggcacctctgtgtgtgtaaggtctgtggtggtgtttgtgtttcatgtgtatgctcacaaataacaatgacctcagcagtggtagattttaatagacaaatgaaaagtgaaggtccccctactatgtggggaccagtgagtctctttgtccaggcactggtctacccaatggcctcataaacaaagcatttattgtgtcagggatggggatatgtgtaagcttaacaacatggactttccccaaagccaacctgtccatagccactgctgagtgccaggctgccagcagcagagaccaacactgagtcctcagtacagctctatttacccaggcaatcaagcagccatctggttgcagattgattccactgagccatggccattgtggaagagatagctctttgagcttactggaacatatacttggatattaatttgaattctgtgacacactacttctcccttgaaaaaggtaaaataaaggctctcaaactcctatgttatgttggtctagagcagtgtgtgaaatcttccaaatgctgtgaccctttaatacagttcctcatgctctggtgacccccccaactacaaaagtatttctgttgcacttcataactgtaatatcactactgttatgagtcataatg

SEQ ID NO: 1096 - DNA, 1838 bp, Mus musculus
taagagccacagtgacctctgtgtgtgcaagtccctgctggtcatcctggagtaggaaaagcttagagaaacttagtgtaatggctgcaataaatgtagacatatctcttggcacctggcagcaaaggcctgtgggtatcgagaggggtaagcccaaggaatgagatacacagagccagaagcaattctggagaatgaaaactcagttctctttgatgcctgtcaaaatggagatgcggaaatgtactcaattagcatgacagggctgcatggagcaagccagtctggagttggtgtggacctggatgaaagtctgaaggaagagccctcctcacagcaggcaagttccataaagtcatggataaaacatggactggtccactgctcatccgtgctcctagagtacatagccaagggagctatttctaaaatgggttgcctctgctgatagtgcctaggaattcacagtgttggttatgtttaacatatgaatgctcagaaccaactcactgccacctcttgggatatcaagaatcctgaaaacacaatatgggatctagactagaacccaaagaatgagcctccccatggtgcctcccgcccagctgctagcccattgatctcagtgaagtcaatcaaagcttgttcagcacacaacagagggtcctgtttatcctgaatagcttcttcttcaccagatctgggtgaggaaattgctcagaataaaatactaaccccttaagtagaggaaaattgttctccaaccctagttttgaatctgccatcaaggtaggatcagccatcagtgatattgccttagtcattccttacttggtcactcaccttaaaacaaatgaaccaatgtgtgggaatcttcctcgtttgctgtaatcagaagtctgcagacgtgatcagagtaatgtggtaaatacatggctttgcttggtaaactgtgttttgatcgtgtttggatttgaggacaacccctgctttgatagtaagggtttccccctcgtaccaacaatgtaccacagccagctggcattcctaggcaagaggccacttccctgggtcagacaaagaaagaaggaagagccctgttgcacagagaagtctgaggaatgaagtttgtaatgaacatgactcttgtgttctatgaacatggttgccacgtgtgttctggggccataggtactcttttcacggactgattgcccagggaacagcatcagtgggggacagagcacagcatggctgctggaatattaggactggggacagcttgatgaccttagagacagaatcaaagccatcgcctgggctgtaatgagtagtgaggaaggtctggctgtggctgaggtttcagaaacattttcatctaccataggtcaaataatctattctccgaccttgaagcaaaaccttcatctaaattctgtcttcttcatgtgcgtctttctttagaagacagaataagaaaagtcatcaaagaaaatcctttgccttcctctaatgacctaaaattttataatcgcatataattattggtaaaatttcctactagcctgagtcatttttaaagtttatacatattttagctttttcatacaacattttaaagttcaccactgttagttcggcagtgactcttacctggagatattaccataatgaaaggtatttttttttttttagttgttttagaaataagattgtgctgcatagaaaatgaacatcatgtgacatttgggtcttggaaaagctttcacatcttgggagtttcaccttccctgtctgtccaaagtgaatgataatggtgtttatctcaggaagctgtc

SEQ ID NO: 1097 - protein, 93 aa, Mus musculus
MRYTEPEAINENSVLFDACQNGDAEMYSISMTGLHGASQSGVGVDLDESLKEEPSSQQASSIKSWIKHGLVHCSSVLLEYIAKGAISKMGCLC

SEQ ID NO: 1098 - DNA, 1137 bp, Mus musculus
gagaagccggtctgaatgctaagccatctgaattgcttgcgaagtagcaacaaagtagcagcgtttattctgaaattctgtgggcgccagtctatcctaggcaaccctcatctaagggctcatcccttgtccagggatttctctgagcatcacagtcggtcgagtggagaatggctgggcagcttcggtttacgtcagggaaggatgaagatcattttcaacaccagggagcagtggagctactcgcgtttaattttttgctcatccttaccattttaacaatctggttatttaaaaatcaccgattccgcttcttgcatgagactggaggggcgatggtgtatggcctcataatgggactaattttgcgatatgccacagcgccgactgatattgatagtggaactgtctacaactgtgggaacttgttcttcagcccatcaactctactagtcaacatcaccgaccaagtttatgagtataagtaccagagagagatcaaccagcacaatatcagcccccaccaaggcaacgccatactggagaagatgacgtttgacccagaaatcttcttcaacgttttgctgcctcccatcatatttcatgcaggatacagtctgaagaagagacacttttttcaaaacttgggatccattttaacgtatgccttcttgggaacagccatctcctgtgtggtcatagggacttgatggccatctgtcctatccactgcagagtgcaagtgctgagctgtatgtaaatcaaaaatggtcactcaggtttttgcaaaataacaccaaaattgtttttccaatgtaacattaccagctttatttttgtttttgttcccccccccttaatgtttagcaattggtaggtacaacatgaaaatgcatctctatttgtgtcttcctgattattgaattggctgtacttttacaatccccctttctatctgaggtgtttggtcctcttttcacaaacttttagagttcttttaatgttgcacgtatctatccatattcacttagcaatgtagtttgtaagtgcatcttacaaatttacaaatcttgggttgcatagtatcttgttatggggttaacagttttgtactcatttaataaatccttttgtcct

SEQ ID NO: 1099 - protein, 177 aa, Mus musculus
MAGQLRFTSGKDEDHFQHQGAVELLAFNFLLILTILTIWLFKNHRFRFLHETGGAMVYGLIMGLILRYATAPTDIDSGTVYNCGNLFFSPSTLLVNITDQVYEYKYQREINQHNISPHQGNAIKMTFDPEIFFNVLLPPIIFHAGYSLKKRHFFQNLGSILTYAFLGTAISCVVIGT

SEQ ID NO: 1100 - DNA, 3481 bp, Mus musculus
gagaagccggtctgaatgctaagccatctgaattgcttgcgaagtagcaacaaagtagcagcgtttattctgaaattctgtgggcgccagtctatcctaggcaaccctcatctaagggctcatcccttgtccagggatttctctgagcatcacagtcggtcgagtggagaatggctgggcagcttcggtttacgtcagggaaggatgaagatcattttcaacaccagggagcagtggagctactcgcgtttaattttttgctcatccttaccattttaacaatctggttatttaaaaatcaccgattccgcttcttgcatgagactggaggggcgatggtgtatggcctcataatgggactaattttgcgatatgccacagcgccgactgatattgatagtggaactgtctacaactgtgggaacttgttcttcagcccatcaactctactagtcaacatcaccgaccaagtttatgagtataagtaccagagagagatcaaccagcacaatatcagcccccaccaaggcaacgccatactggagaagatgacgtttgacccagaaatcttcttcaacgttttgctgcctcccatcatatttcatgcaggatacagtctgaagaagagacacttttttcaaaacttgggatccattttaacgtatgccttcttgggaacagccatctcctgtgtggtcatagggttaattatgtacggctttgtgaaagccatggtgcatgctggccagctgaagagcggagacttccacttcactgactgtttattttttggttcactgatgtctgctacagatccagtgacagtgctggccattttccatgaactccacgtggacccagacctgtacacactgctgtttggagagagtgtactgaatgatgcggtggccatagtcctcacatactctatatccatctatagtcccaaggagaatcccaacgcgtttgacacggcagctttcttccaatccgtgggcaatttcctagggatctttgccggctcctttgcaatggttgttgatttccttaacacaccttgtcacttgaccaaatttaccaagctccgtgagttcccgatgctggagacaggcctgtttttcctcctttcttggagtgccttcctgtctgcagaggccgccggcttaacaggcatagttgctgttctcttctgtggagtcacacaggcacattacacctacaacaatctgtcatcggattccaaactgaggaccaaacagctgtttgaatttatgaacttcctggctgaaaacgtcatcttctgctacatgggcctggctctgttcaccttccagaatcacattttcaatgctctttttatactcggagcctttctagcaatttttgttgccagagcctgcaacatttaccccctctccttcctcctgaatctgggcagaaagcagaagattccctggaacttccagcacatgatgatgttttcaggtttgcgaggtgccattgccttcgccctggccatccgcaacacggaatctcagcccaaacagatgatgttcaccaccacactgctccttgtgttcttcactgtctgggtgtttggaggaggaacgacccccatgctgacgtggcttcagatcagagttggtgtggacctggatgaaaatgtaccattttctatggtctctttccaggaagcaaataagttggacaaaaacatgacgaagacagagagtgcacagctcttcagaatgtggtatggatttgaccacaaatacctgaaacccatcctaacacactcaggccctccactgaccaccaccttgccagcgtggtgtggcccagtctccaggctgctcaccagtccgcaggcctatggggaacaactgaaagaggatgacgtggaatgtatcgtcaaccaagatgaactggccatgaattaccaggagcagagcccttcacccagcagtcccaccaccaagctagctctggaccagaagtcttcaggccagactccaggcaaggagaatatctacgagggagatctcggcctgggaggctatgatctcaaactggagcagactcggggtcaaccccagatggactaattggtatgatgagtgcagacttaatcacatgtaacacaagaccactgaggaatgccaacagccaaggaggtggtgcagagagagacagaaagagtattaagaacatgaattggacagaatcaaaccttatcacatgtatcctcccgtgccttcagaaatgagaattcattatcttccctctgtattatgcaacctcatttaattatctgacagccatttttactgctgaattaggggccaggagagtcaggtcctagctgccattgggatgaaccatatgtgctgtgtctgcagggggccccttctgttcctcagacagctctccaggcccttcatgtggattttggattcaattccattaattatggaacattaataacatgaagaagaagaagaaaaaaaactcctgagcataaatgataagccttatctctcaacttgactccacttgttcggaccatagggctaaatgcagaaaccagtgtgtgttcagtacccactcttgatggctttggagaattcacatgaattgggggccttgttgtccttgctggcgctctctccatgcagttcttcccactcctccaaggagctgcttgcccacgggtgtgtgcatgttaagtgtaggctcttgccagcttaaggggactctctccagggaaagctggtctctttcccacattctgtgttttattcaaatggtgagcctctcttccttgtgtgcactgggacaacttcctgacaggttccctctgcatgctgggaagtcatgttttgcagcatgacccttccacatggggttggaggattgtgcaggagccctcaccttttccaccaatatctgtaactgattggcaatagaggggcaaaaagaacagagctaatgacatttaggccacactgaggcaccaaggacaagcaccagtcaggatctcccccattcccagagtggccagtggctgcattgaagagaccaacatcatagcttttaattcagctgcatgactcgtgcctttgaagccataagatacctcaagcctagcttctcttgatgtgcagatgttctattaggctccaaagagcaggcttcagacttgggagcccaagatgtaatgggtttacttttgagggagatgaagaacgatttctttctcaggcccaaaggctaaaactaatgcatgcttcactgagtgcttcttaggccttaggcctgtgagatcaggtaccttgcctgcgtgtctgtttttcttgcttccaaatagtagaaactgggagaaacttttatattcaactgagtaaaatcttgtcatgtcaggtaaatatggcaaggagagaggttttctaatgtgacatcatcctaataaactttcttatgg

SEQ ID NO: 1101 - protein, 640 aa, Mus musculus
MAGQLRFTSGKDEDHFQHQGAVELLAFNFLLILTILTIWLFKNHRFRFLHETGGAMVYGLIMGLILRYATAPTDIDSGTVYNCGNLFFSPSTLLVNITDQVYEYKYQREINQHNISPHQGNAIKMTFDPEIFFNVLLPPIIFHAGYSLKKRHFFQNLGSILTYAFLGTAISCVVIGLIMYGFVKAMVHAGQLKSGDFHFTDCLFFGSLMSATDPVTVLAIFHELHVDPDLYTLLFGESVLNDAVAIVLTYSISIYSPKENPNAFDTAAFFQSVGNFLGIFAGSFAMVVDFLNTPCHLTKFTKLREFPMLETGLFFLLSWSAFLSAEAAGLTGIVAVLFCGVTQAHYTYNNLSSDSKLRTKQLFEFMNFLAENVIFCYMGLALFTFQNHIFNALFILGAFLAIFVARACNIYPLSFLLNLGRKQKIPWNFQHMMMFSGLRGAIAFAIRNTESQPKQMMFTTTLLLVFFTVWVFGGGTTPMLTWLQIRVGVDLDENVPFSMVSFQEANKLDKNMTKTESAQLFRMWYGFDHKYLKPILTHSGPPLTTTLPAWCGPVSRLLTSPQAYGEQLKEDDVECIVNQDELAMNYQEQSPSPSSPTTKLALDQKSSGQTPGKENIYEGDLGLGGYDLKLEQTRGQPQMD

SEQ ID NO: 1102 - DNA, 73702 bp, Homo sapiens
  misc_feature (1)...(73702): n = A,T,C or G
aacagtactaaccctcagggaaatgtaaattaaaatcacaatgagataccacctgattcctgcaagaatagccattattaaaaagtcaaaaaacaatagatgttggtatggttgtggtgaaaagggaacacttttatactgctggtataatttacattgtattagtgtaaattagtacaaccactattgaaaacagtgtgaagattccttaaagaattaaaagaagctctaccattcgatccagcaatcccactactgggtgtctacccaatggaaaagaagtcatcgtacaaaaaagatacatgcacatgcatgtttatagcagcacaattctcaattgcaaagatgtggaaccaaactgagtgcccatcaaccaacaaatggataaagaaaatgtaatatatatacaccatggaatacttctcagccataaagcaaaatgaaataatgtcttttgcagcaactcagatggagctggaggccattattttaagtgaagtaactcaggaatggaaaaccaaatattatatattctcacttgtaagtgggagctaagctatgaggacataaaggcgtaaagatgatataatggactaaagaacttatccatgtaaccaaaatcacctgtatctcaaactattgaaataaaaaaagtttgaattatgtaaatgataatatagaaaaatatatgggtagagaaaacaatgaaataaaaaagataaacagaaaaagagcataatgattcctacttagaaatatctgcagtggctttagttagggctttgctgagggtaatcctccaaatgaggccactagggtaatgggagagaactttatccataaaacagagttcccagatgaaaagaactccaggaccaaagctgctgcagtgcaaggctaaaaccctcttggaattctactcaacatggagcaatagagaaggtaaagagggtgggatttcacagaatgcatatcatgaatgtgcttaaagagggaatggaagatacattactaggcagcattcaagcccagggaggaattggatcccccaaatgtgacaatcaagagggaaataagaatacatacaaaaattgtattatgaaaaatttcaaccactcacaaaagtagagagaaaaataccatacgttcccatcatgtagccccagcaaccataaaattgtcattacttccgttttaactttatctcataagattttatgaaggtatatgttaaaggtccaggtgtcatatcatttcaccaataaataatgaaaaggctttaaacacactagatgaacacagagaggactggcaaagccttgcataaaactggagaagtatcaagctggcacatttcaaaattttagaagaaagtattttaagtgccactgtctattggcaagacagtgtatacaagtgatttccccattggtgcggggagctcaatgttacaataaatgggcaatttctcacgtggatttaaattctctcataatgacctctggaccaaatgccctgttgatgtctatattggttagcctgaaacaaaaaatattatatctataactttgcatttcttcatgttcctgcctttccccaaattgtactatttacaaaactagggacagaaaatctggtttaggacagctgctctaggagcatgggatttgctcatgcttcctgttttttggctcagcatgagtaatctgtagttgggttcgttcaactttgtcgttgctgaagagtctatagacattctagtgctccaaagatggccccaaacatcacagctggtgaagaaaatctggcaccacgagactgagcccaatccaacaaaattagaaagcaaagtcagaaaaagttcaaatttagcttacagaaggaaggggaatttgatttcaaactttagggctttttctcacaatttaataatcaaataacattcaaattcaggtgtttgaatagtgtatccgcaatgtattttttgagtatttttttaaatggcatacttttttgctgacgtggttaaacacaacttgtcgtcaacacaattaaaaaaaaattgtataggaggaaatgttaatcctttggtgtggggtgaagttaaggcaatttcgctgagttcctattctccctacagccttcaagtgcagcagttaggccactttacacactagccctaggaggatacaaaacacgcaaccacatgaacgcaggagcagacctgctcagacacaatgcaggcttgctctcccgagtggaccagccctgctccaacaggtttaaagaaaaaagacctggggagagttaacagggagcccttcactcacatggccacatttgtaccaaaatcacgaagaaggccacccaggtcatcatagaaaagtactgcacgcgcctaggcaacgacttctacacgaacaaatgtgtgtgcgagatcgccattatcctcagcaagaagctccgcaacaagatagtaggctatgtcaagcatctgatgaagcggattcggaagggcccagtgagaggtatctccatcaagctgcaggaggaggagagagaaaacagagacaattatgttcccgagatctcagtcctggatcaggagaccgttgaagtagatcctgacactaaggaaatgctggagcttttggactttgtcagtctgtccaacctgcaggtcactcgacctacagttgagataaatttcaaaatgcctcggggagctctttgaagctgtctgcaatgctgtaatattttcaataatcctgggacaacagcaaataaaacaaaacaaaaccccctcccccacaaaaaactgaaaaaacagggagcccttctgcttctatccctacatttccacagtggtccacgaaggaggaaacttctacctccacttctgacctcctgaaagagtcatagaaagcatatcccactcttaatcccttggatcagggatggtcagtgggtgatccaagcaccgcattggctgggccatgccttactagaagtaagtttcctgtgctgaggtgcagagaaggttgagccttttatctctttatctgatcagtcaaaatgagcgcagaagcttgaggggtggtggatgtagccctaagatcctctttctggctgctgtctctgcaaaaggcaacccttcttcccctctatagagaggttgagtacttggaagtagattctactgtgcagatagattttaccccagcaagtgtgtctcagagtatgctgtcctcggctttcctgtagatttgaagtgagatgtgggaagcctctggtctaagccgcattatcaaacaaagttcaccaaaagccttacattcttggtgtaccctgttcttgtcagctgtctattttgtgtgtattctcttttggttatcatggtggaaaggaaaggcctgaggttttggctattgaatctctaacagaacaattttgtttttcacttagaaataaatctagttttaagagtagattttggtggaatccaatactgtttgaatcttaaattcctgataattaattggttctgctttttcccatttcaacaattctcaagattatagtgtcataaaggacatggcttaagtaagaagctaggaagacattttttgttttttgttttgttttttttacagaaagaatattcctttaacatttaaaaactgtatgttatttatagtccctccattttgaagcccaaataccctgctgaaaaacttttaaaattacccttttagcaaggattcaaagggtaagcaaatattcataattcatagtctttttagtgattttgttgaggaacctgggaatctcgaagagcctctccaacagctgctagaacacaatgtttctgttacaggtttaattgagatttataggttctgattatattctgagaaacagttcttttccacacctagagtttagaaatgactgtcagttacttagatactggagcttctgactggatagtagaagtgtcattatttgtgaattcatatttatcctagccaacaaagaaacattcttgaagctacatatgatgcaaccaaaaaattgtcattgtatgctccatctttctttgtgaatttattttttttccccacagtaacgcaggacatttttatagaaataaaatcacattgtcctatgacatccattaaaacctgttggtctggatttaaatgaatatgtaaccacctgttgttgatttaaaattcatttgtaggaagaccttgggtgatagggtggggcacagtgtatgtgtttgtgtgtgatacaccaagtcacagtcttcaaagagtctcagagtagttttaaacttttaacttaaaacttttactttagatatagtgttaacatcagaaaattgtatttcaaagtaaattgaattttctctgcacaggtgacatgtagttttaactctgctggccatggaacatgatttaccttcttatctaagagaaccatagtgtttgtcatagaatttattatgtaatttagttggcttaagtgtaaataaaattcatcttaggtgctacttaaggattgctttgagcatagctataaattattaaagtttcaaagttcacaaaccatatacagaattgaatgaaatgaggaatgaatgaggcttcaatgcaaattaaaattttatttttgaaaaatggtattttctagtctttgtgcaaacttcttcacttgggattccttggatcctctcctaaataaactacctgcaagtccttgtctcaaggtctgctttgagggaactcacatagagacaccctctaacaaaggctgcctcaaaggctagattttgaattgatatgggaaaaactaaggggtgaaactatccaaatctgcttgattttgacatacttcatttcagaaaatatttccaagcgtattcagcttctcctagtctggagctttgtcttctctcctaagtctctttttctctttagagaaaaatgtagagatccgggagaggtgaggggcatgatgcctttctttgttagtttttacaaaaattttataatttaacacatagtgtcttttagctagtgaggtcagaattattacttggtgagatacagagtagcagttatattctaagaagaatgcaaatttatcaagtggacacttaatgggagatcaaagaaatgaattttctcagctcttatttcagaaattttgtgctaaaacaagttgcagcatggagtagcatgtctccatcttttccttcttggccttggctccagagctcacttcttttcacccatgaagtctttatcttgggttaggagtaggttccagccactgtgatgagcccgcattacctctgccttatgcagaaccagcagagactgaataaaacaagaagcccgtgagtgaattttttttctcatgatgggccctccaagatgtgcaagacagaagaggggacctatagactgaagtttattatttctattgaagaggtgtcctttctaaaagaaaagagatgatgtgctgtggacagaaagctgaggacaaaagcaggggattgcaggaaacagggtgaagagggcctgagttgggaatcaagggatttgcatctgggaccctccttattccccaggcttcagctgtaagattgtcccccctttgatgacatagggatgacatgactggatcacaggcattgtgtcagatttgcttcaacctggctgtatacagttttgggactcttcaatgaaaaaaatacctaaataacatccagtacgcattgggtgggccaaggccagccaaatagcctctagtgcaggtggaagaagattccccttttctctggtcgtcactgagtgatggacttctgagcatcaagaatcaacacagagataacagttcacagagggaaacagtgaggtctgcacccatttttccctcctcagagaatggctggaatgcacttgttgggtagaagaaggaaaggatcccctatccatgccacacacatttctacacttgcattgttaataaaatgatacaaattctctaatttaactcgttttcagtgatttttaatctcaccttcccactataatgaagagcagtggaaagaacatggagttggggtcacatcctgggttcatggccctggatcccacagaccagactttgtaaaggctgaaggaaagaaaccaagcattgaacagtgaatttggggtgggcttaatattgtccaagtgtttactatgggatttaattacccgtgaaatttttgaactttcatttctctatggaaatatactaatgggaggggtccatattattcaaatttaggggcaacttatgctaacatgtgacttttttcaggtggggacagctaagataggtctatggtgagcttgaaaataggataggggatgaattttgggatgatgacatcgtgtggctttcaagcaaacttaattacagtcctgtcctggcccatttcagaagcttggagtagggtggggcaaaatatgaaacttccatttcactggtctcagagagggataaatagcaagggaaaggccacatgaatgagacggtggaattttcctataacccagggcctgtgttgtctgaagtattctctgttaacactaggggctgagagagaactaagactgggcattgtggagctccagggagatggagaggggacttctcagtatgtctccctacccaaagcaaacttagcttctcgacaccctgaccccacaatcttcaatgacctcttacaagaatgaggagctctcaagtgattggttagattctgtaaagctgattggatcccattcactaatgggtgagattaccgcaccatgcaaagttacactggcctgggaggttccactcttcagttctttctttcattgtggctggatgggcaagctgagacagggcacactgactgcaacaggctgggccatcctgttctttctctttgctgcttctcacttgcgtgtcgcatcttgcagtagccagcaggtattaatattgagatttagggacagtcaagaattcctctttggtccttgtgcctaagttttgagtccatcccaattttatctgagaacctggaactaatgatcctggttaccaggtcacaaaacagcatgtaatttttaactgatattgtttcttgtgtgaatatctccttcaggaatctcatgaaaaatagtgattactgacagtacaggatttgagaatttgaggaactttggctgttagagtgaccaagtttgcttgtttgtctgtgagtgagggggtttcctgggacacacaactttcagtagtaaaccaggaaagtccctgataagctaggatgagttgatcaccctggctgaaaagccatctaaaggccaatacaccccacatgcaatttaactcctactggctgtgtgaccttggctatgttgccaaatctccctgagccttaaattactcaccaggagaagggtgagtattttctgcatattaaattagactaagttaaattccttggcatattttctggtccatagtagactctctattgttacatgtttccattttattttctcacttatgttggtacagcaaaataaaaaatgatattctaaaaagaaaacacaaaataggaagaattgaattccttttctggatggaggaattggagatgtttcctgagccccttttcttcaagcttttccccccaatgtgaagcagcatcaggaatgaacaatggaatagtgaatgtactccattcctggaataaagcaggggtcatacattcaaacatctgcaggggccacacggggaccatgaatgaaagaagagggatgaatggacttgtggcaagctggttgcaaatgcagcaggcaaccactcagccccaacagattgtggccatgtaagaagggcccagtgtgccagatcttacaagtttttcttgcaaaaagccatatgattttttaaatgttaaatatactgatttgaatgtgttgacatcaaacctaaaactttttaaaaagatgtgtaagccaatcaaaacattctatgggccattaatcttttgtcaagttgcttcattggttaaaagagtgaaactggatgtcacggatcaaccagagaatgtttattctactcagatggaataattgtgataaaagaaaaccaaagtaattcaataatgacaaaaaacaaaaggacaggaagtttctgaatttgtgttatcttgtatatctgacaactcgactgaacctgtggagttgcaaaatcataaaggtagaacctgctagcaaagctccatgaaatgcttgcaagcattagctgataggtttcaaaacagtatgaatattagtcatcacagatattcctgccaaaaagggtagcgtgtcagaagaacatctgcagcacacataaataccctctgctaagttaaactcagagaggaaataagcttccaaagttgcacaaagcaaagatgctgaaacagcagagttttgtattaaggggttgatagacttgctctcatggtgaaactgtttgttgaggaggtagttagctcccaataatattacatgcttgacctttagcttttagtgacaaaaattgtttcaggacgcatttgggctcagcctactcaataagaaatcacattgtataaattgagcattaattgtgtcaaaatggggatcataagtgattaatactcccaaattacaatgatatggtaaaatgaaaaaaaaatcagctaaccccaggatatacccaaatgtgttataggatcaagtgttaaaagcaagcaggtcataacatttgctaagaaaaaagaaagaaaaggaaaaaaaagctgcagaacccatggtattatcttgaactattttaaagtagaaaaatatgaaatcagacaggagcaacctgccacatggaagatgatctgaagaatcatcactcttatgatcagaatcctgtgaatacagagctttcatttctggtggcagaaccatttctcagtgagcaacattgttttgccataggacagaggaggttgtgatctgttgcagatttctgtgggtcctggatgccgagaccaggaaccctacagagagaaatccatgcgtgcggcattgctgaggatggctgcgtgagtttctctttcgaagtaatgtgttttgttttttttcttttttgtctcaacgtatccaaacagtacagttgtagagatggggatggaattttatttgtcttttgctttcattgttttctcttgttaaaagaaaaacaattgatttagagtttaaaggctgctctgcaactatcaattatataaagccaaatagagtcatatactaaatcctttcttgcttctcaactaaaaaaaaaaaaaaaaaaaaatcctgtgaaatcactttaggtttgcttaaccaatgtacagtcatgatttgagagcataagaaaccctataagaaaccctatgccttaagtgaatcccattgtgagatacttgagctatgaggcggaagtttcaggctaagcagtgtaatatcttttcaggaggctaatatgctgatccatttagagcacagaggctgattgataactgtgctatcaatccccatcactttggcaggtcttggttagagaggaaagatcttgcatttaggtgaagttgagtcaggaattggctttttgaacttagaaaacgttgctagtgtaaggctaccttttttattattaatctacagttcatatttatgcagcttaagaagacttatttggaataataagaccgtgattcaagatcttagcatcattgcttgcagatttgtccagtatgaaagatattttcatgagatgaatcacttaaagacattaagagtcagtgatgaaaccacacactctcgagtttgaaaagagacagggctgctttaagagagaaacaggaagttgtaactagaagccatctgaatactaagccagggcagaatgcttgtgaagtagcaactaaagtggcagtgtttcttctgaaattctcaggcagtcagactgtcttaggcaaatcttgataaaatagcccttatccaggtttttatctaaggaatcccaagaagactggggaatggagagacagtcaagggttatgtcagaaaaggatgagtatcagtttcaacatcagggagcggtggagctgcttgtcttcaattttttgctcatccttaccattttgacaatctggttatttaaaaatcatcgattccgcttcttgcatgaaactggaggagcaatggtgtatggtgagtgcataaattgtgagattgatgtgaaacttgttgcttgagcgtaattagagacttgtgctcagatagcaaagtaccgaaactggagaaaatgtgctgattgaaatgtcattagtttgatgaaaggtgctgcagcgtaacgaatgctaatctctttacagacaagccgccgaaatttgccatgtcacgagagcaaatgtcacagtcatgttctcacacggcacataatgcaagtctgttgacagatgcgggtccattgtcatgtggggagtcgagggcgagctgtttgtttttgtaatgatgttgggaagtgatggctctgcagtcacaaagagcagccttctctcactggctgcaccgatgaacattacgaagttctagaaaaaacatcacttcaaaatgcctggagtaattcctcttatatcaactaatttcaagaagaaaacttgcagaaactaaccccacccctcttaagagaatattgtgtccaagtcctttttatttatacgaacagtgtcttattttcttataataaaaagttataaataaacgagagtttctttatgcagtactttttacttcttagcctgatttcagatgttctaatttataatgatcattgctagtgttatttgttatgtatctcctatttatgtattggaggccaaggtgtggaaaaatatttaacacctgcagtattgctctttctgggcaacttaccgtatcattcctttcagaaagtttaataaagtctgacagagattatctgtctgtactctcatcttttaaagtaaaatgaaagacaccagtttttactggtgttactgatgaaatagtttacttcactgctcttatctcagcctgataatggataggaagtttgaacacaatggcaacaggcaaggcattgctataatttatagcaaataacatacttttatatttggggtttcctcattttggaaatcctgaaaccctttcctaagcctgagattcagggtacagatcaatgcacattgtatatgctaatcctgtggtgtcctgatattaacagtgtatagttgtgatttcagaacctaaggaatcctaagccttaagtggatcccactgtgagatacttgagctataaggcggaagtttcaggctcaggaggctgatatgctgatccattcagagcacagagttaaattccttggtactgagggtcttttaaaaattttttgcttgggagtgaggagggacagcattaggagatatacctgatgttaaatgacgagttaatgggtgcagcacaccaacatggcacatgtatacatatgtaactaacctgcacgttgtgcacatgtaccctaaaacttaaagtataattaaaaaaagaaaaaaaacataacccaaatgcaaaaaaaaaaaaacctttttttgctgtattgttttatttattttttaaaatttagtggagacagggtctcactatgttgcccaggctggtctccaactcctggcctaaagagatccactgaccttggcctcccaaaatgctggcattacgggcatgagccaccattcccagccagtattgagggtcttaacgggcacaagaaaactctcatttaagagaaaaaaaaaatcacaatcaggtgggagagaaatagccaaacaaaaaggaggggatgccatcagatgtgaagccctaggttcctgtcatttgcctatctccatcatgaacagaatttttctcttgacttgactaataagtaatctgcaaggatatggaatagaatctgagaagccagaaacaatgtaattcttgatatcatattaaagggacatatgtgctttagcaaaactacccagatttaatagattgccaacctttattagagggaaagatttcttcacatccctgaatttgattgaactatgactcatttaccaagttcaatggtggggatattgttttcgtaaaagttttgataacctactaaaattcagtcatgttttgcattcacaatacatacagtaactcttacttttgaatctgaaaaattccaggttacctttaatcctgcaaaactctctgaaatatttttaaattgtgcttgaaataataaaatagtagttcattgaccactgctattgaggtagcatttctctaaattgctgttcttaaggcagataaaggcttaaagtttatgagtggaattaagttcggttctctgattcctattcttctttcatgagttttttaaagtaaaagttattgaaagcaaattctgaaccagtgcaatgtaaaaggattataaaaattatggagatatgcatatatatgtattctcttactagaaattttgagtatctttcagttatcttgaactatatagatcaatgaaaagacatattttagtgatgtttaactttttcttggcatagaatcataattgttaggatgtcaaagaattttagaggttatcttctctatcccctttattttagagaggcagaagctgaatcccagagaagtgaagggactttccaaaactgaatagccactcatgactggtccatgtgctttcactcatctgcatgtcttactaaggttcacgttcacctgaaagaactctccctgtgttttctgaaagtactccatatgggtggcattcatgacttgtcacatttcttcttcagggatgtcctaaatgttatatcttaaatgcttattaggaactttctatcagtaatgtaataaaatagtctgaaactacaccagaggaacatgatgggatactgtagtaaacactttttaatgataggggaaaggaaatgccaagtgaattaattgtccaacagctataaatgaacttggaatcatagatggggaaggagccttaaagatcataaatccagcattctcattttgcagacaaacaaatgaagacttagagagataaaagtcgtgtaattagttagctgttgaggtgggattcaacctccatctctttaataagagatgctaagatatttaaaaataagtaaattattgcaataattttcctggagaaaggatgtgtctgtgggatctagatgcatcctcatatggttaagctttcaggattagccagattctcttttccaggaggtctaaaagagtgaattttcagcatcccacattgtactatccccctttccattaaaggattaaactcttagcttttgcaagagcaggggggcatggtgataactaatggggaagaaaagaaacaaaactatgtttaaaacttaagctttttgagctatgattgtgccacttcactccagccttcactcgagcctaggtgacagagtgagactgtgtcagaaagaaagaaagaaagaaagaaagaaagaaagaaagaaagaaagaaagaaagaaagaaagaaagaaagaaagttaaacttttaaaatttcttgttcttaaggaagtgaacatttgagagtagactgtaacagtcatctccgtgctacagacacatatgcttgtaatgaaatatattttaagatttagtggacctgcacctaatgcttatcaatgaatttggctagcaactcccctactccaccgagtactgttcttgctctcactatttgtataatgtattacttgtcctgtatcaagaatgataaatgtttttccccagcatcaaatttcctataatacttcagcctattctgccatctgcttttctgccagtattcctttgacatgtgtcaaatgttctttagaagactcgatagagttgagtctattttatcaatgtacctgagagtccaatttaaaaattctagagaacaggggcttagaaaacaagcagtttaaaaattgcagagaaaagtgatcaagcagaatgtttaatgttcttttatatttcttgttagaaataattttcaagttgctaatcttaaaatatcatatgaacacttgtagagaccaagaaaaattgtgtggcatttggctagactctgtgtcaatcagagattcatatgatactccaaatagtataaataatccattatataaaaaataggtttttcttattattaagggtcataggaagcttataaaaattagtggcagctttataaccatatttttgcttcaccaggaacagtaatgggtaatctattatgatattcgatggttctcatttcaaaattgaaggattagaatccataactggtttaaaatataagccataatgatactcatttaaattggactggaagcataaatgacaattagcggttaaaatattgattgacagcagctggtgcacttagtaccactcacttagggcctgtatcccctgttcagtgctcataaaagaaatttgctccttgctccctgacagcattaagaattccattatatatcactgggggctgccatactttacaggacatttataatcctgtgcatttgagggctgggatctgagcttagggacagagcaatttaaacctcttagaattctgcctttgacttcctggccttcccatagaagttagtctgaattcatgtaaaaattgtggccactgtttagtgggcacataacaaatttcaaggcactaagtttacattttgaattcattaaactatatcatattaaagcgttttcagattctttaagaatgtgcttaacagttaagtaggacaaatttaattcactcaacaccaagtttttcaagatttaaagaaaatacaattacatagtgaatcatcaaggattgaaaaattatcttttctgaaaaatcttctgcaggcattaatttcttcctagcactccctgcaggttcctcaggattaaattgggttgttggacatgttggctacaccctcctgatccattttaccctcctccaggacagcccagcctccctgactgccaggcctatgggagatgcttcctactacttcacccccttcccgctggctgaaggtccttccaaggctctacttattccactgtggctttttttatagagaaaatattgatgtgctcccctggagatttaagtttcttaatcttgatgatttttttttcagtagctagatgcattattttgggcaagtgatgttacatctggccttatttttctcatctataaaatggggaagaaaggaacagatatcacatgtctcccttccagctgcaaaagtccttcaaaattcaggccaagactgagttcaaccatcaggcatctttcagccactccagcccaaaccagaagctttccttccagaacatggcagcctataatgatatccagtctgttctctcagacaagattttagttagtgttatttcagcactgttagtacttcctgcttctgctctgattttgcaaggagtgctcagtaaattctgttgaattcctgtcagaaaggtgaggagaacaagttaatagtgaggactggctatgtattccacagtttgcagaagcattttttatgaaaacaagagtagctctggtttaattttaagggatctgcaggaaaggtaatcacggttaggagcccagcatactaaacttcttctcccttttggtgtaaaaaacttgatttttaaggaacttcagagagttgtacaatgttttccatgtgttaatacatttgccagagacagggaaaataatggaagaatgaaagtcatactgcactctgtatgtttttttatgttttttggggtttttgtttgtttgtttgcttttttgagacggagtctcgctctgtcacccaggctagagtacagtggcacaatctcggctcactgccagctccgcctcccaggttcacgccattctcctgcctcagcctcctgagtagttgggactacaggcgcccaccaccacgcctggctaacttttttgtgtttttagtagagatggggtttcactgtgttagccaggatggtcttgatctcctgacctcgtgatctgcctgcctcagcctcccaaagtgctgggattacaggcgtgagccaccgcgcccggcctgcactctgtatgtttttaaaagttgattttaagaaaatagccgggccaggnnnnnnnnnnnnnnnnnnnncctgtaatcccagcactttgggaggccgaggcaagtggatcacctgaggtcaggagttcgagagcagcctgaccaacatgatgaaactctgtctttactaaaaaatacaaaaattagccaggtatagtggcggatgcctgtaatccgagctactcgggaggccgaggcaggagaattgcttgaactcaggatgcggaggttgcagtgagccgaggaattgaccactgcactccaacctaggtgacaggaagactctgtatcaaaaaagaaaaataaagaaaaaagaaaaaaaaagaaaagagcctctatattttggataagtaaactaaataaatgaataaactatattctgaatctcaaagaagatatagatgaaactttactgcaaactactgtggtgcctcgaaggactcccccctcagtgtttgaaaggctaatgaatgtgcatatcaagaaaatagatttatgattcaaattatttatgtagatatcatataccatctacattgaattaatgttacatagttaatgaagtggggatatggagagctgatgtttgttaaacatctattatgtcaaaaagttgatatacaaaaataaaaatagctaacacaaatagcattcctgatataaactatgctattataagcactttacatatattaacgcatttaatcctcacaacaaccattttttaggtaggaaaactgaggtaataaaacattaagtaacttgcctgaagttgcacatgtactaaatgccagggctaggtctcaaaccttagcagtttggcttcatgtggtcatctgctatcttaaacgtaggtgtgtttgtgtgtgtgtgtgcgtgtgtgtatgtgtagggggtgtgttatcattttcatattacagataaggaaaccaacactgagagagagaaggtaacttgctgataatcaacagggctgtactcaacttcaggactatataacctctgttctttcacctctatcgcttatgtagtcctagaataattgctgttttttaattaactgttcgctccgtgccagatgatggtaccttaggaagtttacagaagagaggtagagattgagatatgtaactatatgcattatcactaatcctcacaacaaccatgctaaataggcaagatcatctttagtttgcatataaggaaacagaaactcagaaaacttatgacttaaccaactctgcccagaataattggcaagaacactcttttgaaagcgtgcactctcaaattctggctgcagtcgttctctcatccaagtctgctcttgatatgcaactgtcccatgaagtcagggtagggaatgattgaaggtaaaagtagttaagtttcttctctaccttgaagcctctgaaatgttccactgtctatagcaaaaagcccactgtgggaaacagaatgggggcaaaactatgaaaatacatccatattaagtagctggagttgaaatattccaagcctacctggaaacattgtcccagcttgagggatagtcatgttgcaagttcatggtctttctggttttaaatgcctatggttgaaacaatgggtgggacaggtactataaatagtttgagaagggactgtgaatttatatgaatcatgcaaaataggctttcatcatatgttagttaaactgaatttaatttttggaagatactgaaggtagaaccattaacccataatgcttctgggttttccaagttctgaaatctgtgtgcatgagcccaagatggtatgggttttgatggaatttcaagactgtgaggacttatgttggtaggaactactatcttattactatcttatatgacaatgcttctcagtgtgtttcctgaccagcaccatcagcagcttgttagaaatgcaaatatgtagttcacagcccagacctagggaatcagaaactctggggtgggtgcggcccggtaaactgtgttttaacaaactttccaggaggttctgatgcactgaagtttgagaaatactttgctaggaaaataaacttgaaatatagtgcctagtttcatttcctctgttttctcttatttctttcttatcccattactctcctatggtgaaagggggagggttggaagaccatctccctttactaaagagtccttctttcaccgtctataacactttgtaatgtctccatctctggttcgagaaaaaaataaagtgtgttgtataaacattacaaagtaagaaaccatttgtttattcagtatacgtctagttagacatctctatttctatgtttcttctgtcaacttcctaagatgattgcaaggaaggatgttagctatatataagctgatggctgagatagtttctaaagaaaagttatctattatactgttagaaatcccagagttttgtgaagtgtgtacattgtgtatatgtgtatgtgttgtgtttgtatgtgcttgcatgtgtgttgtgtctatgtatgtgcatgtatgtttacatatgtgctatatgtgtgtgcatgtgtgcgcttgtgatgtgtgtgtgtgtgtgtgtgtatgtgtgttgtttgttgggaaccaaggatggattgtggacattagacaccccactctgatggaggatctgatgtttgggactttctggcagttttcatatgactctatcctgtgagaagagggaaactttgaacaaggcatcacaaggttaattagcttcatggactactttccactttggaatttaatgaggttctcttaattggcaggtgtcccagacctgttctgaaatcattctgggactcttcaccaaaacaagttgatggtgagctagtatggagcaataaattgtgactttttagcaagacctatagtttccttagtttttttaatttaaaaggttggtgggagaacagagaaagaacaaactcccccaccaaaaacagaaggcattgtacgttgttactacatcatgtttttactttttgttccatctctgactattctcagagcaaaactaaattgctaaaagggaaaacgttaggaaatgcatttagatatttgaagttcaaacccatattatctctctaaattcatgttctaaaagagacttttataaaatgggaagggataaatatcaaataaaaagttaaaaattttgtagatgcagttaaaatctgatctttgtgaatactatcttacagttaaatgttattcactgatttggtttccttaaattattattcagactatttccttcttctttatgctcacatttgaatccctagttcataattttttaatctgagtgactgaaataataatgtcacagattccctgccttaaagtcttgcattgtacaaagttctaatgatggtaaagaacattcttccttgagcgttattcctttcatcttggaattcctgaactcagatgttctaaattgtcccttatgtaaatatagactaaatatgatgttaacttcctctccatgtcctctctgtccctcaattctcttttctgtcttcaaataattatctctaaatgctgtttcctctgctctaaaacagagcaaatctgcctcccaacaaggaactcgctcgattcttcctcaagaccaccttgccgaccaccttgccaacaccctctccctcctgaacactctccagtcctctgctgtgccaaagccctttgcctgcactgccctaagtgcccatcgcaaactgcttgatgtgcgtcattgatgctgggctccttgatttctgtatacctctccctaaaacaacatgtcctcttctctacttggtgaactcttacacatccttgagaacctcttctattaagtttttccaatactgtagggagtggggttagttggtcttttctttagggtcccttaaaactttgtacattgctttgtgacaggaaaaccaatggcttttctatctgttaagatgcattcagttgcaagtaacagaaaccctgacagaaacagaattaagcaataaagacattatctcccataactggaagtccagagaagagtagtcttcaactctatttgattcagcacctactgttgtcatcaaaaaccaaggttctttccttttctctgttctgctaccttcagtgctgacttcaacatcaggctggcagtgaagtggctatgccagtgcctggtgtcctaaccgggcccattaatatgctggaaaagaagagagctcatctcttctgtgtctctcctgtaggatgtgaaaacctttctaagaagctccctagcaaattcccttcacttcttattgacaggaatagggtcacatacccattccaaaccggttatcagcagggagagtgagaacatccccggagctggagtgagttcaacttcccctgagcatatggctatgtgtggaggggtggacagcaaataaaccagagctttgtggggtaaacaaggatagacattgggctggcgatcaataggacctgatacacttaccagtttgaaatatgatattatataatattacatggtttgaggctatatcttcttattttagagaattggcgatgcctcatgaatctagattattcttggtagccactcaatgcagtgagagtgaaagaactgcaaaactcagttctcctacaatcttcatgtggtaactacatttgctttagactcctaaattcttccaacatcatgtagcacttaaatatagacctttgtaatagtctaattaggcatatgtatatagctgtgcttgctgcattgtgcaactctggggaagctctgctcctataggaatggagtctaaagcgatctggccagagttgtgccaagcagcagggaactctgtgtgatggtgtctggacacaattatagtgttgaacacagccaaagagattaaaatctcctttaaaacacttttgtgttttaaaaaacattctgaaatctgctttatttaagctttttaaaaaagtaagtccctattttttatttctctaagaaaagccactttaagaaaatgcttcagcctcatgtggaatgaccatcagtaagatgcaagggaaattggttatgaaatgcagacttcatataaaaaatttagtaaatacttgttataccttattcttactggaaattaagatggcaggatttggcagaagggaaggggctggtaggttaagatattttaatattttaagggcaaaatcatattttatttatctttataataactcctacaagtcctagagcaatgccttaggtgtctgtggcatgaacacataataagggagtaatagagtaagggactggagttttctcttattttcaatgtggataataaaatgagaatcagttcaggaaggtaaggctcatctttctaatgttccttggtttgagtactcctgaggctgtttcctccttccttctgtcccctctcttctttcttctctcacaaacatcatgctatcaactgtatgccatgcatgtgctatataagagttatgttgaacactctgcaaggacagggacttcacagcatttggtgtgatgttccttatttgtgacactttaaaatgttggtaactgactgactacataaactcggaggaccttttcttcttgactccagggagcttgtggacttggagaaagttgggctacaattctgcccaaagtgattggcttttctagaggaaaagagataaagaatagcacagagcctctgccctaaacagtctcattgtctggttgaggagaaaagccaagatctgtaaagaagcactgaataatatgtctttataaaactggtttctaaagtgtgtggttcaaacaataaatgctatcagaatgcaaagatgaaggagttcaatgagcacagactttatcagggttctggtgcccacgggtgggacttaagagggacattttaggatagtgagtgctttaggaatgaagtccattgtccatgctttctgtggtacttgtaggctgtggagagaagtcagggttcattaaagtgcaggtacactctgctgtcatcctaggtacccagacgcccagacttgaagaagcaggggatacatctagactagagttccttcctagagaaggagatgctgccaactggccaggggacagatctcagagaagtgttgtgtatgcaggaacctcaacctggggccagggctgtttgcacatggactgggtgggtatccctttgcaggggcaggctctcttctttcctcctccagcaagaaggggcctggtttcatggtttaccaacaagagtggtgcttttgtgctgttcataagccgtggcagccagtctcctctttccttcttctgtgaacaagtgatttctgctttcttaatcttgtatctttgaatggtataaaaacaacctactctcattaacattttctttctactagccgtcctactttatctgtcacctactcatatatgatattgtgtcagtgtacattaattcaacactccatatttctgtcagcatatggctaaaacactgagtcgatgtttcactataaaaagcattatgaggctctatgggtaagtagcctctgacaaataaggattttccagctgccgctgctgcagcaagagtgcacaaatgagtgcatgggttttttaaccagatgtgttaggaggctgagatttttcacactggctcttaccatctagcaagatgttgtttcttctcaacccttggggtttggggaaaaggagggctgaagccttttggtgagtgtgttaatttgggtcctccaagaagcagatgctagaaagagattcattgcacaaaagattttcattcctttagagaatgtggggagtgagcatgaggatgccaggacagctgtcaggttttgatgcaggcctgatcctgtgaagagagagaaggaaggaaagctgggtaggaaatctttaggctgtggtgcaattctaggaaaagtttggcaagattaatgatgggtccctgagccatggttgcccttcagaggagtccccatctgcttgccttagtatccctgctgtgttcagtcatcggctgggagcctgacctcagtgtgaaagtggtgatggattccagagcagagaagctgagaccactggtcaattgcctcctcagagtgggaggtacattttcatctatctgagaggtacattttcatggctattacatctggtcacctctgccacaatggcagcaagcagcttcctctgttcacttcaatgtgcttcttctcgaagaatgaggccagagctagtgcagagggatagtcagggccatttaggtttggaggtcttgtatgaatttaaccacactaggcaccaggccatcactattatgacaaagacttgctttctctgcttgggaactaatagtggacacttcatgtttatttcttgttgtttcattgaaagcattttgtaaaaaaaaaaaaaaaaaaaaaaagagtgcctcgcccactaggaattacaaatgacattaatatggattctttccatttaggccccatgcagatagtatcttgtgcttcccgtctttgtagaagtagaaagaatagtaatggtgtcattcatggtacttgctgaataacttttaggaattaaatcctttctaagcaacgtgtgttgaaaaaatgatgttcttatgcaagcaccctaagccacgtagagtgtagatgatctatgttcccttcttgctcctgactagttttattgtcgtcattcaacactgagcatggaaggttgcctactgtgctgtggtggatcaagcactcagtgagggttacgtatctataacttattttctcttgctcccagagatttggatacaatttttctaattactctggaggagtcagccaaacactgaagcaggaataataaaataaaaatattcttgaaagaaatctgcttgcattctcatcctcactctgattagttctcaacattgttgccaaagtgatggttctcacatgaaagcctgattggtttactcccctgcctaaaatctttcaatagttctacattaccattgggttaaaaatcaaaacctctcagcatgagagaggagcctctttctgacctggctctgcctatggcctaggtctagagtctctctctgtctctctttctctctatttattctctttttacaccactagtgactccctaaatgcaccagatttcttatgtctttctgtatatatgcattgtgttagtaaggttatcactagtgatttcttacacagtatcccaacattcttccactggtaagaaccagccagatgcaagacaatcaggaagcatagcacctggctgagcagccacttgccaatagcaactctacacacagggagagtgtagatcctggtctacatacagggagagcatagatcctggtctacacacagggagagcatcccagctgtctctgctcttacgtgctgctacccatatgtgcaaactggatcccaactcattctgattcagctcatctggacaaatctatgtgaccttttaagatttatttcaagctttgcataattcaaagggcttcggaataccccctgtctatactcatgtatcacagagtgcttcccagcggtcatagcacatgtcatgttttattataattgtttgttcatgaatcttcacttacacaaacgagctcctgtaagactgggcctgtattctaattttatacctataaatgtctggtacacaatatgcaccccaaaaatgttttactaaagaaataaaaggttattagatgaccagattcataagagaggtaaaatctccaaaattagaagttttaaagagtgaactctggatcatttatcccaaaacacatacatcagtcctaattttaaattgacagagtttaggcttctgatgtttctctgttgcttgttaataaatctacatttaaaaagcccacagttatcagatcgccatgagcatcttaacagagtttaaaaacgtaaaaattcaaggattgtcacttaggttgaattgtttatgaaaaggaatgtggtatcattagaatgcatttggctacaagtaaccagaaactagattcaaaacggaaaaattagagaatgtattatattacacagcaagaagtttagagttagggtagctctagggcaggctggttgatctagtggctctgtgatgtccttcaacacctaggttctgtcttctgctactatcttagtcctaccctcctcagtatattggctgcattcttggactggatctacttatggtcacagataacctgccagcaaaaaaaaaaaaaagaactatattgccttagtcatgtcctgagagagagaacaagaacacctctcaccccaaccatggggtgtgacataataaagtctgatggggataactgagatttgtgctaatctgtggaccagaaacactcccaggggaattccatctcctgattagatgactcagtgtctatcacagagcaaaggttttcttaaagtatttggatggatagaaggagttaggtatcttttctctccaaaattagtaggtccactagggagaaaaaaaatgggaagatttgctgagtattgaagcaatggtgctcactacaaatattttaacactatattatgttgaactggtatccatgcaaaagtgaacacttttctagaccaggcaataacccaacactttatcctgtcacttctgaaggttccaaatcatataggtttccaatagtggcattttagattgccttcctccagtaccattatttattcttttttttttaggccttataatgggactaattttacgatatgctacagcaccaactgatattgaaagtggaactgtctatgactgtgtaaaactaactttcagtccatcaactctgctggttaatatcactgaccaagtttatgaatataaatacaaaagagaaataagtcagcacaacatcaatcctcatcaaggaaatgctatacttgaaaaggtaaggatcctgtctggtattatatatttgttttacagtataaataattgtatcatatttgagcctttatactttttatataatgcattcacacacacatatatgcctattttaacaccactcttttggagacgttaattgactaaggagtcaaaccctgagttatacccttattacaagctgagttgcctgtatttttttttcctagaagttaggaaagaaaggttttcttttttgtttttctgcaagccacagttatatttggttaaaagaaaaaaacatttatcaactctgcctttcctgatacttgattcaagttttcacacatgtgctttcagcaccgttgtatataatgccagctgaaagtgcagttcaaatctttcttaagccaaagggaaaatggagtagaataaaaacattttcacttgcaaacctggaaacctaggatgactggcttttggctaccaacacaaaacactggccacttggctatgtataaatacactgacatgcagtcagtgtcaagaaatcgtgactatcagtttggttaaggaatttaggtagaaaaaaattgtgaaatgagtcatcttttaaaaatagtttcataattgcagatttgtgaacggcttcagttactggaaggaaaactttcttctgctttcaggaatctgggtcagaaatcaggttaggttatcttttgtggtgccttgtaaaccctggatcagtctttggaataaatgaattcctgtttaacaagtgtgtactaagaaccaggatctcacatcacttatttgagattttttttcaggtcagagctgagaattttctgacactgtggaagtccattgtttcacttttatcccatatgtacttagtttttatgttaaaacacacctttttttttccattttaagaggtttggaacagaaggggaggtacttggtctgccatttttcctcagtcaagatgactaatttataataattgttttcatattatcttccactagcacatttttagattaacttcctcctagcacttggtaagggctcaggaaagtcaaactaattataatattagcctaaatcagacttgggaaagtaaactgaagcacaaaaaaagcaaattagataatgtatttctgaaataaagaggagcaacttctagatctgccactgcttttggattatctgttttggattatctcttccatgtgtttctctttgtttatatgataataataaattatctcttttaaaataaatattttttaaacttgttagcaacataggatttaaattaaaatacattcttgagttttacctttggttagtacctggacatgaattatttctctcttcactctcctacacatttttatctgcatttctatacagcactatttcttcaaacaggttgacacctctcctcccaccaaatgctgataattatccttgttgctgtagcaattatattcttgaacaggattgccaataaatgcctgaccagaaattttgttattgaattattcacatatttattccttcatcagcatccagagccaaatgtttgcttttgaaaaattagggcaagagatggagaaaacgtctaagttgctggagccctcttggtgttttcagtgagtggattatgagctctgcaagttcggtacataaaatgtttacttgaccttgagtggctcaagtagtttctagatgaacttgtcaatcatggcatctggagatgggaacaggtgactcagcaacctgactaagtcctcctctcattgctggtatagaaaggggcatctactagcatacttactgtattacatggctttaaggggaaaagattttgtttataaatacctggagtatgtcactatacatatttgttgcttatgtggcaatcctgggggacactagttaatctgcaaaactgaacaacctgtagcctgtcttccttactgagaattctcctttgggaggcttataaggaggtaacattgagtaatgtttaaacaaagttaggattagatagatcttccatcccccttctttgagtttcttaagcttcctaatccctaactttcttatttgtgaagtgaggagcttaaaacctattctgcaggattgttttaatgttcaaatgagatgatgtgtataaagtgcctggctaacatggggccttcacattgtaccattgttactaccaccactactactactagtactattgccactgcactaccactgccaatgtcattgccacttccactacttccaaaaataacgctaccattgctactattagataatgtttgaatgcttaatatatgccaggaattaataaaatgtgtatttcttttattaatttatttaacactcatttggggagataagaccaacgtataatggatacttgtatataattcagtcctaaattgtatcatatgaattatgaggactgtgaaactttacagactagttgtcataggtacttgagctggttacataagcttcttggggagatggcacttgagaagggctttgggtaggcagtagggattgaactcagaatggccatcagggcagggtggactggaaggtgagactgcagtaagtgagtatccaggtaagaattgaagagggcttcatgaaaaacctggatgctttggatcaacagagcctgcctgatttgtaggaacagtgtgaagagaagagtctaagtttccaggattttaagcccggataaaagaatatgaagtttgtagggtaaaagtttggggaggaaagaagacttgaggaaggggtgggtgcaaatgccctggatctgcatatacgtatcacctaatttagagcaagaaagagacccgacctcattaaattgaacctcatcatttcatagatgggcaaaacaagaaattaagcactaaaatcaatttaagtcagtggttcccaaactctctgcactttggaatcattgggaagcttcaaaacatactgatgactgtgtgactgtgttctgcctctgggtttgtgatttgactgatttagggagtatcaagggttttggaatttttagaagatcaccaaggtgacgctaatgggcaaatgagttagggattttagtcctacttcgagttcaggtgaaatggtgaggagagagatgctgcgtttgttcttctttacttcacatccactgctgcagatctaccagccccttattttgttcactcaacacaacaagaacttttttcttcaggacctctgtacctgtcattcctttcacctaaaatggcctcacgtctaccctttgaatatcagcctccttcacattactagagttttggcttgaagtaccatcttttcagagagggcttacccattttctcacactgtatcctccctcccttctcttctctctctctctctctgtgtgtgtgtgtgtgtgttggggtaggtatgtgcttgtttctttctctcttatttcatagtacttgacaccatctgaaattatacatgtatttgcttgctttttgtttattagcattcttacattgcttattgtccattagactgtaaactttacaaaggcagggaccataccttttttactgaccaatgtatccccaaagcctatcctggtgccccatgcctaatagctgctaaacaatgaatgaatgaataaataattgatgagtctgagatcttggcagagcacatatggctagagaaacatacagtatttagaaattatcattcttggagttggtagaattgtagtgtcctggatgcttaatgtttgtagacacctgagacattctttaatcttagctgtgcatatatggataatacattaatgtccagagaaaatacatggtgagttcagggtcccactactggttagagaagagatagaacttggactatagcacttaattctgagacctgagtaaattattataccccacactactggacaggctctctgagaggccacatggacagagaagggcagggcacctggggctaagacctagagcgtttcacagttagacaggcagaaggagatgaccagtgctagaaagagtgcagggaggtcagagttgaggaagaagtccggctcagcagagtcacagaagccattagtgtggccccactgggtccttttcctttgtgatatattttaaagggagtattttgcctttgtttctaaaagttacatgatttgaaaatgggttttactcttagaaaaatatagtttagtgtcttggatgaaatttctgacttcaggatttggagaggctggaatgaattcttgtgctatgtaatggcctcttagaagattttataagagcacgtgtatttctgggatggttaggcattgacgtgcttagagacagaactggtttgatggctctgtgagttccttccaataagaaggtataaaactggaaaatatgagagctgttggcatttatataaacagcaatgtactgtgattttatgccatgtttaaacatataaaaatttcaggaaacaccatatgccaaacttgttttgttcatgctcaacacagataaaagtgtagaaaagaaaaaaaatattttcacttaaagattggtgaaaacagtattcttctatatgttatgagcagacgatgaactcaaaacaaccttctaagaggataaaacaagaccatgttgctctgtatctgttcagccaatgtttccaccaccatttgtcaaattgttctgtgtatacaagatacctgcaactggttgtaaccctttagggcctacatcctattacatgatagctttgcaaacataagtttgttatgtaatatttaggaataccaaaatgtctaccaaatatttctgcattttatgtcaataggaagttcaaaacctgttttgaagagaagatgataaaataactttctgtttcatactttcattcatttattctttcaacacaaatgaactgagtcctatcaatttcaattctgaaacaagatgtggtcccaaggagtttagtagtaaatcagagaaaaacatagcatatgaataaatgaatgagtaacactaaaggcacgtatcaaaaaagtgggacaagaaccacaggcatccagaacaggacagtatggtctcttattaggggtaataggaaagatttctaagaagggcagttgattgactctgatgataggggtatgtgtggtgttggggggacagaggggaggaattccatgcagaaggagaagcatgatatggatgtgggaaaaggggtagacaatattccaggaaagaaaaagcatttccaatttgttgaagtgtggaagaccagtgaaacctagagctgaaaatgaaggcagaccttgatttggaagcccctgaatgccaggctgagtaatgccctctctatttgtagtcagaggaacagtgtaatgttgacaaaagcaaaaggatagtgtgcctgctgtgtacagggtagagagtgaaagcaaagagacagatgaagcctagacttggatggtaaccaagaggtagatgcaagaaaaacgaggaaggaaggctgtgaagggcttggcccaactagtcagaagaagaggaaaaacagcttcctctgctaccctggtcatgtgggttcacagaagggtggtgaggcaaaaatgtggaagttaaaagttagaagaaggagttgatttgtaggagaaaatcacaaatcacaaatatggtggttttttttttttttcaagacagagtcttgctctgtcgcccaggctgcagtacagtggtacgattccagctcactgcaacctctgcctcctaggttcaagcaattctcatgccctagcctcccaagtagctgggactacaggtatgtgccaccacgcccagctacttttcgtattcttagtagagatggagtttcaccatgttgtccaggctggtctcaaactcctgacctccagtgatctgcctgcctcggcctcccaaaatgctgggattataggtgtgagccacagtgcctggtcacaaatgtggttttaaactgatgaatgaatgaatcaatctatttcatcattaatttattcatcattatttagcatgttaggtgtttataatactcagttggaagggtcagtgggccatttggctggaaaagtcttgcagatacagtagattatcaaaaagttgtcagtacagttaaatttacacttcctatcactcatagataagttgactgtaatgcaaaaagtcaaaggaaactacccagcgaaaattttgccaagtcttcacttcctgtgtgacaagtagacactatcgcttggtaaaggaagttactttgaagtgagttacactgctgagcaatctgtcctttctattctttcaataaagagaattgccaagctgcaaataggtcatcagagctcgtttcaattgtgttgataatactacatattttagagctactttaaggaagcccttatagaaacaactaaccataagacttttaaaagtaattttgtttttgaagaattaaataattaattttttgtagctttaaataaataaatcaaagtccttttttttttctcaccatccaacttttcctaatggtgattttgatttttcatcattcagagttttaattctcatatatttatttgtaaactacatttgcatttctagtcttttcctttacttgagcttcaataaggccaggggcaaacctcttcctgtaacaggaatcgcttgagcagagagagtcattgggccatgagataaatatgtacagttaacactaggacactcttggggaggataaacaaaggactgaaaagaaattttttaagaaacttttctaggcacactgagagaaagcaagcttcatgatgataaatcagcattgggggtgtggagaagcatttgtaggatactatcaattattcttcctttcaacagagaatagggctccatgatttgtgtttctctatcatgacaattcttggctcctaccacgtgagatggttccagagaatgtcaagtttggcagtaaatgggatgaggctgtttgggcggatgtagctcctttcatcctaaaccttatttaagagatctgctgttactaaagaaactaaaaatttgtttgctttagctgttttcttccactttcattcaacatttttggcaaaaagttggcctgtgagatgacctcagaaatgtatttaaagactcaaaatattccatttggttttgatttcatcattgaacaacacagattttcttcattccttcagtcattcaaaaaatatttatttattgagcacttgccacttgccaggcattggttttaggtgctgcaagtatggtagtgaacaaaacgaagtccttgtgctcatggggtttaacttcctggagggggatagacaaaggaagttcagcacaagcatttgtaatccagagccaagtggaggcaagtgctatgaagagaagttagcaaaattagaaggttcggagtgaagggtctttagatatgtcctgcagagaaggcctcactgaggtgaatcggagctgagtcctaatgaagtggggactatgccatgcagaaatctggaagaagggaatttcaaagcagaggacaaaactaagtaacagtaagtgcctgctgctttctggaaggcagttttttgtttttggttttttgttttttttttcctgccagctctttgccattttattcatgaatattctaagatcattttgtatatataaaaagttttagaaaaaaatattttttaaagtagagaagggcagagaagaagagagagatcatcttggaatagggattggaaatctagaaacacagggacactctgctcctaggggcaggaagtgccatgaggtaccatggccacttttgaaagcttgccttcagaatgcaccacgcaaatactaacttccaaacttttgattatgcacccaccagtgaaatgcgtttgagaatatatccatatacctttttatttacaagttggatgtaaggactactgtatcaatatactctatacattataaagcagatatcaaactagaattttttaaaaggatgagataaaatgaaatataaacagaagttccagtatgtcctttgcacaccaaaatcatcctttccattctctaagatatggacacctcatcttagagaacaatataatatcttatattttattaaaattttatttttattgtaactattaaatatttttgataacatctacctttaaaaattccactcttttctgaaatcttttttaatgtttaatttttaatttattttttaatttttttattttttatttttgtgggtacatagtaggtatatttatttatgggttacataaaatgttttgatacaggcatgcaatgtgaaataatcacataatggagaatgggaaagccatcccctcaagcatttatcctttgtgtcttttctgaaatcttaaattctgtattctgagtcttgcggcaccagtatgtgcatgggctgttggcctgtcatgaggatgttcttaggggctgattacctctgggagaacactcatcttcactctgaatgtccccatgctactctactacagtatccaggtcttttgtctcataggtctgcagtctcatagctccacctgacattcccccactgcattttagctgagttgtaagttaatatttacttctataatgttttgattcatgtctgtcttctcaatgtcacttgtctacagtctcactagactgtgggctccaggagggcagagactaggtctgtttagtggtcacattcattccatgattcctggcaaatggtgaattctctgtggatcttgataaatgaatggatgatgtaagcaggtatctatcattctctgcttgtcagtagctcctttttactgctactctgtcctgtcttaattgctggctattttgtaaccaagcatctacctcagatttctcctcagggtgaattatgtgtgctctgtgatggttgtttactactcagaggactgaactgctaaaaagtctgctctccaaataattgcgtagggatggaaggaggcagagagagattcaaggcagggagagagggagagaaaaggagcctgagcaaagaacagaaaacagagagagagtggaagggaaaaaagagatttcccattgtactttaagtctgagtaaataatatttacaatggatctttcaattcttttccccattgctttgttccttctaaaatattaaactgtggcaagagtgcacatttatcattgctggtctccagcgagtagttatttaaagttccacccagctgcatttccctgttctctcctgaggtcattaggaagctcctgtttagtaacagatacagcctgaggtaggctccacagacagctgggcacaggaggggaggggacctaacgaagctgcacattcagctggttgtctcttgttgccttttaagcttgcctggagttatggagtctcccagctgctcccttcacatccatttctgatcacaggactaagtgggctctgatttatcgagttctgccccaggttggggtgtgtggagcaagaatgtcctgcaaattcgagtggtcttcatctttctttctaactgtcatatgatgggttcccagaaaagtggtggaccctcaggtagtgtgtagtgagcaggaagttcatcaagtgcccttgagattgacacctttcagtagaagaggaaggaagcctgagtgggtagagagagaaatgaagctgagatgcaggcccaacaattgtggctgcctccttgggaagctgtggagctagaatgagccctcagagtcattctcagttggattcagaaggctaggcctctaaaacaccaaattgctctgttctttgatgtgggtcactctggaaagtgcatgacgttgggtgaggtgcttctctgcagtcttggcaatccctaaagggactgacagcgcttgctgcagcaaggacaacacagccttcattgaaggggagtcagagtggcacagcacagtgccgggcacactgacccccccataggctgggaagctttgtctagattttaaacctgagaacagtacctagatgatgagttaacacatagttggagtaaaatgactgcagtggagtgctggagcaggcttgtcccagcttttgagaactgattattaaatattcaacaacgttgtgagcctgttgaaaacttgaaatgggccataataggagtatttataccacagaaattggcaaaaggtacaaatcagggcttgtgaggttttgtttttgtttttctccagaaagatggtttacaagcccatcactaaatacaggcttacctaatttcatttttaggagaattggaaatatctaaacacttcatttttcacgtccccaaaaagtcctttcctacttgacaattgtcttgaaattttactgttagagcatcacattttcagctcaaactctgcctctaagatcacatggcgaagtgcataaagttctatggttagatctaattgaatctcatctctgagatgagatttacctttggtgggttaatttctctgagcatattttagagagttactttcagaactaaagagaaaagttatgtttaaagttaggcaagttataaatattagtctacttccttttctccttccataacatctgcccttaatgggcatggatttccccttggagtaagaagtctgaggagcgtgtgatggagaaagattggtgttgctttttattgtaccatttaaagtggtgcttaaatgcatttaaaaatatgcaccaatttaattttaaatcatgctttctgctgatttcagcacacacagcttcctgctcaccccagtcccctcaagggtgcctgctgtgactgtggtccttgctgactcagcccttcccagtccagcttccccaggccagttgctccctggtgaggtcatgtgatgggggaagctgcatacacacttcaaagctaaggtctgaaaaagataatgcaaactcaaaaaaaaaaaaaataagacaaagaaagactaggattgagatgctcctgtatattctgaagtgatagaaagcagtttcttttgcctgtaataaaaaaaatagccaatattaagatctattctagattggaaaaaagaaagaaatcattgttgatgtgcaaagttttaattgttttggatgcatggctcgtgactcctgaggaatgagtagctcttggtgagacgcaggaccaggctcttctcacttgcacctgttattttctcttctcctgctggtatcatgtcagtcttagactgaagtcacatgattatgtcaataccacagctagtgaggggtagtagggcaacccccacatgaatggcaggcccacaagggaccagcagcagccaatccaagtgtgcagaaaatgagaaggcctggagtttgggcatctaggtccaggggtaggaaacccaggatgtacgatattgaccttagcaaaaagtcacaaagatagcaaaggtgagtttgtgcatcaagaatcttacgcaaaacatagaagagtttctagccattggtggtttgttgccatggcaatgatctagaaaacttagttgtccttgatgtatttgcattcaatgagaacaaattcagcagctgagtgggtgacctgaacccacttatgagtaggagatgggatattgaagttaaaaggccaatctctagagccatataacttggatcaaatgccacttacaagctgtgtgatcttaggtaagataattaaccatcttatgcttcaaattcctaactactttgtaggactattgtgaattgcaaatgagaaaattcatgtgaagcacttagaatagtgtctggctcatagtaagtgctcaaagtatattaagtgttacttgctattgttgttatcaacaaagcaatggacttgcaattagaagctatgatttgagtcgaggccttggctatttacaaggtaggtgacttaaggcaagtaacatgccttgtaaatagctaaggccttaactctgagccttggttccacctctgtaaaaatgaggtgtgcacaaatacttaactcaaagggtgttgtaaagaaataaatgagacactgtgtatgaaggaaactttaaaactgtaacagccttatggaaagtttgtttttaattacttactattatgactaattggcaaatagtaaatgtaccaggttatatgtgaggaagtcaaatcctaaacttcagccccacccaaattataataatgacagtgtattttcttttccatggaaattttttttttatttacaaaggcttctcctgttgcattgtccattcaatctcaccattattccataagacaaacaaatatgacccacgctacagaggaggaaccaaagttctggaagcttaagtgacttggtcaagtttgatttacaacagaactacaattaggaccagggcttctgactccaagttcaatgtcctttctacaactccatgctgccaagttaaatgtttagaattatgtagatgttttggtcttaattcaccacttaattttgcctggagtcataggcactacctacctccagtgaaataacagtgtttatatctgtcaattttgtatgtataatgttcacaatgggacatttctaacttctagcattttaaagacttgaaaagtaattatagctttatggtattctagtctcacaaattctcaatgataacttgttatttttctctacattgttctcccttcactgtttctctgtaatttagttttgcttctctgaatttcaatgaaaatgtatatatttcagtgatcctccttttttttgagacagagtttcactcttgttgcccaggctggagtgcaacggtgcgatcttggctcactgcaacctccacctcccgggttcaagcgattccctacctcagcctcctgagtagctgggattacaggcatgcacaaccatgcccagctaattttttgtatttttagtagagacagagtttctctatgttggtcaggctggtcttgaactcccaacctcaggtgatccacccacctcggcctcccaaaatgctgggattacaggcatgagccaccgcgcctggccgatcctccagtttttaaccgttaacattcataatactaagttttctagttggagggatttgctgccgacttccagtaatttttgaaaagtgaaaaaactcaataggtttggacattcaatgagggcttattgctcacctgcctgattctgtattagtccttttcagatattttaccacacttaaaaatcatggccaggcatgcagtggctcacacctgtaatcccagcactttgggaggctgaggccggtggatcacttgaggtcaggagttcatgacgagcctggccaacatggtgaaacccagtctctactgaaaatacaaaaatcagctgggcgtggcggtgcatccctgtaattccagctactcaggaggctgaggtaagagaataatttgatgccgggaggtggaggctgcagtgagctgagattgagacattgaactccagcctgggcaacagagcaagactctgtttcaaaaaatatatatatataacaagtctgagtccccagttcttaactttttcttatcttccatttttcagcttttattatcccttgatctttaaaagataatttaaaaaatatatgtgattttcattactgattccattacacttgtagaataacttcataaatggtaactttacaagatattcatttagagtgacaagaaagtattttatctgaaataattaaaataatcccacaatattatgcaaccactataaattttggtaaatttccagtcatttacatatttttttttctgtgtagcttaaatcagatggtctctaaagctttgtaacttgctttacttacttattatcataacctaagccttctgtcagacttttaaaaattaactgtaatggatagaaatgtgcttgattttttagttgtttctaaattttcactaatataaataatgcttcagtgaatacctatctgtataaagcttttcctgtattttgaaacattaaataggctattaacattaattcagataacagatataaaatatttgttagagtaaatgtcttctgggtctttgaaaaagcactggaaaatggcagaagagccaactgaaataaatgggaaaaggattaattaccaaatacctatgaattttcctaggacaattggctatcaatatggaagaaaaagaattagatccctatctcacatcttatcacaaataaatccgagatggattagagacttaagtaagaatcaaactatataactttaggagaaaatatatttatgacatcaggataggaaaatattttttaaagatatcaccaaaagcacaaataataatataaaaatggaataaattttactacaataaaataaacttttggccgggcgcggtggctcacgcctgtaatcccagcactttgggaggccgaggcgggtggatcatgaggtcaggagatcgagaccatcctggctaacaaggtgaaaccccgtctctactaaaaatacaaaaaattagccgggcgcggtggcgggcgcctgtagtcccagctactcgggaggctgaggcaggagaatggcgtgaacctgggaagcggagcttgcagtgagccgagattgcaccactgcagtccgcagtccggcctgggcgacagagcgagactccgtctcaaaaaaaaaaaaaataaaaaaaaaaataaacttttgcatgaaaaagacaccatcaacaaagttaaaagtcaaagtctaaaagcttaaggagatcatgagaatagaagaaagtatttgaaatctaaataaccaaagcagaatagtaaccagattacattaagaactaatcaataagaaaaactaatactgagtaaaagagatcagaaaattcactaaagagataccacaaaggccaataaatgaggagtgtatgttcttttaattagtaatgaaaaactttaagataatgatcatgtgatatcatttcatgcttaccagattgccaaaaattagaaatttgtcaatactaagtattggctaaaatctggggaaatactcttacactttactatgggagtgtaaattgggtagcccctctaatttggtgatacctactaaagttgaaggtttatataccccataccccagcaggcccacttctaggtatttttcacttctggagaaactctcacatgtatacacagacttaagtacaagaatatacattgcagcatttttagtaatggtaacaagagaagggaaaaaaatcaaatcatgatatgttcatcccatagaacattacacagcagtttaagtgaatggatgagatcacttgtatattaatatacataaatctcaaaaactatgttgaatgtgaaaggcaagaggatgccttttatattcaataaacgtaaaagggtatttaggatacaattttaaaacacacaaatatacaaaagtattttaaaattaggtggttgtggtggtatgcacctggggtcctagctacttgggaggcttagatggaaagatcacttgagcccacgagttcaaggttacagtgagctatgatcacaccactgtactccagcctgggcaacaaagcaagaccctgtctcaaatataataaagtaaaaatatacaagcaatactaattatggtttatgactacacatatatgaaatacataaatacagtaatggaaggaaagggcactgacttcagggcattgattatttctggggctgggtgagaagaggagaaacttcaactctagcatatcatttaaaacttgtttgaggtgaagtcaagcacatacataaaataagagaaaaacatctctggtttagatttccaagcttggtgctgcctctgaacaaatttgaccttgcacatgtctctcgatctctctggaggattatattaggtcaggtttttgttttgttgtttttgtttgtttgtttgtttgtttttttgagatggaatcttgctctgtcgccaggctggagtgcagtggcgcaatcccggctcactgtaacctccacctcccaggttcaagtgattctcctgtctcagcctcctgaatagctgggactacagatgcacaccaccatgcccagctaatttttttgtatttttagtagagacaggatttcaccatgttggccaggatggtctccatctcttgacgtcgtgatccgtccacctcagcctcccaaagagctgggattacaggtgtgagccactgcgcccggcagatattaggtcagggttttaaaccttttttttaaaaaaaaatagcaaaaagcccttcattcaaagaaaatctaacaaaaaaggggcttcacagtgtgtcaaacaggtgaagtcaaaactgctaagacaggaaggagggggcaatagtccccactttccattactgccacgcttctccccaactagtggcctctaaggcagcttctccctttgatggcctaactgtcaatggcactaagctgttagtctgacccatttctttgacaagtgcctgccatgtacaagggctctttggtaaacacctggagaaatggaagagtgcttttttaatttttttactatgaaaaccatcccctaatttggccagtccacagatttgaatgtctttgagtaaaatttctccccattttaaaagcattaatttattaattttgctgctcttatcacttctttaatttttttaacttagcacatcttcattattttggcccttaccactctgtttcctgatgtcctctcctgcctccttccttcccttttgtggcctttgtccttttattctccctctcctttgttcctcctgttcatccaagagccatttatcagattcctgaaaaagccactgctcagcctgccctgtgaaaggcccagagcccactgttcctaccttgccatcactcattttttccttaacctcctgtacccacttcttggtgtaaggcagtcagaaatgatcaaaaaccacttcctaattatgaaacccaaaggatttccccttggtccttaaactccttttttcagcagctgacatcagagtagggaaggtagagtcggctcctccccagccattctctcagccaggtccacttttggggtttgccttcttacatctctttctgtttattgaatttcagatacatagtcaatgactggggaaaattatgtctcaaatgcaatattacgaaattattctgaaaaagtgatgtttatccgaagtttcaatttcactcagcatcctgtgtttggattgctaaacctggcagccctgcatgaaggagtggcagctccttctcatcctccacctctctctggctttctgcagccctgggtttcattctcctcctctctctgattgttgtctctctccctggtagggccactgcatccccttccagcattctgtccttgatccttggctcttttttgtggcactcatttcccagataccccatctatgctcatcaactcattttttccatactgatgattctggatcatttctccttggccctgactttgccaccaggcacatatttctgagtgacgtacaggcacctccaacttagtgagcagaagcctccatgagccctcagcctttctgacccctcttactcctgctgagtcagctcctcctcagccatattctctcagtcactcacccaggtgcagaaacataggttccttatggagttttctatttttacctctattttacccacaaaccctgctagtcctccctgccatatgcctggcttattttaaggaaacacatgttgagtgaatggatgtctcctggtcttgtttctttctttccattctatcgcaaccaccttcattcccactatcattaccttgagctcattctggtaactgcagcctggcaatggtttcccttcatccaggacaatcttgaggtctctgcaaactaatctgcacagacatcttctttaaaaatgtatatatttttgactaggtaatacattcacatggcctgatgttcaaaaggtacaaaagagtatatgagaatcttgaagggttaattcattgtctcttttgcctacctcatgttgtagccagcggataaatagatacaggaatcagaaagatggagagcaaaaactatgcaaaataatggggcttggtctgcgggctgccttgctcacctttacaccagaattagaaagacttacacacccagagagacccaactggacagaattggcctccatgctgggctctgctcttacaaagtttgggagcgggaggaagagagaggggattcactcatcaagcaggctaattccaatgtgaacagaggaggaggctgagaggtacacacttaattcctcttctccaattcaccaatcagactagtcactctctattccctaaaagggggtgaattaaagttgggatcaggatcagggggttaaagcctttccagtactccccggctggtgtgttaatggatcacaggtgtgtcacgagatatggatcttttcatccttggaccgaggataagcagagccccagacttgtcttcagccatgagcaccttcatcagaaccctaatttccttccaatttagcctcattgacccaatattatcattttctgtttgtatcatattggggaaaattctggcatgtactgctctaagcagtggtcacctctgtatttacagatatgaaaccagcaccgagaaggtcacccctagtcccttactcggtacacagaaaattcttatgccaaatgcccttcttcctgccaccaagttctcccctgtcttccccaaagcaaccaatagttactctttctatacacaggtaaatatttcatgtccttctttaaaaaaatacaacacaaatcacaacatatgccaaatgctttaataaaataccatcacatctcagcggcttaatgtagtaaatgtttatttcttgtgcatgtctcaatccagtgtggctttttaggtcaatgatggggcactgggttcctctcctggagccattaatggctctgacttcctttaatctagtctctctgttagtctctagggattcataaccgctgccgaatgctctacataagctgaaaaaggaaggaaggagagaaagcatggaaaatctgggggatttttagggactaggaagtgataaatattatttccgtccatattcagttggcctgaactcagtcatatggtcccacctgactacaaggaaatgtagtctacatgtctgaccaggacaaaaaggaaatgggtgttgtgaggccatagagatttctgttacacatgccagacatgccattctgcaccttgctcttttgacttgacaatacatttttgagcacagccacattatttcataggcgagcagtttcctcagcttttttaacaggcgcgttttatgaattatatcataatttatttaactagtccatggtccaatcatcctcaatgatttgttttttccattatttcatctgcaataaatactcttgtaattatattattccacacatgtgcaagcatatctgcaggataaattctccggtgaggtgttgctgaatcaaatggtatcaacagttaacattttgatagctattaccaaattacccttcttaggagtaatacaaagtatattcccagtagccattttattatttaattctgcttgtgtaaaatagctcaacaggtttgagtaaacatagtttaaatccagtggatctgagagaggcccacaatcttggttgtatcctcctgttggactttaccttcccctctattccttaggaacccaacgttgtctatttctgttccccaggtgttccttgtgcctcatattctcaaaccattgcttcaatattttatttcatttagattcagatctagtgaacacttcttgtttttcttttctttttcttttttttttttctttttagacaagatctctctctgtcacccagcctggagtgtggtgatgcaatcctggctcactgcaacctctgcctcccgggttcatgcgattctcgtgccttagactccagagtagctgggattacaggcgtgtgccactgtgcgtggctaatttttttgtttttttgtttttgttttttaactggagaccattttttgccatgttggctgggctggtctcaaactcctggcctcaaatgatccacccacgtcggcctcccaaagtactgggattataggtgtgagccactgtgccgggccagtgaacacttcttgaaaaatagggctgggtaccaagcagaaccctttaaattcattattacatataatcctcagaagcaactctaggaagcaggcattttcatgcccatagtacgaataaggaaactgaggctcagagaggttaagtaaatagaccaaggtcatctaactactaggtggtatattttcattaggtattctgagagtattcttttttctctcactctggtgcttctcaaaccaaagcataacttaaggcagaggaaaagaaatgcacacacttgagctgtccctaggtgtgacccaaagctgcctgagccatgatgtttcctttgaagtctcctatttgtattaaaaacagatacagatttttagtttcactttttcatatatctgcatttattttaatattttaaattccttgctaccaactgtaactgaaaccccaggaagctaccggtgttctctgtggtttggggaactctggtccactgcccccgggggaggcaggagagcatggttctgcatgtcaatgccccacaaatagactcttacccattcttcaaaatccaactcatatgctgcttcaacatcaaaatttcctgggggatcagcaagcccagaatggtgtccctgtcatagaaaactctgaattacagcttatcccagcaccttagatgcaattatacagcgtcttccctttcttggactataaccttcatggagtcagtctctctataatatatcttcaagtgcttcgcagcaaaaagagggttgttaaatttctaatgaataaagcattgaagatgattaacacattattgttaaccacttaaaaaaaaatcagcaattgcaaaacagcaagagcctacttcttagttccaacttctcttaaacactcctaaatcttgcttaaaatggttatgttagcctcatgtttccttggaaagcacacatttcatttgcccatgcatatatatccaattcccagtgatagtcctgtcttattgattgaccctgggtaagccattaatttattctcctgtctctggaaaatggggataattgcatttgccagctaccacttgagaatgttgtcagaattgatgaaacaatgtttttaaaagacctctttggaaggaatgtactacataaatcacaatccctcactaggatggttgttttagtgattatttatttagtagttcagtggaacactgatatttcttcccagataagtcatattgagtcaatggattccttaatactcagacccaaacagaattttatatctgtaaccttctgatgaacttggaaattaacttggtacatatcctttccactctgggaagtgttcaagttgattatctctgtaaatatatgtctgggccattgctagccaaatactggtgcacatatgagataatatttaaaatttgctgcatcctcgtgaacatattgatatttttctctctcccattttatctttaagaattgaattttaatatttaaaaatctcactgttttcataagacatacgtaatgtttccatctcagagttggaggtctgttgctccaaattagtcacaccttttgtagtatgacagaacatctaaaaaggaaatagtataaattttaaattctagtaaccatctataaatgtactctccaattgccactagctaccagtgttaaaattaaaaattcagtccctcagttgcactagctactgttcaagtgttcaatggctcatgtggctagtggccaccatattgtatagtacaaggaaagaacatttccaccatcacaaaaagttctattaggcagtgcttgtccataagatttgtatcttaaaagactaatgaaaggcttaagcgggaacatttttagctttctgctcttctcacccatccctcgcttggattttttctcctcatgttacaataatttctttttaactgtttgggccttaaaaacagccccacctccaaggccacgatttgaacacaaagtctggggagaatgacatgtggaattcccatctggaggttagtacagcagcagatccagccatttctgagaaattgtctgggtttggagttactcccagaactctgatttagcagttcgtaagcttacagcaagtctgaaaagaacacaaatctgttttgtatacacaaataaatccttgcatgctgcatgccattctcagcctgccagtttcatctggctgctccagaaaatataattcaataggatattagttaacctgcatgcagggaatggggcattttcattattgaaatgttctggttgagtgattaacccgatttttgcagaaaaactgctgaggcaagggattttctgtccaggaggttgtaccactgtgtttctctcttccagatgatcacagctgcactgcttcatccctcaagcattcagaaatacatctctatgctaaaaactttcaaatatgcattgatatattctcaaagaagcctcataaaaatagatcaataatggtgttcctgatactcttagaaagggaacaaacttaaatgaaaaattaagatctttcctcaaattttgcacagttgtgtaacctttaggagtttctgacaataggcagtttcttcaaatgctatgatttgaaaatattcgttcaaatattttattttcttttgtaataaataaaatgtgcttactagatgtcaggcaatgctttgagggctttacaaatattaattcatttaattcttataaccatcttagaattaggtaccacactattatgtccattgtaaagatgagaaaactgaaggacagagaggttaaatagctgtccaagtcaaggagcttaggatgtgaacccaggaaatttggctctgagtgtccatgcccttaaacactactccaaatagtttatataacagaaggaacctagatcatgaaataaaatgatttgtttttctcctcagtgcctcagttttcatatattaaaagccagaggtcagtgaggtaaaaacagaatcaaaacattggtgcttctcttcaaaagataattacaagccaagctttgtacaccaaaagtcaaatgtactaagagcccagaatcaattataaaatacaaaacctagtagaattagattgattttctgaaaataaattaatgtaatacattggttttaaatataggatgagcagatcatcgttttcagcttctgagttgattgtggcagtccaaaaagcttttttactcaggtttctgaatgagcaagtataacaaaagaaatggctggagtttaatcatgtctgattcataaatgtaagtaaaacaatttttctagacatgtggaatatgtgctagtgagaggaaaccaacgtttgatgagcagctatgatttagcaggcatttgaccttaggctttcttactacctaagcaaaaaacctagaagtgatttctccctttcctgttaccctcaacacctaacttgttgactgctcattctgcctccccagtatacttgggtactgccttctctccccaactcccggccaccatcctctctcaccgggattctgcagaagccacccaagtgactttcttaaagcatcgagatggtctctcatccccgcccagccctctaccggcaccttctccatttgggatcacctcccagcactgcccaattccacctgggtcttcttcaaccccatctgcccatgctatggcctttgcccactccacccagcccctctggcctttgggtttctgaacacacacagctgttgccttttcttttcttttttcttttttaaagacagagtctcattctattgcccaggctgcagtgcaatggcgccatctcggcttactgcaacctccgcctcccaggatcaagcgattctcctgcctcagcctcccaagtagctgggattacaggcatgagccaccatgcccagctaatttttgtatttttagtagaaacggatttgaacccaggaagcttggctctgagtgtccatgcccttaaacactactccaagtaatttatataatagaaggaacatagatcatgaaataaaatggtttgtttttctccttagtgcctcagttttcatatattaaaagccagaggtcagtgaggccccacactatggcctttgcccactccaccatttcttttgttatactggctcattcagaaatctgagtaaaaaaactttttggactgcaacaatcaactcagaagctgaaaatgatgatctgctcatcctatatttaaaaccaatgtttcaccaatttggccaggctggtcttgaacttctgacctcaagtgatccacactccttagcctcccaaagtgctgggattacaggcatgagccactgtgcccagcctacacacaactgttttctacctcagatctctgtgcgtgttatgctctggctgggatcctgtttcctccactcatctcctgtttcggtcacatttctgcctttggatctcagctctaatttcacttcctcggagagccagtatgaggaagggtgaagggaggttctgacaatgcccaaacaggcccagagtaaaacatgaagccaagagaggcttttaaaaattttagtggtgaaggtatccatctcctcaagcatttattatttctttgtgctatacacattccaatcatacttttagttaattttaaatgtacagtaagttattgttgactatacataccttgttgtgctctcaaatactagatcttattcattctatgtaactatgttttgtgcccattcacaatccccacttgccccccccaccaccacataatacccttcccagcctctggtaaccatcattctacttactctttctctccatgagttcaattgtttcaatttttagctatagaatgagtaaaaatatgcaaaatttgtcttttggctttttaaaatttttaattaaaaaatccttacctgtgatgtgggtataattcattccattttaatacatttgactctcaaaagtaagtttttttttccagttgagcaaatatatattgagcaatttgctaggcactggcagaggagaaggcaatgcagactaaggcatcactgtgatccttgatacgatcccaatttaataggagaaacagtcaaatataaaccaataatcatcaaagtatgcaatgaaacacagatgccacaaaagaggggccaaaatgctaaaaatcacagaacagagagtggccggtttggaatggcaaatcgggcagatatcacagggaagtaacttttgagaggcagcttgaaagatgagtaagaattcaggcataaaaggggaagaaaattgtaaattagagttgtgaaacccatacatttgattttgatgaggagtctaatggtgagaagctcttagtggtaaaataatgaatgcctgtgtgtgtgggtgggggacggggggtaggggatgtgggaagaggtgggggggaaaagaataaaggataaagagaagtagagaaataagataataagtccaggaaagttttagagatcagtgagtttttattttcagattacccagcaaagagcagatagatattggattcaagaatttctacatcatttctttcactcgagtctctgtgaagagaccaccaaacaggctttgtgtgagcaataaagctttttaatcacctgagtgcaggcgggctgagtccgaaaagagagttagcgaagggagataggggtggggccgttttataggatttgggtaggtaatggaaaattacagtcaaagggggttgttctctggcaggcaggagcggggtacacaaggtgctcagtgggggagcttttgagccaggatgagccaggagaaggaatttcacaaggtaatgtcatcagttaaggcaggaatgggccattttcacctcttttgtggtggtatgtcatcagttaaggcaggaaccagccattttcacttcttttgtgattcttcacttgcttcgggccatctggacgtataagtgaaggtcacaggggataagatggcttagcttgggctcagaggcctgacattcctgccttcttatattaataagaaaaataacataaaatagtattgaagtgttggggcagcaaaaatttttttggggggtggcatggagagataatgggcgatgtttctcagggctgcttccagcaggattaggggcagtgtgggaacctagagtgaaagaggtcaagttgaaggaggattttgtggtaaggggtgatattgtggggttgttagaaggaggatttgtcacatagaatgattggtgatggcctggatacggttttggatgaattgagaaactaaatggaagatacaaggtccaaataaaggagaaaaataggtattaaaggactaagaattgggaggacccaggacatccaattagagagtgcccaaaggggttcagcgtaattacttgcttggttggcaagtttttgggctctgtccttgagtttttttatgttgtcatacaccaggccagattgatttaggtaaaaacaatactcttcatttaaaaatatacagagtcctcctttttcagcagtaagtcaaggcctcagcggttctgggggacaactgcagctaaacagtcaacttgggcctggaggactgataaagtttgtgatatgtctgtgatgctagcagagaagtcattagacaggctacggaaggtcgtgacagaggttgaaatgcctgctattccagtaccgagagcaatagtggaggtggaaagtcctaaaccgaccagcaagggaattagtggaataactcttttttgtcgtgttggtgtcatgaggggaacagggagctctttggtcccatttgcaaattgaattttgggagtaaggaaaactagtgagcatgtgcctgtccagttagcaggtagacacacgtaggtagaggatccacagagcaagaagagaccttgtgcaaggcaaaactggagatgcaaagtaaaaagatgagaaggagtgctgaaaggggtgtcttgtacccagaatcctagggatccagctagggcggcagccatcagaggttgtaatggggactgatggggtaactgcttagagggggaggtttgattttcatggtgtaggagaaaacgttgagtgtctacgagtaacctttcactgttatttacggggctaggggtaagtaaacaagaagagggcctgggaggagagtctgatgagcaaggggaaggtagccaaggatggagtgaaatacagggtaagtgtcttcctaagcaataattactgctaatgtttttaagtttgtcagtattgatagagggcttatctgtaatatggagctggaaggctccaattgtttcagtgatgtgtgtagttgggctttggagatgaagagtgaaggaacatcgagaaggtgaaaggttacccaggggaattccagtgggtctttgctgagagatacgtaaaggagcggccacaggaatagtagtttgtgttgtgaggggtccacataaggggggagtagagttaatataaggagaaaggttttttaagtaagtgtggaggaggacggcagcttgctgatgtgaaatgtctggggaggtcttgctggacctgtctagaaagtaaagaagttcttcaggagggtaaaggtgagggctgttaaaggaagttcaggtttagggagacaggagatgtcgcccagtctgtatgtaaggcggggacagctgtgtaggcgctggaagaaagggaaatgcaaagccagcaattgtttgctaaggagggattagaaatggctaggagagagtgagtaaggttgatagcgtggtggagatagctggggagagatagagggtggcataaggatgggaatgagaataacagtgagtataaaagtaaagaatagaacttcatcagggtgaaagtattgaagggtgccctgccagcaaagatcctctatccactctaagagggagttaagagtggcagtttggggatagcaccaggagacaacagctgtgatggcttggagaaacagtgtaaaccggcagtgtaaacaagagtagggcatttataagtagtagagaatgatgaataaaactagacagaagatagtagggatgactagttttgggggctctgcccaagtagtgggggtgactgcataaagccctgttgcaaaaagtaggataaggatgaacaggcctaatagaatgaagggatgtattaggctcataagggttgttactgttcttcagaaatgcaagtgagtttaagggaagtaggggagagtacttgtgacttccaggaggaagaggggggattaggctggctgactgatggacacagctttactctggaacggtgaacccagtggggaggatcctgcaggtggacggcagttggggtactatagatgactaagtagggtccagtccatcgaggttgtagagtttgaggggtcagattcttaacaagaactgattgtccagctagggtgtgttcatatggttgagaatctggagtaggcaagagaagattagcagcctggcgaatttcctgtctagcctgctggaggactggaggatagtcacctagagggctggtgtctgggacaaggttggggctgagtaagaaagtgcgtccgtataaaagttcaaatggactgtaccctgtagcatctcgaggacaggctctaattctgagaagggcaagaggtaaaagtactgtccagtcctttttaaattggaggctgagcttggtgaggtgtgtctttaaaagaccattagtctattctacctttcttgaagattgaggatggtaagggatttgaaggttccactgaataccaagagcctgagaaactgcttgggtaatttaactagtaaaggctcatccgttatcggactgtatagaggtgggaaggccaaactgaggagttatgtctgacagaagggaagaaatgaccacggtggccttctcagaccctgtgggaaaggcctctacccatccagtgaaagtgtctacccagaccaagaggtattttagtttcctgactcggggcatgtgagtaaagtcaatttgccaatcctgggcaggggcaagtccctgagcttgatgtgtagggaagggagggggcctgaacaatccctgaggggtagtagaatagcagatgaaacactgagaagtgattcccttgaggacagatttccatgatggaaaggaaattagagattctaagaggcgggctagcggcttgtaacttacatggaagaggttatgaaatgatgacacaatagaatgggcctgtgaggctggaaggagatactttccttggtctaagaaccatttgccttatgtggaaagagattgacaggtgggagtttcagtgggggagtaggtggaagtgaccgatgagaaggagaaaaactggccgtgagggacagaagttggaacactagctgcttctttagctaccttatcagcataagcgttgccgagggcaatgggatctgatgccttttgatggcctttgcagtgaatgactccagcttcttttggaagtaaagcggccttgagaagagtttttattaaaaagacattaatgatggaggactcttgtgtagtgaggaaacctctttcagcctatataacagcatggtggtgcaggatgtggaaggcatatttagagtcagcataaatattgacatgtaatccctttgcaagagtgagggcccgagttaaggcaatgagttcggcttgttgagaggtagtggagtagggcagagcggtagcctcaatgatagatgtggaagatatatagcatagcctgcctttgctggtgagtggcgattaggcctgatggagctgccatcagtaaaccaaatgtgatcagggtgaggaacaggaaagaaggaaacatggggaaatggggtgtatgtcaggtggatcagagagatacagtcatgggggtcaggtgtggtatccggaataatgtgggaggctggattgaagtctgggccaggaacaatggtaatggtgggagtctcaacaaagagtgagtataactgaaggagctggggagcagaaagtatatgcatcaagtgtgaggaagaaaatagattttggaagttacgagagctgtagacagtgagttgagcatagtgtgtgattttaagggcctctaaaagtattagggcagtggcagccgctgcatggagacatcatggccagtctaaaacagtaaggtcaagttgtttggacaaaaggtctacagggcgcggtcccggtacttgtgtaagaattccaactgcacagccctgcacttcagctgtgtgtaaccaaaagggttgggatgagtcagggagagctagtgtgggagcagtctctaaatctgtcttcaaggaatggaaagaggagtggggaaaggatttaggatctatggggtcagctaggtttccttttgtgaatttacataatgggtttgttaggatggcaaaaccaggtatccaaaggtgaaagtatccaaccatgcctaggaaggaaaggagttgttgttttgtagaaggtgttggggtttgagagatcagtttggacacaatcggcagggagagcatgtgtgtttttatgaagaattatgccaagacaggtaacggatggagaagaaatttgagctttggaggggaatacccgatatcctttggagaataaatgttgaaggagcaggagggtgtcttgttaggaagactcaaaggagggactacaaagtagaaggtcatcaatatattgaataaggtgagaagtggaggggtggaaagaaagtaaatcatgagaaagagcttggctgaagtaatgagggctgtccctgaagccttgcggcagcacagcccaggtaaactgctgggactgatgggtgtcagggtcagtccaggtaaaagcaaagagagactgggataagtggtgcaggggaatagtgaaaaaagcatctttaagatcaaaaacggaacagtgagttgtggaggaaggtattgaggacaaaagagtatatgggtttggcaccacggggtggataagtaaaataatttggttcataaggcgcagatcctgaactaacttgtaagacttgtctggttttgggacaggtaaaatgggggaattgtaaggagaatttgtaggctttaaaaggccatgctgtaacaggcaagtgataacaggctttactccttttaaagcgtgctgtaggatgggatattggcattgagcagggtaagggtgattaggttttaatgggatgataaggggtgcatgattggtcaccaaggagggagcagaggtgtcccatacctgtggattaaggtaggaagatacaaggggaagatgcgaaggagactttgaactggggaaaaggcagcaatgaggtatggctgtagcccaggaatagtcagggaagcagataatttagttaaaatgtctcgacttaataagggagctgggcaggtggggataactaaaaaggagtgcttaaaagagtattgtctaagttggcaccagagttgggagttttaagaggtttagaagcctggccatcaatacccacaacagttatggaggcaaaggaaacaggcccttgaaaagaagataatgtggagtgggtagcctctgtattgattaaaaatggtacagacttaccctccactgtgagagttacctgaagctcggtgttcgtgatggtctagggggcttccgaggtgatcaggcagcatcggtcttcagccgctaagctgagaagatctgggaaggagtcagtcagagagccttgggccagagttccagcggctctgggagtggctgccaggtgagttgaacagtccgattttcagtggggtcccacacagatgggacatggcttaggaggaatcctggtctgcgggcattccttggcccagtggccagatttccggcacttgtagcaagctcctggatgaggaggttctggaagaacccctggcagctggggttcaggaatttggagttcttgtgtgctggaaatgtggctggggtttgtctcacagtgggggcaaggaattgcaactcagaaatacattgctacttggctgcctctactctattattgtacaccttgaaggcgtggttaattaagtcctgttgtggggtgtgagagctggaatttaattttcgaagctttacttaatgttgggagaggattgggtaataaaatgcatattgagaataagatggccttctggcccctatgggtctagggcagtaaagcatctaagggttgttgccaaatgggccatggactgggctgggtttttatacttgatgaaaaagagcccaaatgctaactgatttgggagaggtcggataaagaaaaaggagcattaaccttgactatgcctttagctccagccacctttttaagaggaaattgctgggcaggtgggggaggactagtcgtggaacagaaccgtaagccagaccaggtgtgaggaggggaggtgataaaaggattatagggtggaggagcagaggctgaggaagaattgagacctggctcagcctggcaaggagcagcctggggaggaggggagaggtcagttgggtctgtagaaaaggaaaattggaaagactgagcaacacttggggttggaactgaggggacaggcgggagggaaagaagcaagatttgggacaagttgcatgggaacagagactagggagggaccgatgtgtaaaagagtgcctggatgtcatgcacctcagaccatttgcccattttacgacaagaattatctagatcttgtaggatggaaaaattgaaagtgccgttttctggctgtttggaaccactgtcgagtttctactggggtcaagtggtgttgcagaagaaaataaaatgcttagattttaggtcaggtgagagttgaagaggttttaagttcttgagaacacaggctaagggagaagaaggaggaatggagggtggaagcttgcctatagtgaaggaggcaaatttaaagagaagggtagagacatggagaagggtgtggggagcagctctgggcagccaaagcaggcgtccccgcaattgacttgccaccaagggaatgtgggtgaatgaccaaggcaggtgtccctgtggtgatcacacaccaatggaatgtgggtgaataatcaggcaggcatccccacagtgattaaacaccaagggaagactgtcttcccgagtctgtgactggcgccggagttttggggtccacggataaaatgtgtctcctttgtctctaccagaaaaggaaaggaactgaaattaagagaagggagagattgaagtgtggcgccaagattgaaaggagaaagaggttgagggatagggagagaggctggagaagagagtaaagagagtccgcttaccggatttaaaattggtgagatgttccttgggctggttagtctgaggaccagaggtcgtaggtggatctttctcacggagcaaagagcaggaggacaggggttgatctcccaagggtggtcccctgatccgagtcatggcaccaaatttcacatgcatctgtgtgaagagaccaccaaacaggctttgtgtgagcaataaagctttttaatcacctgggtgcaggtgggctgagtcccaaaagagagtcagtgaagggagatatgggtggggacattttataggatttgggtaggtagtggaaaattacagtcaaagggggttgttctctggtgggcaggggcgggggacacaaggtgctcagtgggggagcttttgagccaggatgagccaggagaaggaatttcacaaggtaatgtcatcagttaaggcaggaacaggccattttcacttcttttgtggtggaatgtcatcagttaaggcaggaacaggccattttcacttcttttgtggtggaatgtcatcagttaaggcaggaaccggccattttcacttctttcgtgattcttcacttgctttgggccatctggtccatgcaggtcacaggggatatgatggcttagcttgggctcagaggcctgacaatttcactgcacttcataccaagtcatacttgctttatggccaagtttattttgacatttaagtaaaacccaataaacaaatactagaaaaatcaattttcaagttcaagtgtgttcttccatggagtctggaaaatgttttaaattttggaatgggacaaaatagggaaagcgaagaaccaatttccaaaaatattttatttggggaaaactttaaataaatccttgtaagaagcctatatacatatatatttttatatatattttatatacatatatattttatatatatataaaaagacatttttctcagagagatttcactgagtttttgttgttgttgttagctatagtgtggaagtatgtagattttacctttagaagctacagttatactgtatttatgaatttccaaattttcattttttcctaccttcatctctgccaagttaatagttaatatgcctcacaaaggcttagcaaaagcaattacaactgttttttgaaacatgtttttttaatgacccaaaggagcatcattctaactatcctttttttcctttctggcagatgacatttgatccagaaatcttcttcaatgttttactgccaccaattatatttcatgcaggatatagtctaaagaaggtaaatatatagtgatcattttcttcttttatcattaagtagagaattttaccagcactaatgagaaactgttatttttatgggcttctctatttggtaagagtatcattatcttaaatttgtgatgcagattcaaacctgacatgcttagaattctagacttcttctaaacctgttctgttgaatacaggccattaaccacatgtaactattgagctcttgaaatgcgtcttgtctgaatcgagatgttctttaagtgtaaaatacacactggattttaaagattttgtatttattcaaataatgtaaatatttccataatgttttatattgatttcgtgtagaaatgttagtattttggatagattggattaaacaaaacattatcaaaacctatttcatcttttaaaaacattttaatgtagctgctagaaaatttaaaattttttaaatatgtggcttgcattatatttctattggacagcattattctggatgattgtaaccaaagactttggttattaattaacattgagtttatcctttaaagtgaaaactcaagactactgttgatgctcatagacaggaaagtccagttttacagtttctatgcacttgtctaacagtacttgagcacggcctgactatgcacattttgtacattagtaattcacataatggtttaagtactggcatcccctgagccacagagtgaggctccagcccacgtggtttttgagatgcagaggtgatgtggctgctcttctgctgctcagctcccactctaggagattcctggggctttcttcctcttgagcagtcatcttcagcagccaggcagcttgttcatcacagacctgattttcttgtgtgtactccaggctccctcttgctgtcaggtctggctcctcagatcccactcaaaaaactggaatggggttttccctaagcaagcagttgaaaaaatttagaaggctggatttgttcaggtaacccttcctcattgccagtcccaatactaagcatcattttgtggctgactcattaaaataaagtgaattgctgtaggtttgggggatttgttttgttttgttttggagacacagtctccctcttttgcccaggctgcagtacaatggtacgattatggctcacagcagcttcgacctcctgtactcaaacaatcttccttcagcctcccaaattgctggaattacaggcgtgagccacccaccaggctgttgtagatttttaaagtttattttcatcacattcagaagatataaaagagaagtcagacatccagtaaaatcaacaggcaacgtaaatctcttagaatagttttgttgttgttgttgttttaatgctaaaggaattgcatttacaacaaaacttcatgaaaactgtgtcttccattattgccccgattctggcatagacattgcccagttccttgcttccctctcaggtccagccagttcttggagttgtctctctcatccctacctactcatcttccagtgggtttttttttttttttttttctgcttcttgacttttccctccagtcctttgcaatgataatcagttaagtccctattagcacaataaggccaggaacgaggctccaaaaccaaaatttgcctaaacagtgaggggtctgtgaactgcatacatttatttttattttcttttgcactaagaaaaaattctgatgtactctattaaatatctttttttctccccagagacacttttttcaaaacttaggatctattttaacgtatgccttcttgggaactgccatctcctgcatcgtcatagggtaagtgacattcggagctcaagttgcaggtggctgtggggtctgtgatctgtgtgagggatctaacacttccaggattcttgctggctgggaaaattgtcttttttttagtatatcacatatttgtatgttttttctgacttaattccacggcttctgacaaatacaaggcttcaaatcaaagcaaactagaggattgctggactttctctgtgagttctggacttctgacttagggaatgtggatcacttgccttgagttatgtgaagcgcattgcattcttcttttagtttgagtaatgccgatatgctcactgcattcttttttgtcttgtattgagagaccttacctgtatttggcaggagtgcaaaagtaactatatgccaagagttttctttctaaaggaaagtttacaagacagcagtctgaaacagatatgtccaaatatcaacagagttgcttaatacagggatagcttttcagttaataccctgtagaatgcagactctttttttcattgtattttcttgattatgctactgagccctaagtcacacgttatatactctggcttgcagctcatcataaagtaaaatgtggtaccaaatggtgaaggcaatccagcctctgataatcccgtccaatacattaaagctccactgcaggaaaaaaaaaaaatgtccaggtactatgactgtgatgatgcagatgtcttcaattatctgatacagtcaactctatccttgatttttactgtctacagctgttataacccagcacaagaaactgatgctaaaaatacacacggttcatgcctccacccattctcttacagagtttctagtgtgtgtcaattgaggccaaggaagtgtcaggcggtgtctttacttgtgcctgtaagcagagggattttgtgttgaatgcactgctaaatttcttttgagttgagcctagaacaagtcaggccatgttatataaaaatattcagaatggtttaaggcagtgagaaaattaaagattttagcacctgaaaagggaggtttgcaagcctatagattagggagccccattaagtttggacacttaaatggtctttaaactgtgggtgacctgagagacacagggtacttgatccttcttaaagcatgttctaggagggcttttctgttctgtgagtatgcaatagctaaatattcacatttctaaactttgcaggggcctgagagatctgtgtaactacagcctctcattcgaagatgagacatcttgaataaatagttggctcaatcttaccatctctgagaatcagggccgttgtcaaaacagaactcagaacttctgcttctgatccagcaggccttcaccctctcttcctttagcaatttctcttgaattcataaacatccctatacattgtttctacacattgagagagggttctgagacatgtggactcacaacaaatgttccttggttagtagtaaagatttattttagtggttctataatatggggtcttgaaatttataatggatccaaattctaaactcttggacaatgctgccaaattatagaatagtaaatttttattgttacctcatttctttggtacaactggttttaagtatatttaagtgcatttatttatattatatgctttcactatcatgaaaaatctaaattctttcttagatctttcaatatcatttttttagaaagcaccaatatatactgtgtgtgtgtgtgtgttgtatataattgcctttatctaaaacatttcaatttaagagatccagtggttttcatttactggggttgagaacctattttgatttattttaaaacagattttaaattgttggttgtccaacaacttataatggaaagtcatttgactaaaagagtagtcctaagaaaaattttagaacggtgttcttagtttgaactgggtatctgagcaacaaaaatttgtagttactttcttaatttgggtcattaaaatacagaagggaaagatagcctaaacattttagaatcgtatctagtgaggtaagggaaatcattgaaatgttttagcttgaagatgaaaagtcagattcatactttagggaggtcattttggtagctgcgtgaaggagaaattttaaaatgggtaccatttaagaggtaatttacgtaggccagattggaaatgataaaggcctggactcaggcagtggcagaaaaggtaaatgtagagtcattagcttggtgaaatcttgggagaatatggcatcacccagggcaagtaagtgaagtgagaaggaaagagatctagggaacatcactattttgaagaaagagaagagacactcacaaggcaccaaggagtattggacccccaaaacaggaagaaaaccaacagggcatgtgttctggaagtcaaaggaagaggaaaagggagggtccacagaacctaacacaggagaggtcaaatgggataggaattgtggtaccactggatttgacccctaggaggtaatgggtgactttacacttgtcttatgggcaaaaatgagggaagagtattggcaagtccaattgttttgggagccatataataagaaacaagaatttacttttatgctgccagtcttgatatataatttcagaacttctgaagaagagggcacatacttaaattcagatcaaactgacactttcataacttggtaacttccattatatgagatacaatcaaactatagaaagtgactggctgtatttttcttataaataaatggtgacaaggacaacaatttatggagtgcttgatacgtatcatgccctttttaaaagcactttgcatggattatccatctaatcttcaaaataatcctattaagtagatactatttattaccctcatttaacagatgaaacaactgaggtttaaaaagagtaacacagtggtaagtaatagagctgggattagtaactaaattgtttggctccggagtcaaataattaatgccaaaaacgtgctttacttctgtttgttgaatattagcaccaaaaaaatgaaattgtataaatcaatcaatattcatcaacataaccacgtttcttcattatcccagtaggagttctcatagacatgggagatttttatttgggaagtccatccaaaaggaattcacatttttaagggatggcctgagtttatgcagatatacgcagatttgcatgaaatgggcagggggagagattcagaatagaagttagatcaaactctttgagaataatttcatagaggaagtggatcctgggcagacatttagtggagaaggataaagaagtcagattttccatgccattaagtgcattagttatgatgggtgccaggaacgttgtgcaaagttccaggatggagagtaggtttcatgtagcagtgccagagaatgtgggaatgaaaatgctagagagtcagctgacaaaaggccatgaagtccagcatccaaagtgtatgagaacatgaaggccatggagagagattgtggaacatgaatgaaactctactggtgggctgtgaccttctgtagctaagcaatattggttttagctggactcagatgctttacaggaatggagatcattgggtttatttgcatgaacaaggtctttaagttttattagtttcatatgatttcagaaattagatgtaaaccgtttttcatattgcatgggaaagtttaacaatattccttctggcaagaaagttgaagaaacctttttttatttcaatgatagattgctcggaaagaattcacctaccttctctagtaccctctcccattttatcacttgagaagtagtattttaaatccatctccttctaagaagaaaagtccatgtgtttgaaatatttctgtattcatgtcctccatcttggggaactattctttgatctttgactctatgtctccaccctatacaccatgccaatatatcacaatgacaacctagctgaagctcactgtcagcacatacattttgttctaagaactcattagtacctatgaaatgcttctttttaagagcaacaaaaattatatgctcttagtttctctgttaatgaggaattaaaacaaatttcacagtttcaaaaatatttaaagaaagggacattgaatgatcaggaatggagaattaattttaagaatacctcatttaaaaattttctttccatgtgccagacactgacttatgctttttacatgtattatctcattttatcttatactacccctatgaggtaaatactgttattatcattattttacatatgaagatgctgtagtttagacttgtccaagattatacagtaagtggtagtaaactcagagccagtctgactctagaacacatgctcttagaatctccttgtccttctcctcctcctaaaatgacactttatgtgtcctgcagtattgcatgaaatgggcagtatgtatcagtaattatatctgtctgacagactaagacctcaataatttcagattcttacatttatcattatggctagaaatcatgaaaaatctaaatatttcagaattggctgtgaatataattgcaaacaggaattcaaacctgtcttttcttactgaaggtggttggaggaatggtacgaatccattttacttgcttaatgtattagtccattctcatgttgcagtgaagaaatacctgagactgggtaatttataaagaaaagaggtttaattgactcacagttccgcatggctggggaggcctcaggaaacttacaatcatggcagaaggcacctcttcacaaggcggcaagagagagaatgagagcgaagcagggaagagccccttataaaactatcagatctaatgagaactcactcactatcataagaacagcatggggtaccacccccatgatctaatcacctcccacaaggtccctcccctaacatatggggattataattcagattactattcaacatgagatttggggtagggacacagccaaaccatatcagctagaatgctggactcggtaactcactcaggaaaacatggatttataaatattatgaggttgtttacattattcatataaacattcttgagaagtattgatttctcattgggcttcttgaatatacacagcataggactgtgcctgacacctctacccatctgtccatgaggcataggagtgagggggctgtgtggacactctccctctgccctcttgtgtgccactgtgcctgctcaactggggaccttgagacctaagtgcccttggaacaggttctggaacctgttcttaattaggatagatatggtgagtctcagtagccccaaaatgctgacttctaaacctggatgacaggacacatttacttgtctagaacccaaacctgaggatgtgtccttcatagatggaggccaatctgtacctcagtgccttccttaagctctaaccctggaaagagaatgatttagaacagggtttctaacccagggaagagtgaccctgagatggtacatagaaggatttcagggaagcagagaatttttcatgggagacagtctgcattgatcccatttcatcagattctctaggaagctgcaatccacaaaagcacagaattagtatgtttttcaagagcctgggcaaagagaaagtcaggacggtgagaattttacatatctccttgtttagctagaactaaaggtttctctaggatgcactcagggtggccgtaaagtatggagatatgcatgctatgattttaccatgtactgtgaggtaataacaataaactacttattatgtacctatctgtgttcccagacttggtggccgtcttgtatctatacctaacagtggatgtgctgagttttagagtcgagaaatgaatttattttttcaaaatatgccaaattgttttccaaagtactggtatcaattttccctcttaatttttgccaatctagtaagtatgaaataacattttattttcttctttggtatttccttggttgttaataaagttgtttacatttttgtatgataccttttcaagctttttgtccatttttctattgagttgtcttgtcatattttcattaatttggcagagttctttatatgttcttcataacaatctatactcatttattttgcaaatattttttcttagtttgcctcttatacttttacttcatacatgcttatgcatgtatgaagtatacatcatcagagatgatgtcttttttttttttttttttttgatggagtctcactctgtcgcccaggctggagtgcaatggcgtgatctcacctcactgcaacctccacctcccaggttcaagcaattctcttgcctcagcttcccaagtagctgggatttacaggcatgtaccactacacccagctaatttcatagttttagtagagatggggtttaaccatgttggccaggctggtctctaactcctgacctcaggtgatccacccaccttggcctcccaaagtgctgggattacaggcgtgagccaccatgcccagttcatacatgatgtcttttagtgaatagaagttcttgattttaatgctgtcaaatttataaatattttcctgtgtggttggaatttttgtattttgttaataagtcctcccctacctcaaagtcagaaagacattctcttctaaagtgttttaaagttgtgccctttacagtgaattcatttcctggaactcattttttatatgatacaaagttaacatccaattaattatttttcctccaatggataactaattacactaataccacttattgtatggccctgccttttctccggatctacaccacctcttctataatatattgtggtgtctgtttctagacttttaattttattttattggtttataatctatccctgcaccaataccatactttcaattattttaacttcataataagtctgtatatcttgtaggataagacagagaggatcttcttcttcaggagtaccttgtctgttattactgtagttctttactgtttcatataaatttactccaatatatatatttatgagtatatatatttacatttataaatatattcttatataattcatttgtatttgtataccttataactatttctaagtatttttcttacggacccacttacatatgagcactaaggagacatgtataaggatatttgtagcaacacttcacaatagcaaaaacttggaaacactcagattctattaacagaataggcaaataaattcacataacataatattacacagcagtgaaaaacagtgaaataaagtcatctatgatgacatggataaatttcaaaaacaatgtaaaataaacaaatcaagtcctgtaatatcacatgtaatatggtatcttttcaaaatgttcacagatgaccaagaaaaaacaattttgtttaagcatgcaagcatgtatggaggtgtaaaggtatatatgcatgtatgtagtaagcaggggaattaaaacaaaattcaatggtatgattatttctgggggagaggcaaaagaatggaatgaaaagaaacaaataaagacaaatgattgataatgttctggctcatgggttggggtatgtttctaggtattcaaaatattatgatgatttataattgtgtatatcgtctatatattctcttgcatgtatcaattatattaaaaagaaaataagagagacaacaaatgatgggagctatttagtagatttataaaactctgattatgttgcttacttccatttctgggaaactctgattcttctgttgtttttgtctgtgtgttttaataagaacaactcgggttggcaggcagcagcagagaggaaaaagtgccaagagtgatgtcgccagtattcctggtcagttcttatcagctgcagagccactatattttcattctcttttcccagctgtcttcaccttctctcttgtttctcccctctcccttcccttctttccaaaccatgtcttcttcactgcccctggagcctacgtctgggctgctgctctctgtgattccgttttcagccagctgcaaaacagcagagcttagggaggctgtgttgagttaggctggaagaccccatgcttcctctgtgcattcatttactctctggattctgagtgggcacagttatagctgtcactggtgtcaaagagaaaaataaatacactgctgccctgacacagccaaataagaaaaaataatctctaatctgtcaagtacaacccaagctgcatagcagtgtggtttctcatatgcatatcacagcatgcacgggctgtatttctggcagcagagaggagagtgaagttttgggaaaaagaaacaaaaggtagaatggagaggactgtggagatcatcagagatgtagtttagaggtgaaagaggtgaagccgtcagagctgtgtgagcccgtgtatcattcaccaatctagctgcctatcacaacctcgaagatgttgcagtaagaataacagcacaggggagagaaaatgaagcaagtcccgagggaataaaaaaggggaacaaatactaactccaaattaggaaatgttgaaaaatgatatgtaagattgttgtggtaaaaaagaaaaatgcctaataacataagaaaaatgtgtaagaataattgaagaggactctattctgaaggagaatttatctgagaagtcttcttattaaacaacctatcctaaggattccaaatatgggattccttttaaatgaaaaattcaagttggccgggcgcggtggctcacgcctgtaatcccagcactttgggaggccgagacgggcggatcacgaggtcaggagatcgagaccatcctggctaacacggtgaaaccccgtctctactaaaaatacaaaaattagccgggcatggtggcgcgtgcctgtagtcccagctacatgggaggctgaggcaggagaatggcgtgaacccgggaggcggagcttgcagtgagtcgagatcgcgccactgcactccagcctgggcgacagagcgaaactccgtctcaaaaaaaaaaaaaaaaaaaaaaagaaaaattcaagtcttagaattactcagctcacctttattcttcagtaccctcagacatagtcatttttttcttgatttgaccaaaatctgatggattttgctccaaccaagttacagtaaatgtgactctgcttctacacacacacgctcacatacatcaactccattcagataagaggtaaaaaaaaatcaggggagtatatcagttacctatttctatgtcacaaactacccccaaaacataatgggcttaagacaacggttgttttaatagctcacaattctgtggctcaacaatttaggctgggctcagctgggcagttctgtggttctcatctgaggtcacccatgtgaccacattcatccagttccttgactgggatggatggtctaagatgggcccactcacctgtctggtgattggttctgactgttggctgattgttctggggggcacaggtggggttttaatccatgtagcttctcattccctagtggcttcttcatatggtgctcacaggtcagcattccaacagagtggggacagaaatgcaaggcctcttgaggtccagtctcagaagccagacaacattgctctcactgccttgtattggtcaaattatcacaagggcagctgagattcaatacatagggaaataggcttcacctcttgctgggaagtataataatgtcacattgcaaaagggtaggcatacagggaggggaaggattattgtagctgtcttaattcaggctgctataacaaagtatcatagactggcgtcttataaacaatagatatttatttctcacagctctggagtctagaagtcctagatcagggtgctggtatggtaaggttctggtgagggccctcttcacgattgcagatgaacaatttctagtgtatcttcacatggtggaaagaagatgagagagctctctggcatcctttttataagggcactcatctcactcatgagggcttataacctaattacttcccaaaggtcctacctcct

SEQ ID NO: 1103 - DNA, 459 bp, Homo sapiens
ttgtgaagtagcaactaaagtggcagtgtttcttctgaaattctcaggcagtcagactgtcttaggcaaatcttgataaaatagcccttatccaggtttttatctaaggaatcccaagaagactggggaatggagagacagtcaagggttatgtcagaaaaggatgagtatcagtttcaacatcagggagcggtggagctgcttgtcttcaattttttgctcatccttaccattttgacaatctggttatttaaaaatcatcgattccgcttcttgcatgaaactggaggagcaatggtgtatgatgacatttgatccagaaatcttcttcaatgttttactgccaccaattatatttcatgcaggatatagtctaaagaagagacacttttttcaaaacttaggatctattttaacgtatgccttcttgggaactgccatctcctgcatcgtcatagg

SEQ ID NO: 1104 - protein, 61 aa, Homo sapiens
MERQSRVMSEKDEYQFQHQGAVELLVFNFLLILTILTIWLFKNHRFRFLHETGGAMVYDDI

SEQ ID NO: 1105 - DNA, 858 bp, Homo sapiens
gaatactaagccagggcagaatgcttgtgaagtagcaactaaagtggcagtgtttcttctgaaattctcaggcagtcagactgtcttaggcaaatcttgataaaatagcccttatccaggtttttatctaaggaatcccaagaagactggggaatggagagacagtcaagggttatgtcagaaaaggatgagtatcagtttcaacatcagggagcggtggagctgcttgtcttcaattttttgctcatccttaccattttgacaatctggttatttaaaaatcatcgattccgcttcttgcatgaaactggaggagcaatggtgtatggccttataatgggactaattttacgatatgctacagcaccaactgatattgaaagtggaactgtctatgactgtgtaaaactaactttcagtccatcaactctgctggttaatatcactgaccaagtttatgaatataaatacaaaagagaaataagtcagcacaacatcaatcctcatcaaggaaatgctatacttgaaaagatgacatttgatccagaaatcttcttcaatgttttactgccaccaattatatttcatgcaggatatagtctaaagaagagacacttttttcaaaacttaggatctattttaacgtatgccttcttgggaactgccatctcctgcatcgtcatagggtaagtgacattcggagctcaagttgcaggtggctgtggggtctgtgatctgtgtgagggatctaacacttccaggattcttgctggctgggaaaattgtcttttttttagtatatcacatatttgtatgttttttctgacttaattccacggcttctgacaaatacaaggc

SEQ ID NO: 1106 - protein, 176 aa, Homo sapiens
MERQSRVMSEKDEYQFQHQGAVELLVFNFLLILTILTIWLFKNHRFRFLHETGGAMVYGLIMGLILRYATAPTDIESGTVYDCVKLTFSPSTLLVNITDQVYEYKYKREISQHNINPHQGNAIKMTFDPEIFFNVLLPPIIFHAGYSLKKRHFFQNLGSILTYAFLGTAISCIVIG

SEQ ID NO: 1107 - DNA, 32857 bp, Mus musculus
  misc_feature (1)...(32857): n = A,T,C or G
tgtgtctttgtcaaatcaaacttgaacatacttgagtggatttgtttctgagctctttattttctccttttgatctgtgtatctatatctttggttataccacacagttcaaccttttatatatatatatatatatatatatatatatatatatatatatatacacacacacacatatatatatataatgaggtcactatcactgtcttcagacacaccagaagagggcatcagatcccattacagatggttgtgagccaccatgtggttgctgggaattgaattcagaacctctggaagagcagccagtgctcttaccctctgagccatctttcctgtcccatatacagccttaattactgtcagtgttggaatgtgtggattggtcctttcactcttactctttaaaaaaaaaaaaaagagtacccatgtgaaggtctgagaacagttttgtggggttgatcttctctcacctttacataggttctagggatccaacagaggttaccatcttgtcatctctcaaactctttcagacttgttttagttggggctgtcgaaaagaaaggaatgcttaacattcacaaggttctgggttcaaatcccagccgcaacatatatataaagtacacacacagatgcacatacatatacacaaattcacacagcacatagatattcacatagacaaacacaggtacatacacagatatacacaccatacagtgacagatagacagatacagagatgcacacacacacatacatacatacaaatacatacacatgcatacatacatacatacacaagtacacatatacacaaaccacatagacacacaaatacacctacacacaaatatacacaccacaccaacacacaaatacacagatgcacacacatacatacaaatattcatacacacaaatacacccattacatagacacacacaaacagacatatgtacacaacacatatagacacatagacacacagatgcacagacagacacacacatacatagacatacacaccacacaaaacacatacataaacacatagagttttaattagtctagttccataatctttcctttctttttcttgtcctttttttttcttttaaagtaaagagacaggtctgtaacagcctggcttctttctagcttaatctttataccgactatagcctccctactgctgagattatagatgtgagtggccatgcttaactagttccatagcctggggatggcagagggctttgctgtgagtttgagatcaggccaagctacatataagttccaggccagccttgactccatagtgagaattggtctcaaaagaataaaatcacatcatttgaagagaaatgtatggaactgtaaatcattatgttgagtagactcagacaaatgccattttttctagtgtgcagaatctaggttggttcatctattcgttgtgagtaataagacatgaaggtgaagagtggctttttgtgaaggaaaatggaccactggaagcaaggagggagacaggaagagatggtgaggatggtcaagaatgtgctgtgcacaattgagagttttgtgaaggatgtccttttgtacaatgaacataaactaatgacaaaatcagaagcagaaaaaaagaaagcaaaaataaagaagttaggcctggaaggccaagaagtctccctgcgggtgttcccgggtctttttctcccaagtagagcgagtgcgttaaagatgaagtgaaggtccattgtcagagtcccatcgcaagacaccagccaggtgttctcaggagcatcccttctcccgcatattcacagggcttgatgcctgataacaaatagcaggtgccaatctagaggcagaaacagaaaagtcccaggtaaagaccctagctgctgatattctgaatgccatgtcattgagactaccactgtgacttgtagtggcaaaggagtcaagctctgagtactgaaagagcatgtgcaaaggagaggaatggttgcagaggtccagactgtacccaaagccgagtagtacatataaggctgagcttcgggctctctggaggccatatcagtgcaggtgcacctttgctggccattttttttgttctgtgccaactgtagtactaccgtgcacgtactctagacacactgccttcatcctgtgcctgggatgggctcgtgggcttgcagtctttccaaggtggagtctctgagctgttttgatacccttctttgctagattatctccatagtaaacctgagtcagagcttcccacttggctgcagatgccccattgaccttagtggtcactaattaatgtgtcctggtgcccaagcatggcaaagagatgtgatgagaaactggtgagagcctgagtgaattttccatgaagaagtgggaggctcaggtttatgcggttgcataagataacctattccaagggctgagtcgaggcctgaatccaggtcaatttggcatcaagattatcatctagactctataaggaactcattagcaagtcagcaaataaactgattgaaaatggacagtagaattaactagacagttcttaaacctacatgataccgatgacctagaagtacgtgaagcaatatgcaacatcattaagcatcccagagaggcaaaataaaagtaaaataagatatcacctcaccccaaactggggatgtagctcagtagaacacttccctaggatgtgtaaactcgtgggattttatccccaggaccataataaaagtgattttcaataaaaacttaaaaataacaagccaaaagctggggtacactattactgagaatgtaagctattataatccttatggaaagcagtgtggaggttccttaaaatgctcaaagtgaagccatcctaagactgagctatcccactactgggtatacattacatccaaaggaaaatttaaaaactgtgctgagacatctgctgcactgtttatagaagccacgatgtgacctaaatgcccatcaactaagatgtagaggaattttacttcagcaacatggctgctctggcaaggaatcatatccaaagatatgatctgtccagaatgcaaacacaccctgggttataatatgatctggctggaatacagacacaccctgagtacacacctttaattccaaacaatggagataaggttagtttgtagaagaaagcagccatgcttgaaagtgatctatcgaggtgattatcaaagagttgatgtagtgtatgtttagaatggaatgataattgaggggcagacaaagtgtggagtcagagaaagatttgacagaatgaatccgagatagaatacgcccaacttacatgagaaccgcagaggaagagaggctacgtaagaacagtaagagagagagaaaaaaaggagggttgatgggtagtagttgatgggtagtgtgtgtgtgtgtgcgtgtgcgtgtatgggtgtgtgtgtgtgtgtgtgtgtgtgtgtgtggcaattttactgggacagttttacagaaacaggctacagagagaacaagctagacacaggtgaagacagagaatgagaaggagtcagaagattaggacatattgtcaaagttaatatgaggccaggcagaacaattctgccagaagccaagagaagctggattgaatcagtcagcttgaaaaattagattgaaggaggctagaagctttcaggtctaggcatagtgatagaacagagaaggaaatgctctgggatcagctgggcagagctcagctgaaaataaaatcgacatttacactgatacatggataaaaatacctatacacaatggcatactgtttggccataaaaggctgacggagatgatcaggaagatattacgttaagtgaaataaacaaggcacagaaagacaaacagcacacagtctcattcataggtggactatcagagagttgatctagtgtatctttagaataacaatggcagctagaggctggagagagtagtggttacagagagcacctggtgtctgtgacataaggaactagtccttcacagtccggagggtgtaacatcacccacactgcaccctctccaggccatcctatgaccagtactagtcatacataggagagagagagagagagagagagagagagagagagagagagagagagaggtgattatcatggtggagttgcaaatagacatccagtttcactcctttggaaacagctccacatctggctggcttccagtctttcagtttctcatcaatgttcttccagccatatttctttgtttactaacaaaggacctgtcccacatgttaaaagacccccataagctctgtggtaagatgaaagtcccgagactcccatgttctggcctggcgagcttgtttccagatttttctgtgctgccctttcatctccatacagacaagagacaaacctcaaacaggagatcggtcagcagttattaagttacagttagataacagagcttattctcctgtcctgttacatagtagagtaatttgagaggaaaaaatgttttccaaaaggcccacaagataggatatttgaaagcctttaatcaaaaagaaataaatgataagtgtttgaaataggcttgcttttttatttgaaataacacattgtattcatgtggcaaaacaccacatagttacccacaaatataatgggtacattttttatacgttcattaaaataaatagggccagtgagatggctcactgaataaaggtactattgtgaaagcctgctgacccatatttgaacctgattcccattggtggaataaaccctaaagttgtactctgatgtctatatatacaccatggaatatgcatccacactcatatacatacttatcacacatacacactaataataaataaattacgtaaaaaaaaaaccctatcatgctggacagtggtggtacatgcctttaatcccagcactctggaggcagagcaggtagatctctgagtttgagaccaacctgatctacagagtgagttatagggtagttaagagaaaccctgtcttgaaaataaaagtgctcttgaacaaataacatgcctctgtttgtttgtttgtttgtttgtttgtttaatgagggaaataatggttcttttactcattgaggtcatgaaaagctgggcatagtggcaaacaccttcaatcccagcactcaggaggcagagacacgtggctctctgagtttgaggccaggctggtctacggagtgagttttaggacaacaagatctacacaaagagaccctgtttcaaacaaacaaacagaagaagaggaggaagaggaggaggaagaggaggaggaagaggaagagaacgaaatgaagtgggataatcctgtaacaatctggcaatggcctatatagagtataagcaatatccactaaagcttagctattattattactacaaatatgtcctgttgtcacaaaggcacaagtgtgataaaattacagtcactgttgatgaacctgtaagacttttcatctaaagctatgttagctctcgctgtcgctcagaggtcagcttctctacttaatttcgtcccagatgcagtgtccgttttacctgcccctcagaacctctctgtacagtcaaccaacatgaagcatctcttgatgtggaacccagtgacccagccgggggagacggtgctctattgtgtggagtatcaggggtgagtctggtttgttttttgcttaatagtttttcttcctcagatagcacttctgagaaagacagtccctccttctctactccaggaggttttgaggctcaagaatagatgttttacccagtccaccccttagtgttaatgggtttgagagacccaaatacatttaggtgcacctgttttcaacagtaagaaaattgatgagtttggtcctcagctgggacagacaaatccagagagctaggcccttggaggtgtaggaggccatagtttccttgacatatttggataaaaagtctaaataagtcttgaccctaaagttcagctgacccaggggtgggtgaacttggatctagtttttttcccagatgtccaggctctagcagttgctgagaagtgactgacagagttagtgctcaacatattgcattagcaatggtaagacccaaggttaacctgtaaactcacctctccaatgaccaggtaacttcctagatgttaggagctacaattcttggaaaataacaaggccacatgggaaaacatggtggccatatgggtttgtccttaaaagcctctgcaacatgcgtcttgaggccactcagtggggaattccagggagttgtcttgaccaaagtccaccctggtcaagtgtttaattaaagcttgcttcaaatttggctcagaattgggaaactggtttttctcttggggaatcccagtattaacacaacaagcacaaacagagccctacatgtgtagagacatgcttctagggtcagggatacaaagatgcaatttatagatacagggaaactagtgtctagaggaagagagaactaaataccctgggtgtgccctcgtcagtgttgcagccactagctcctagtacctatttaggtttaacctaaattgaaacatgttgctgagtccccttctccctttttcatatgctctatagccacaagtggccagtgacaaacacccccccccccactcccaacaacattgactcaaaaacatttcagtcatcacaaagagttctattgggcagcagagttgggagccaaatgcagagatttgagtcctgataggaagctgtgaaggctgatgcaaaggagttgagtgtgcagctcctttgtcttaggtggtggcctctgtaggaggtgataccctagctgtgagatagcagaggcagaactcttgaggcagtgaacatctcggttgaggccgtaggcaaagacatcaccagcattttgaaggagtgagcagcaggtcagtagggcaggagaagcagcatccctagagggcaggatgggagaaggccagtgtctcacaggaagtcatcagggagagaaacgtcacagtctgccgagtgtgcagtgtttgcggatggaatctcctcggcagaatatggagcatgggaagccacagtgtggcaaggcatggtggcagctgagatgggaatggtgacagtggatgtagagagacagggacagatagagactaatgctaaggtttctgaggagtaaaggagaatggtggtcagggtgggaagggagtagagaatctggggctggggagagaatgcatgttctactgacgcacgaaagcataatgacagcaattttgaccatcttctggtctgcctcaaagggtgtgctgtgactctgccttctcctccttgccagggagtacgagagcctgtacatgagccacatctggatccccagcagtcaatgctcaccgaccaaaagtctggagtgtgatgtcaccgatgacataaccgccacagtgccatataacttcagggtcaaggccatgctgggctcacagacttcagcctggagcaacctggagcacccctttaaccgaaatgcaagtaaggcacaaatcctcctgccctcataggaactaccttcagcgtcaaaataactggtgtacttataaacacaaaatcttactgacatatttttaaattgctgactgtctcacttactgtctctctccttcctcacgttgggagtcagtcctgattgtcctgttagggtccacgggtatggacattccagcatgggcactgggattcttattctaatcgtgcctctgtagatctttcccatctgaagccttgttaaccccatactgctgagagcagcttcgttgtttaaaaacatctgtacatttaacagctactagaaacatttcctttctgtggtcactggcaaataacttttctattgtaactataactggaaagtgattgaaagggaagaagagagtccaggtaagtggccaagggcaagccatggctatcgtgtaaaaagacctgtgtgtttgggatgcgatgagggctggatgggcaatgtggcagatgaagcagctggccctatggtaaagtttgttcaagtcaggagatgggagcaatggaaggagacagggtctgagccatgtctttcttacagaacaaatactatggccactgagaggaaagtgacctggagtagggtaagagcagaggaagaacaagaggggacctgatagctttcagctaagccaagacggtttctggtctctagagtatcagagaaggtacgagggcatggaggaattcaggagacatggctgcatttaaaatggacagagcttggggatcggctaatgagggatgggttggggagacataatctagcttcttacctgggttgtgagagtcctatctaaagcagagaacccgaaaggagcaacagatctcgagggacaggagaccctctcctctcctctctctatattatttggagctgagttcctgtgacatgccatgctgtggatgtctgactggcagctggaaatcaggccctggggttcttggagatgaaaggcaaacacacaacacaaagttacattagctctaggcctggagatgatgtgaatatccaggggcaatgtggggaggagaaaagaacgcaggacaggctcccagaacctcggggtttaaaatgcagacagagggaggatttgagtaggtggctgggtaggtaggaggggcagagagcttctgataagcttaaggaggcccttgggtggcgcttgagaaagtgacttggctgcaaccaccacacacagtggactgtgtggaaacagaaagaggcagctccttgtgtgaggtgggagtgggtgggatggtaggaggtggtgctggggaaggtagggcctccagtggcccattttcttccagtggcaggcgatctgcttggagtgagggctcaggaacattaagtcccagtctccagtaatggagtacgtcaagccactgaggacagaggatgctgagtggaagtcaggagggtttggatgctgaggcatcccaaactggccctgaggaattatgagggttggttcaaatccagcttggaatttgatagctgtgtgagtccaatattttgcctcacgggatagctgaggggaagcacatgaattgttgttaatattattactgttgccctggggatgccggagctgagagccagtgagtagatgaggagcattgggttgttggagtgggagccagggaggctttgttgccttatgtggacttctctgctgagcatcttttccgggcactgggaagacttggctgaaatggtgggagcccagtgtaggcacctggaggctcatggacactggaggacactgcagctcttcctccgcccacagagttcaggcagcgcccagccctgcttcctctggcacctgggagctcgagactccagccaagaactcctctggggtctggcagctattgctggaaggaaggccagccaggacagatggagatcagggagtgccggcagttatttgggaggggctgggcagtgaaatctgtgctcaagaggccagcataaacaggaaaaggtcttgctgcaggggcatctgagggataggagtttgcatgtgctgaacagaacagaatctcaagagcaacctagctgagttggtactagctctctctctctctctcttctgtctctctgtctccctgtctctctctctcctcctcctcctcctttttctcttctttcttctttttcttctttgatacagggtcttactatatactctggatgtcccgaaactcannnnnnnnnnnnnnnnnnnnnnnnnnnnnnnnnnnnnnnnnnnnnnnnnnnnnnnnnnnnnnnnnnnnnnnnnnnnnnnnnnnnnnnnnnnnnnnnnnnctttggctgtcctggaactcactctctagaccagactggtcttgaacttccagagatctgcctgcctctgcttcccaggtgctgggattaaaggtgtgcaccaccaccacctggctagcactgaatctcctaagggcattccattcgccttttccatttgagagggtcaccctgacttctctgacacatgaaaatccacaggaataacatttaccttctgtgggtagaacaattgagccaagtatactgattgtgtagaccagaggtttctgcccaagtgctaccagaaaggaaggaagaaaggaaggaaggaaggaaggaagaaggaaactctctagactgtaaaagatggcatttaatggcccaaattctgactgtatgtggagtgggcattctctttttgcaggtattacaggggcagtggtgctgtgtctgaactagctacatttgcacaggtggcctgacttcccaagtcctcttgtcccttcaaggggcagctcaccaaacccagggatattttctccaatgaggatggcaagggaaaaccactttgctctctgagtgcttcctctaggaactgcctttcttctctatgttccttggcctcagtgcagagggatttagcccatgacacctcccttcttacttcctaagccaatgccaatcatcgcacaggcccttctggtcctgcagtgtctagattgatatcgaagaaggggaggcagcctgtatgtacccttctgttttggccccttggtggcaaggtatccccagaggctggcagcctctctgttagggaacttgcaaaatgcgaaagatggtgtttgtgcttgggctgtgatttctagaagtgattgtcagagtttctaagaaacttctgacttgctgacagtttttatgtaagattaagaatccttgggccaagaacagaaggacaaagccacccaagctactggtgtctgcaagacaccaggtatcatatgtgtcagggctctgtgtgagcgctagggatgcacagggttgactctatcaggtatgttcatccctaaggggcaaaggcaatgccagctgtgctcagctagcattaaggtgttggggattggttctaatgttttgagttaattggaaatctacctgtccaaatgataaaggtcctggtccccagttggtttttgatcgataagtgaaattgccagcaaccaatggctgggcaaagggagatggggcagggcctttagatttgagcaggctaggaactgggaaaacggagacagagaattgccatgacttgggggagaaggatgggacataggagctccaggagagaaagccatccagccatgtgaaaattcaagtgggtggccaccggccacgttttcgattaggaatgccgtagtaggtgaaggtttaggagttcctagcctttgaggtagccaaggcattttaaaattaactggcctgtgtatgtgtgccttccattcgtgagaactggtacacacatgcagaccacagcgagggcggagctaaactcagcgctacattagggaaaagtatccgctcatttagtgtcaaggtgaagaacaatgaaacagggtggtggagagaggaggcagagctcattctttgaaagggaaagaaagcaataatgtttattcgagttctgagaaccaccaaggtagctcagcaagcaaaggcacttgctggcaagcaggacaacctgagcttaattcccagaacccacctggtagaagaagagaactggcctctgtgtttcacatgcaagcacgcgcgcgcacacacacacacacacacacacacacacacacacacacacacactcaccaaatatattttttgaaaacaaaatttaatataaataaaatttaaaaagaatcttatgagcatccgtggagtgcagaagagtgcttatatacattattccacacactaggacccctcggcagaccatcccgccccctcgcccacccatctggccgctgtgtctccactgatggcatggtcattttatcccaaggaaaccggttctccctggagctgactttgattctttctttctcttgccaacagctgtcctcaccccacccaggatggaggtcactgaacatgggctgcatctggttattgagctggaagacctgggaccccagtttgagttccttgtggtctactggaggagggagcctggcgccgcggtgaggcttcccgcagaccctggcctttgagtcacgccttagagaaggcgcacagctttctggggggagagggagtgtgtctagctttgcagtgctcatggcataagtggcttgaccagggtgaagtttaagaaaggagagatgagagaaccaaccatccatccctacactccttcctcaaaggaacctttgttcatcctaggcctcggccagggtatctgggcccttttcaggccaggtctattgaagtttgggagactgattcccttgctttaatgcccccccccgaacccctagtgcttttttgatgcatttgagttttcttttcttcctcaccacctagtctcagacatatagggccaacagggcaggatgttccagcccagggtgttccggatgatttcaaaagcagaaggtgggcatgaacctctcgagggtgtgtgtcttggcagagtgtggaagtggggcacggagccaggagctagcttatgaataagactatctaattatgatccaatgggccgtgcagaaagcttggaagggagctgcccttccccatgggaaggccgctgtagtctgaggtgagtgggaggccagccctcatggaagagtggtcagacaaacagcagaggcaacacggtataaaaccctctagcagacccaggggacgccatgccctatggaaccctgtttaagcggatataatggcagagcctggtggcccacctcagtgggcacaaggaaagctaattttctcagaaggatcaacatgggcaacagaggtgtctcaccaaatctgtgagcagaaccagcaaagggccaggcagaagtacagtcttcactacacagggactctggcctgtgggagccttggttcttcttcttgaaggtcttactgtggcctctccccttcactcccaggtcctatccatgcctgtgactgtgcctccctgactcctcaaagcatctcagactgaccctcctcacccactcctctccctttgtcctcctgtccagcttgaggtatttggttccccaagaccaaatccttcagggatgaacctcattgcttgtgccttaccggtcggtctaagctgcgtggggtttggacagccagtggagctccgtgggaccccttctcagcctgggctgttcagtgtcacatagcaatatctgggggctctgcaccctcattggagtgggacagtgatcttggaagatagctgtgggcaggtgggacaagttattggccaatatttaccctgctgggtcagggcacactagtagcacgttgcattgccagccaggcagatggaaccgagtgggagaaatgctacttggcaggagagagcacgcatcaacctcatagtctttgggggtggagcctttccccctcccttgtaactgggaggctcattgctgagagagtgtatgccctgagtcatctgggctgggtcacacaagcttctacaggctcctctacaggcctgggggttagagtgggtgttgagggttgggcagacaggtggatggactctgctcaaaccttgtcctgttggagaggctgtttcttatctccctttaacccttgtgcctcctagccactctctttgccttgccccaatttggcttcgtaactctaatcacgacaggaatgtgtttatgtaatatttctctcccgcatgcaaggtctctgagagcaggggcttatgtgtttcattcggtgctgcatcccgaattatattactacatttttatatcagtatattagtacaggcctaatagctatgagtgcgtggatgaagaaatgaatgccttcatgaatgcgtgagatgtgttctctgttctggaatgttctggaaaggactacctgcactttttcctgcccagctctccccaccatcttcagctctgctgcctttaggtactaactgcgtcttaatctttttttaaaaggaacatgttaagatggtgaggagtggggacattccggtgcacctagaaaccatggaaccgggggccatgtactgtgtgaaggcgcaggcactggtgaaagccatcgggaggcacagtgccttcagccagcctacgtgtgtggagatgcaaggtaaggataacctgcttgtccctgggtccctgcacttggcagccttaccactgcatgcctggatgcccgtcgggtgcctggttctgagtctttccctggctttacctccaggcttgcttccaggcttggtgggttctaaggtaaactccgactcccccatgggtggaagcccaccatggggactggataggatttcttgagcagttgactggaactgcccccaaagttacctcctcgtggggcacattgttacaagactaccttgccaggtcttggaaggagggggagacaccacactgtataatacaattacagccgcttttgtctagaagggatcgtagagtctatagagccctctttttgacttttttcacttgaatttaaacaatttaaaaattgtgtttgtgttgtgtatatacatgtgtgtaggtatgcgtgtgtgcacatatatatgcatgtgtatgtatgtccacacatgcacatgtgggtgtgaaggacagaggctgtattgggcatctgttctcttcctctttttctattttatgaggcagcctctctcactgaccccagatctaactgactggctatgctgtctggccaacaagctccagtgactcccccgcacccatgttatagatgtacacagcctttcctggcttttatatggatgtcatagatccaaccttggctcctaatgctggcatgccgggcactttactgactggagcacctccctagaccctctgtctacctctctcgctcaccatctaaaaaaacctacagcaattaaaaactctttgaagagaaacaaaatcttacattccgtgagcccaccgtgcaaacaccactagttacatttttcttgtaagctttaaaaaattattgttttgaatatataagtctcttcacatggcccatggcacacagtatacatgtaaattaccttttctatgtctcttctccatttacacagttcctgcattctttcccttcagtatgaatttcttatgtagtcttctgaagacatttgaatccatatacatgtaaatggggacatgtatatgtaagtatgtacatatatattatattatacatatgcacacatacatacacacacacatataatcttttaagcacgactgatggcatatgtactgttctgaatcttgcttttatgtatcttgtagatgtttgtgagtgaataaggaaattccatcatcctttttcattaccaaattctattccatttgtatatgtgtatatgtatccttctgtgtgtgtgcatgtgtgtgtgtgtgtatgtgtgtatgcatgcttgtgtgtgtaggctaaattaactgatctgctattgatagagttagattccccccaccaaaatttccttgtgcagaatcacttttgctgatacattatacatatatatgtatgtatgcatgtattatgtatgtaagtaagtatgtatgtatgtatgtaagtatgtatgtatgtaagtactgtgtatgtatgtaagtatgtatgtatatatgtatgtaagtatgtattatgtaagtaagtatgtatgtatgtatgtaagtatgtgtgcatgtaagtatgtatgtatgtatgtaagtatgtatgtaagtatgtatgtatatatgtatgtaaataagtatgtatatatgtatgtatgtaagtatgtatgtatgtaagtatgtatgtatgtatgtaagtatgcatgtttgaatgataaattcctggaagtaaagtagctgggtcaaaagacatgcatttaactttgacactgttgtaaatgccctcctctaaggaattgtgacccttcagtgatcccccatttaaagacatgctgtagcacaatatgacatacgtgttatatctggtttataacatacatgttgtatctggtttgtttttcgcaaatacattcataacattttccataaacattttctgagtaacatttcttggtacttaaaaaattatttgtcaagcttatgaaaaatccaaacaatacagaactataatgagtaggtgttcctctatctttcctcatgctgctcaagagactagctgttacaatttggatatagagtgtctccccatagactcatgtgtttgaacacagtgcctggctcacagaaccatttgggaagttgtaaaaccactgggaggtagggcctagctggagaaagtggttctccgggaggtggaccttgaggtttagagctcaatcccacttcctgtcctgtttccggagccatggggatgtaaacacacagcttcctgttcctgcagccatgaccataccttccctgccaggatggaatgcatcctcagagtgagagtcaaaataaactctccctccctttccttgcttctagttaggcatttgatcacaacactaagaaaagtcacaagtacatttttacaggcaaatccttcattcttcttccccttctttccctcnnnnnnnnnnnnnnnnnnnnnnnnnnnnnnnnnnnnnnnnnnnnnnnnnnnnnnnnnnnnnnnnnnnnnnnnnnnnnnnnnnnnnnnnnnnnnnnnnnnnnnnnnnnnnnnnnnnnnnnnnnnnnnnnnnnnnnnnnnnnnnnnnnnnnnnnnnnnnnnnnnnnnnnnnnnnnnnnnnnnnnnnnnnnnnnnnnnnnnnnnnnnnnnnnnnnnnnnnnnnnnnnnnnnnnnnnnnnnnnnnnnnnnnnnnnnnnnnnnnnnnnnnnnnnnnnnnnnnnnnnnnnnnnnnnnnnnnnnnnnnnnnnnnnnnnnnnnnnnnnnnnnnnnnnnnnnnnnnnnnnnnnnnnnnnnnnnnnnnnnnnnnnnnnnnnnnnnnnnnnnnnnnnnnnnnnnnnnnnnnnnnnnnnnnnnnnnnnnnnnnnnnnnnnnnnnnnnnnnnnnnnnnnnnnnnnnnnnnnnnnnnnnnnnnnnnnnnnnnnnnnnnnnnnnnnnnnnnnnnnnnnnnnnnnnnnnnnnnnnnnnnnnnnnnnnnnnnnnnnnnnnnnnnnnnnnnnnnnnnnnnnnnnnnnnnnnnnnnnnnnnnnnntttcttctttttcttctttgatacagggtcttactatatactctggatgtcccgaaactcactatgtaaatcaggctggcctagaactcaagagatacatctgtttctttctccaaatgctgggattaaaggtttatgccaccatgcttggcttaccttcctttctaaagacacacggtatgccaatatgtgcaagtatatctttattgttagcgataccatttactctccaaatattttccattatcagtcaaattgtaatctgtctatcctgtttcttcttttaagagccgaattgctaacctaccatgccaatgttctgtaatatcttccatcagcctgttttgtttggcatttaaatcattcccattggctctggaagatgaagtccttccttttattttgatatttgcagagcactgagtacatgtcaaatcttggcctgtccactggggcagagaagggagtccctgccttccagttatggaagcaaacagcaaattaataacatgtgaggtgtgtgtgtgtgtgtatgtgtgtgtgtgtgtgtgtgtgtgtgtgtgtgtgtgtgtgtgtgtggagaggcacagcacacagggatgcatgaatggcaggacacaacctggcaggaaggagactggctgcggctcttgtctggacattcctgtgcactgactgatgtacatacctatttccttccttggaataactttctgggaatggacatcacaggagggcattggaagcgtatgaacattgtacggtttttgatgtctactgccaaagtattttccaaaattgaaacaatacataagccccaccctacacgccacagcttcatgagctgagtcacattgtgggtgaaaggcccaggcaggaggtgataaacaggttgtttgaggttagatagaacagagaggtgggaaaccagctcttcttctcttctgcatctccagatgctcagacctggtgctttttgctgtatttgttagcaaactcatcacaggcttcggagctagaccttcctgtgtatcctgtcctaggccattagtccatcttgagcataaataacatcctcttccatgaaagaggccctcaccgtgtggaacagaggcctgaaccttagcagagtcctgagggagtggaagtcgacctagcacacgtaataggcccttgatctgtcagttattatgtgactgtctaggggacttaatattttcctccatcatcggagtcaatgccaagagcaaattgtgaaacactttgtttttggcttccaccgagccctgttctgggctgttctgctccagcacctcctcttcatcctgcctgggacctggcagcctgccttcctctggtagcagtgccaggcacatgctcccatgaacaaagccttacattccccgtccccttcccgagacggagatggtaatcgtctctctgaaaaacagcactcgaattgaacttctagaagaatggtggtagttgtagccattggaggacacaccaagtcgcagggtgtgtcacctgccagcttgacctgagtgcagctctaagaaactctcggaggtgggtgcgggactggggctccccttccctgcagttcccaagccttctcttatgatttgtccataggagagtctcttccgctggcactagctctgtttgcgtttgttggcttcatgctgattctcgtggttgtactactctccgtctggaagatgggccagctgctccggtattcttgctgccccgccgttgtcctcccagacaccttggtaagaacattcctgtacctgtcagtgtgatgctggccagatgcatcatgggccttagtggggcatagacatgtttttcatggtttatgaagatatgcagagactggagcaagcatcattgggacttcacttgtcttagtctgtgatgctgtaataaaataccacagactaggtcatctatagagaatagaagttcagtggcttctggaggctggggatggtgatggtggaatgaagacagaaggggcttatgggtaaaggtcttcttgctcttacaacatggctaaatgtgatagaacaaaatttcacactggtagccttaaggccttatagtttacatttatgtagttgagcctttacattacctcccacagttcctaccccagccccattgcgctgggcttttgtttccaacatgtggtttttgaggaaacgctcaggtcgcaatagctcctgatcagaaggtctgggtgagttctcccttttccagagtatagtaagcatcccgaggctctggcaggccattttgctgttcccccaccctccagatctagcaataccaaaagggtggctggctgtgttgttcagcccagggtgcctacggtttcaagagtcacgcatgcaaagagtctcacgattctcaggtttgaagatcgtgtggcatgaactgtgctttgccttggacaggcatggagcaggccagggcgacagtctggaccttcacagtgactgctcaaagagctgtccttccagggacccacaagcccaggatgctcatggagcatgtctctgagcctctgggtaggtgtaggcaggccctgtgtgcctgcaccctggccggggaagagtaaaggctggcctcagccgctcacacatgttccaccggtggctcttcagaggcctcctagatctcaaccacaccaagcagtataatcaaagaaagaaagaacaaacaggaagcactgcgtgcgcgcgcacacacacatacacacacacacccacacacccatccctgtcacctgaaaggtgtcacagtgctgtcttgtgggcagtcagttgctccagtgcatcagaaccagctgtggctgtcgtccacacactgtcggggctccttaacagcctgcagtttctatgaagctgctcttgtgtggcttgcttttaggtctctacaagagacctgacaagaggaataactccccctttaaccaggtcttcaggttgccctccacccttctctcataatgccagctctcctgtctcggtcatttccaagtagtcataacagtgttagcaggcagtagcagtagcagagccgagcaccagggctcttgtgaggacgctcatgggttgattcagatcactgagtttgccccgacttctgtctgctacttgattgcgagaacacggtaacgaatctatctatgagtgtagctacctctgtttcttcctgttcgtcaactttccatgcatttttgcttttttatttttcgagatagggtctcactatgtagctctggctgtcctggaactcactttgtagaccaggctggcctcgaactcagaaatctgcctgcctctgcctcccaagtgctgagattaatggcgtgtgccaccacactcagaaaattttcatgcatttgagtgtgtacacatttctgattgctggatcttcttaactaaacctttcagcattatgatgggtttctttttatttttgataatattcaattctttttgtttgttgcttatatggtatatcctttataaacttctgtgttcaagtttaaagtgccttttgtagacaggcccctaatgtgaagatcagagttagggtccccagaacctatataaatgctgaacgagggatcaaggaaaacttagaatgccatctagggcctgaacataagagcacatgtatccacctacacatgtgaaaacacagaaacacacacaagcacacatgcacacatgaacacatacatgcgcatacacatgacacacacacgtgcacacatgcatatacacatatgcacacattcatgaaagtgcacacatgtgcttgaaaaggaagttaaatagtagggatttatacaatagtctttgttgctaccaccactcaagcaatgtctaatgaataatttttatgaaaatgattttttagaaaataaccagttcgtctcagaagctgatcagctgcaggaaggaggaggtggacgcctgtgctgtggctgtgctgtcctcggagcatctctttggggtctggatctcacagacttgagaaggacctgatggattaacagcctggtctgcaggacccagaaccctggatggggtgggttgtgtttctgttttcctctgtggacaaaagacaaagagcagtaacaggagcctactgtgtgcgcgtctagcagtgaccgtcagaggcagagtggcgtgaccatccaagagtgacagaaatagtctagagaggtgatccccagacacacagttaccatacactcactgaataacagtggagaaaatggcttcatacctcggaccccgctttgtcacctgtagtggggattaaatggtttctcccctcatctctgtgtgtatacaaactcgcacttgcaggttggcaaggagactggtggcactgtgcacaacggtgagttcagatcatgcggactgtggggcatacgcgtgtgctaagaatgatcagagtactcagccgggtgcgaaatctcagcacttcggaggagcgggagagaaagtcacagcctagacgacgcggtgaaaccccgtctgaagtaaacaaccgaacaaccaagagtaataaacctccttttgtcaaatcaaactcagaccactgttggtttggacttccctctttacaagaggaaacccgaggagggacggaagaatgggagggctgtttcacttcaagccaaatcctgtcagcacgctctgctgagggtgacatcgagagaggccgtagcccgtcctggtgacatcgagagaggccgtagcccgtccatgatgggacatgcgcggatgctgctgtgggttcatgaaatgtcatcagatcctaggaccttgtccacagtaaatcacaccagctctcttcctaaggacaattcactcagggtttctcaatcgctctcaggtactcatcaggaacccctgactagaggcataaccatcactacctccaggcagcgagggaggggtggaggacagcttcagtcagaggaggatgaaaggaggtggcttcatctctctctgcagagtcaggctcaccaccacctccccctctggaacctggagctggcttgtctctgccccaacttcctgggcttcaccagccagacaagggtagagacagtgtaacggtttcaaccaggtgcttccagtccgtcttcagcacagatgccaacggcctcatctctactttggggactccaggagagatatgtaggggtgtgggcagatatgtaggggtgtgggctgaggctccctgcctttgtcctgttctgtatatttctgccttgactcttttgtgaagcgtgtgttaaatgttatatttcaactggtctggaaatgtgctgtttacagaattaaaaattgcatacttacattaaccttcatcttttctcccctctcttctctgctccctcaccccagggacttcattcctctgttacctaagctcagaataaagaaataccccgagccttcctctgttacagtttctcatgggatgctccctggttttgctggcctctgtagctacataaagacctctctcaattattctgttgtctcttaaggttcccaacatgtggatattggaccccacccgaacatcagaaacagagcctgctcctgatggggggatagctacctcctcagagctggtttactctcttagaaccctctttcctctctctgtctgtgtaacagttctaattgtcagcttgatgctatctagaatcaggcaggaagattctgagtgagggactgtctagatcgggttggcctgagctcaggtctgtgggggattgtcttgattatgttaattgatgtggcccttgcttcccacagacccagattctctacttgtgccttcatagaacacttagcatcatcccaaaacaaagtcccgcttcatggagcttggatttcaatgaacaatagggagatgattaaacaatacgatattactagtaagcgaattattagtataccgagagtttataataagccttaagaaaaagtgaaaagatagagaataaaattggcccagggcaggtcacagccctctaaagatgaaaatgaacaccaacaccggaacccacacttctgtccccatggagcccctggtgtgagagattatgtgtgatttgagtcacagtaacttggcaacaaatcctcaggggtatgctgtctaaaacaaaatttattcagtgtttgtactgtttctattgatagttctttaaagttattttcctaagctatcagatgaagcaaatgaatactctttattctgaaagaacctgactttgggcgtcaaaactgcggagggtcaattgtggacgtcaaagtttgcataggaacagtgtgttgttagaaccagatctttgatggccagggttaatgtcaacttaagataggctagagtcatctgagaggagtcaacttaagacaaaccagagtcacctgggaggagggaacttcagttgagaaaatgcctccccaagactgggttgtaggcaagcctgcaggacattttcttaagtagtgaatgatggggaagggcccaactcactatggacaatgcagtccctggactggtctttctgggatccataagacagacaggctgagcaaggccaatggcctctgtgtcagcaactgtctatgggttccttccctgctggagttcccactctgacttccctctctgatggattggaagtgtaagcaaaataaaccttttctttcccaagttacttttggtcatggtgtttttttttttttttcttccccagtaatagaaaccctaagacaaaattaaacaatggataatgtggagtcacgcctgcataaaatgcacaagtcttttgtgccacctaaagttggaagtcacaccatttgaaacccatagtttggtgttaaaaaaaaaaagttcttttgctttttcctgtggaagtggcagggtagaatcgaacccctccacaatgcacaccgatgacgtcatttcggttctcaacattgtttatcctccaagaagtcaaggttttcgtagaacaatagctaattctgtgtctggtctggaagggaaaggcttgtgggaattctagaacatttacgccttgctccatcagaaaaccaagttttgaacaattgggtcagtcaaaactttacataaccagtctcttaaggagtctctcctggccacaggtggggcagagttgagcacgccgaggagaaaggctatccatcaataaaaatctacctgaaatcgtcagcccatagggataaccaagaagacgatgggacaaactaattctcaagatgaattaagtccagtgaggtggctcagatggctaaaggcgttggcagagcaggcctggagacctgggctcaacccatgcctggaaaccacagaaggggcaggagggagcaaatgccacaaaggggttccctggcgtccgcacagtggcacaacacacacacacacacacacacacacacacacacacacacacatgcacacaccctccacacacatacaaaagtaaaaatttgaaagagagcaacagtatgtatttctgctgctaacttgtcaggtcttggaaagtatctatgtcaaacaaaacaaaaaccaaacaccctgacagatttggctcagctcaaggaagactataggaggattattggtggttagataaaagtcagctttcctcaggaacttgtgaaatgggattccctctgccaaaaggagtcgtgtcccttgcctctggcagaggggacatgtggctgtccattgatacatacccacggctgcagatcaaagtctatgctggcctccaggtttcctcagaccctacttacaccccaaagcccaggttagcaccctggcccttgccactcctcccccactttgctaactcccaggctgcctccgttcacaggcttccttcctcccagaaaccagccagctctctataagactttttcccctttccctcgtatgctattctatactatactccttgctactctggctagtctcaagactattctatgacacacacacacacacacacacacacacacacacacacacacctttctctctgctcccaatagtgctggccatgtccaatctgcttatttttccctctgctctggactcttccaggtgcctctggatgttctctctgtctctgtctctctctctgtctctgtctctgtccccccccccccccgccctcttgcccccctgccccattcacaataaaatcttcccccaatcgtggagcggccagtttggcggcttccttactgtgtcatcgctcacagtactcatttgtgttgggcttattgacacgctcgttttatcattggaaaatgccagcaattgccaagaggtcagtcacaggccgatttctcctccaccagtccctgtctccagacaccacttgcatccacctgcaggcctgtaattgcctctctgggctctccatcgattgcttcccacacgttactgtcccctgtcacgccgtttcccgcactttactgtctagtcaaggtttcttgcgaaactttccgttttactgaggagttgcaatgccgatgatatctctcctctgtgatactcctccctttctctttaaaataggcgtcttgttttccgtgggcctatttccttctttggcctgtgtgacttttctggggatgcggatctttttcctttgaatccggcctgacctgatccggtggcccaattctaccgcccacccggcgggaagcgacttcattgcgtctacgggtgtctggtgccaccttgtggcgaattctgaaaaaaaatccatttgttcccactagagaggaagctccgtgggcttcccgatgagagaaagggaaaagcccaggctagttttcctggaaccaaggctcagttggagaaagtccccaggcttagaccggaacatagagtttctccattgtcacttgcaagtttagctgccaccatgtcctctctctctgcattccctgacaccagagcatgtgcccagtggtcccttttctctgcctctgctctactctgcaagccactcacctttatcccagtcgtccaccccccccccccgatcattcaatctaaagcattgtgcatagttggtgaagtcagagcaacatccctgttgacccaaactgtaggtttggttttggttttccggctcctgggaccctggtgattccttgccagagtgggaggctcacaaagaagatgcaatgttcactccttgcatcccttagcgagcagtcggcagccctgggagaggccggaaactgatccacacataagagaacctgaacagaagccctccagggacccgaaatagcacgaggtagctcttacctttactctgctacctgaactgctcacctaccacacactacagacctcgagattgcctagggaccttcagcaagtttttcatacttgttcatcctaaggttgtgcctgcagccgcagctgcacaaggcccctccccccagatcaatttgtccaaagttcaaggatacttttaagtttactttgagatcataaataaagctcctagagaatgctgagtcgggactctggggctccgtaattgatttcaggggacaatttgggattctctaggaacagcgcgcagccagaatgccactgtgattataaatcatcttgccaggcagtggtggcgcacgcctttaatcccaacacctggggggggggggcaaagacaggtggatttctgagtttgaggccagcctggtctacagagtgagttccaggacagccaaggctatacagagaaaccctgtctcaaaatcaaaacaaaacaaaacaaaacaaaacaaacaaacaaacactgtcatctcaggccaggtgtcctggcccacgtctttaatcctgtctggaaaaccaaaccaaaccaaaccaaaccaaccaaacaaacaaaaagaaataactgtcatctctcacaagaacacacaagatcagaaactttcacttttcaagggttgatctcaacttgctgtgactccccctctttttgttctcttgtattcattcccatttgggaaaacaacaacaaccaccaaacacccccgcacccattaaaacccctgcagattctaccctgtgctaaaggctcaaagtaaatgtctgcccagtgaacaaaaatgccaggcgctcatggaggttcacacgaaggagtgaaatccttaggaaacaggagtcagtgtcacgagggtcctgcagccagagctgagatgacgtgtcagtgagtgctcggtacacttgaaagtcaggagtctaagagggtacacaaatagacactgtctgtaccgagctgctgaagagaaggagggaagagctaccgatcatgttggcatcacgaggccaacaccccctgactctagacaaaacagaagaggaagcactcaaggagaacacaagtggactgactttgcaacagaaatatgtggctgggctgtagcccaatggttgtgtgtgggtgtacgtgaggcccttggtttgatccttggaacactgagatctctttgatcagggctgtaaaactgatgcgtggaacctgagtttgatgggccctggcttctggctcctggctccaggccaggcttctctatttgtttctgcacacagctcttaagttcacagctaagccgctgttgaaaaataaaattgtttggaatctgtgtctcattttcccaacattgattcaaagcaaagatactttctgagtaacagcacaaatctcataataaacccaaaggtgacaagtgagtgtcataagttccaagaatatttaagtgttcagctttagtcatggtgtgtgcttgtacacacacacacacacacacacacacacacactgtgaagagctctgaaaactttcaaacttggatttttttgttgttgttgttgaggagatggctcagtgggtggagcagttgttacacaagtgtgtggagtggaccggggatctccagaactcctgtacacgctgcgtgatggtggtgacaagcctgcagttccatctcccagaaggcagggacagcagatggtcaagctagatggtcagctagactagctgcataggtgagctttgggttcaactaggagattctacctcagtaaataaagtggggagtgcaggcttagagtcttcaaaatctactttaataagggttcttaaatgcttcaaccacccttctagtccaccaaccaaaggcaggggagaaaagatggtaaataggacgaggggatgtgggcctgtttagaagtagttctttgggccagttctcatcttcatttgccaggagaccaggagtccacttcagtagtgtcaggataccgaacaggaatcaacagtggttgtgcgatccagcagaaacagccaggtctctgcagaactgcatgagtcagcggaagctactagaaccagctgggaccccaggagaagttctctgctgtgcctctctcaatgaagtgaagatgagcaaagacgccagaccaacaaatctagctgtgctagcattctatcactatccattgagtcctacttgtactctctccaaatattacctgtccttcccatgggtcttacctcagcaaaacaccacgtgagtctgcatcgcatgacacagccagggacttccacctcgggggagtgatcaaggaagacacatatcatcacccttgtgcctctttaggtatatgtgcacacacacctgcacgagcacacaacccacctgcaaatctgcaaatgcacacacacacacacacacacacacacacacacacacacacacctgaataaataaaataaccagatttctttaaacacaaccgcaatcctaaatgtgcacaagacattggtaactatttatggaaatggtggaaaatcttctgaatgacccgtaggaaggtgaactttgatgatctctgctagaagaggactccctgtctttctgtgacctcttatgataacgactacagagtcagcacaagaagtgaccgaaaggcactcggggcagttaggccgatgacatacacattttaccaagtagcacatggtgttaggatttactttacattttcaaacttaatattcacttttggtcctaattgtgcaatcaagagtttgaatttttttttctaagccagtgccaatttgcttaagcctccggtctgagcaggccctgggtggcctagcacagcactgtttccttctctgtctgtgtggcctctgattgccttgacccatttcctccctgggtgcgttggttctttcttctttctccacagctccagaggccctccactgacccagcctagctcagctcctgagctttgtagccatcttagctctgggaaccaacatctagatcttgggtccccgatttagattctgccagaagagaatctgcttgagccaacacttgggtacccatccggggttaggtaatttggctcagaagacagagccccgccctgcaaccagtgcaatgggacctggtccacagggcgagtggaatcaccaaggttcctttctccgggaacactgcgatcctttgcgtccagggaaaggctgttttaaggggaatgctctacactcacctcactgcagaccctgagtgctgctgttgctctctcttggggcttccctgaggcaggcaggaggctggggatgagggactggacaaccgggtcaggtaaagccccagattacagcagcagggctttcccagaatgcagctggaaaatgcagcaataggaccgtggaatagaggtgtggcctgagggagtgagaatcctgatggcttccaccatgcaggccagagggttcttctcttaactggtctttgatgctcggtggtcaccattcttgatacatggctgaagaagagaaccgacttccacaacttgtcttctgatctctacaagtgtgctgtggtgcgcgcgcgcgcacgcacacactcatataacatgggtaattttggtgattttgcatacatctaaatgtcaaaactttcatttaaaactgatgctgtacaatataacgacggacagtaatatctgtactgataattttcattggttcccttccccccattcagaacatctttacttaaagaggagaaacccagaaagaggccacaagagaaatgaaagagcttgtctatctgcctatagtgacatccccccccccccaatcctctaaaagctccacatactgtgtgtgtgcttgatcctgcctgaggttgaagtattagtcaacgaaggagatggcggctgggggcctggaggaaggaatgatgaacttctttggggttgcattggttttgaggtgctgggctcgaaagacaggagaagtaaaggttctggtctgtggcgggaatcattgttagggccgtgctagtggtgggaacagagtctcactgcctagagcttgagaaggctggagtggaggtgagtggagggtggggcttgctcctcccaaagtaggcacaggaaggaaagaagatgagcgagaaagttagctggatggagtagccagtcagccggggaagtgctaaagtggacagtctccagcctcatacggagcgcttgaagatggtgactgtgatgcctactataaaattaaataaataaataaataaataaataataagagaaagaaagaaagagagagagaaagaaagagagagagaatgagagaaagagaatgagagaatgatagaaagaagcaaaagacatggagaagaggtaggaagaacaacgctctgggctatgcacagaaaaggctgcgcctgttttgggacagatgtcgaagacctggctagctagttcctcgttctatgactgaggacacatgcctgcgtcctttcttgtactcagctcctgccctagaggacaaaggagacagggcaagctgccctgaggggtcctcctgctctgattctgcaggtgggggtctctttccttccatgctgcaggcaggccttgctccatcccctactgtcccaggcttatcatctgatccagaacagcatgtgcgtcacccctagggtggagcagctcagcaccctggagagttgttaccgcagagacagtggagctgaggcagtgaggtgttctatttaggcttagtctcctggaatctgagttctggttgagctatttgaaagtgttgtggccttgggaaagtcacttaactcccctgacttcaactgttcatccgcaaaatagagctaacagtatctcccacatcagaatgacagaggcgaatgaggaaacagacgaagtggcctgagggcagccactactcaatgaccccagctggcctaagcgtttgcagataggccagctgttctgacttcaatcagggtgacacgtggctcctctgacaattaatgaagttcctgaggtagtgcccagaccaccttcttgctcctataatttttcgtttcattttattttacatgttcaggtgttttgcctgcatatatgtctgtgtaccacgtgcgtgcatggtgcctgaggaggccagaagagagcctcggattccccggaactgcagttacagatgcttgcgagtcaccatgtgatgttgcagatgctcgtgagtcacaggacccaggttcaccactaattgaacctggatcctccggaggaacagccagggacttaaccactgagccatctttacagccccactcctttcccatagattctgtaggcttcgggcttgggctgaccagctaagcaggctggacggacaatgtgctcacaggagagggagcttgtgagctgtacccttggcacaggggcttccgagcccgttggagggcagacgagacctcagtgctcgcacctgcggtttgtatctagtctctcaggcatcaggcccagagcactgaggtttttcaggctattgaacgagtcttccctgcatcaactgcctggaaagaagcagccgggacaggaaggaatggatttctgctaaagtcacacaaccatgaagtcctcccatcacccagggaaaaccatgccatcccaaaatgggtttgtctactctgtctgagaaaggactgtagtcatcctactgagactaagatgtgagcacacaccaagtctcctcggcagcagactccaaactgagaggagtgacagcctcggcttggctcccctctctcttcctcccctccccacctcttcccacttctcacaggaaaccacattctttgtactaagaatgaataaagagcgggggagacagctctatcagcacgcacgagggtctgcgtttgatccctagaacccatgtgcacacatggaatccccatgttggggaggtggagacaagtagaggcctggcagcctcgtctgcttggtgaattccatgccagccagggactctgtc

SEQ ID NO: 1108 - DNA, 1802 bp, Mus musculus
cttcccgagacggagatggtaatcgtctctctgaaaaacagcactcgaattgaacttctagaagaatggtggtagttgtagccattggaggacacaccaagtcgcagggagagtctcttccgctggcactagctctgtttgcgtttgttggcttcatgctgattctcgtggttgtactactctccgtctggaagatgggccagctgctccggtattcttgctgccccgccgttgtcctcccagacaccttgaaaataaccagttcgtctcagaagctgatcagctgcaggaaggaggaggtggacgcctgtgctgtggctgtgctgtcctcggagcatctctttggggtctggatctcacagacttgagaaggacctgatggattaacagcctggtctgcaggacccagaaccctggatggggtgggttgtgtttctgttttcctctgtggacaaaagacaaagagcagtaacaggagcctactgtgtgcgcgtctagcagtgaccgtcagaggcagagtggcgtgaccatccaagagtgacagaaatagtctagagaggtgatccccagacacacagttaccatacactcactgaataacagtggagaaaatggcttcatacctcggaccccgctttgtcacctgtagtggggattaaatggtttctcccctcatctctgtgtgtatacaaactcgcacttgcaggttggcaaggagactggtggcactgtgcacaacggtgagttcagatcatgcggactgtggggcatacgcgtgtgctaagaatgatcagagtactcagccgggtgcgaaatctcagcacttcggaggagcgggagagaaagtcacagcctagacgacgcggtgaaaccccgtctgaagtaaacaaccgaacaaccaagagtaataaacctccttttgtcaaatcaaactcagaccactgttggtttggacttccctctttacaagaggaaacccgaggagggacggaagaatgggagggctgtttcacttcaagccaaatcctgtcagcacgctctgctgagggtgacatcgagagaggccgtagcccgtcctggtgacatcgagagaggccgtagcccgtccatgatgggacatgcgcggatgctgctgtgggttcatgaaatgtcatcagatcctaggaccttgtccacagtaaatcacaccagctctcttcctaaggacaattcactcagggtttctcaatcgctctcaggtactcatcaggaacccctgactagaggcataaccatcactacctccaggcagcgagggaggggtggaggacagcttcagtcagaggaggatgaaaggaggtggcttcatctctctctgcagagtcaggctcaccaccacctccccctctggaacctggagctggcttgtctctgccccaacttcctgggcttcaccagccagacaagggtagagacagtgtaacggtttcaaccaggtgcttccagtccgtcttcagcacagatgccaacggcctcatctctactttggggactccaggagagatatgtaggggtgtgggcagatatgtaggggtgtgggctgaggctccctgcctttgtcctgttctgtatatttctgccttgactcttttgtgaagcgtgtgttaaatgttatatttcaactggtctggaaatgtgctgtttacagaattaaaaattgcatacttacattaaccttcatcttttctcccctctcttctctgctccctcaccccagggacttcattcctctgttacctaagctcagaataaagaaatacccc

SEQ ID NO: 1109 - protein, 98 aa, Mus musculus
MVVVVAIGGHTKSQGESLPLALFAFVGFMLILVVVLLSVWKMGQLLRYSCCPAVVLPDTLKITSSSQKLISCRKEEVDACAVAVLSSEHLFGVWISQT

SEQ ID NO: 1110 - DNA, 2061 bp, Mus musculus
ttggctgtcctggaactcactctctagaccagactggtcttgaacttccagagatctgcctgcctctgcttcccaggtgctgggattaaagctgtcctcaccccacccaggatggaggtcactgaacatgggctgcatctggttattgagctggaagacctgggaccccagtttgagttccttgtggtctactggaggagggagcctggcgccgcggaacatgttaagatggtgaggagtggggacattccggtgcacctagaaaccatggaaccgggggccatgtactgtgtgaaggcgcaggcactggtgaaagccatcgggaggcacagtgccttcagccagcctacgtgtgtggagatgcaaggagagtctcttccgctggcactagctctgtttgcgtttgttggcttcatgctgattctcgtggttgtactactctccgtctggaagatgggccagctgctccggtattcttgctgccccgccgttgtcctcccagacaccttgaaaataaccagttcgtctcagaagctgatcagctgcaggaaggaggaggtggacgcctgtgctgtggctgtgctgtcctcggagcatctctttggggtctggatctcacagacttgagaaggacctgatggattaacagcctggtctgcaggacccagaaccctggatggggtgggttgtgtttctgttttcctctgtggacaaaagacaaagagcagtaacaggagcctactgtgtgcgcgtctagcagtgaccgtcagaggcagagtggcgtgaccatccaagagtgacagaaatagtctagagaggtgatccccagacacacagttaccatacactcactgaataacagtggagaaaatggcttcatacctcggaccccgctttgtcacctgtagtggggattaaatggtttctcccctcatctctgtgtgtatacaaactcgcacttgcaggttggcaaggagactggtggcactgtgcacaacggtgagttcagatcatgcggactgtggggcatacgcgtgtgctaagaatgatcagagtactcagccgggtgcgaaatctcagcacttcggaggagcgggagagaaagtcacagcctagacgacgcggtgaaaccccgtctgaagtaaacaaccgaacaaccaagagtaataaacctccttttgtcaaatcaaactcagaccactgttggtttggacttccctctttacaagaggaaacccgaggagggacggaagaatgggagggctgtttcacttcaagccaaatcctgtcagcacgctctgctgagggtgacatcgagagaggccgtagcccgtcctggtgacatcgagagaggccgtagcccgtccatgatgggacatgcgcggatgctgctgtgggttcatgaaatgtcatcagatcctaggaccttgtccacagtaaatcacaccagctctcttcctaaggacaattcactcagggtttctcaatcgctctcaggtactcatcaggaacccctgactagaggcataaccatcactacctccaggcagcgagggaggggtggaggacagcttcagtcagaggaggatgaaaggaggtggcttcatctctctctgcagagtcaggctcaccaccacctccccctctggaacctggagctggcttgtctctgccccaacttcctgggcttcaccagccagacaagggtagagacagtgtaacggtttcaaccaggtgcttccagtccgtcttcagcacagatgccaacggcctcatctctactttggggactccaggagagatatgtaggggtgtgggcagatatgtaggggtgtgggctgaggctccctgcctttgtcctgttctgtatatttctgccttgactcttttgtgaagcgtgtgttaaatgttatatttcaactggtctggaaatgtgctgtttacagaattaaaaattgcatacttacattaaccttcatcttttctcccctctcttctctgctccctcaccccagggacttcattcctctgttacctaagctcagaataaagaaatacccc

SEQ ID NO: 1111 - protein, 169 aa, Mus musculus
MEVTEHGLHLVIELEDLGPQFEFLVVYWRREPGAAEHVKMVRSGDIPVHLETMEPGAMYCVKAQALVKAIGRHSAFSQPTCVEMQGESLPLALFAFVGFMLILVVVLLSVWKMGQLLRYSCCPAVVLPDTLKITSSSQKLISCRKEEVDACAVAVLSSEHLFGVWISQT

SEQ ID NO: 1112 - DNA, 168828 bp, Homo sapiens
aggactgcaaatgggacatccaggctaggaaatagaagggtttggaggcacaggtgatatttttttcatgacttcttccagctgaaggtggtgccttttagaaaagaaaggagtaaacaggaatagaacagttagctccccagatggtgtcgaagaacaaaatgagattttatttctgggccattgtttaagatcctggaaccgatgagtttttggcaagaaatcagggagtcacgaggaagaaaaaaaaagattttttttctttttctttttttttttttgagatggagtcttgctctgttgctgatgctggagtgcagtggcacaatcttggctcactgcaacctccgtctcctgggttcaagcagttctcctacctcagcctcctgagtagctgggattacaggcacctgccaccattcccagctaatttttgcatttttagtagagacaggattttaccatgttggccaggcaggtctcgaactcctgacctcaggtgatctgcctacctcggcctcccaaagtgctgggattacaggcatgagccagcgtgcctggtctcttttttgttttttaagcgggaggagaggatcattgggagggaaataggaaattgttgaaaggaaggaaagaaagaaccaagtgaaaaaataaaggtctaaaagaaataataatattgtagaagatacccagtgtttcataaagttgttataggtgaaaggaagccaaatttattgctaacatttattgagagtttactatatgccagcactgtggcaaattgtttatatgcattattttatttaattcttacagtaagttcaactttttttcccacttgacattatatagtggacatcgtttttgttttgttttgttttgagacagagtctcgctctgtcacccaggctggagtgcagtagcacaatcttggctcactgcaacctctgcttcctgaattcaagtgattctcatgcctcagcctcccgagtagctggaattacagacacataccaccaggcccggctaaatttagtatttttagtagaaatggcatttcaccatgttggccaggctggccaactcctctcaaacttctggcctcaagtgatccgcccgcctcagcctcccaaaatgctgggattacaggtgtgagccaccgtgcctacactgtcatttttaatagatagcatagtattccattgtatgaacattcattgtagtaagctacaatgaactctcctgtatgtacattttccccacattttttggtatattctttttcttaagtaacagataaacattttaattctatttttggataatatcacaattcaaaaataaaaatgtaaaaaaataaataacaaaaaggttttcttccattcttgttcctcctgtcacctgaaccaccattagttttcttggcatctttatataatttctttgttatgtaaacaaatataaatacgtattcttattcccccccttttttattcagaatgtaaaaagcatcttgtgatcatctctttagcataaaatcttaaaagtggtattgctgagtagaggatagttaaaatcttaatacatatggtccaactgttcacgagagaggttgtacaatttaacctttctaccaacaatgcatgagtgttactaaattcatgttatttatgttctaatttcagtgtatttttatatctcaaaacttatggggagtccagaataaatgtttaaaaatcactataatttataaggtgaattctggtattatacagaattgattatacaaaatactttggacttaactaataatttataacaggcaaatggacccaatgagaaggaaaggtttgacctaagttattatttatctttctgtgttttgcttgttggataggtggagaaacaggtaggaatgaaaagatggaaaaatccgtttgtggtataaagatagaagatagagctgaattaaacaagtaagcaaagagaaatggagacagacttcagatgagagtgaaaaaagggtaaacaattccagtaggtaccatacatctgataaggcatattgccagatcatctctaatttcttttttttctggactactgttacagcctctactttctatcattgaattgatgcatatgattataatagaaattaaattttcaatgaaatgaatgtctttttgtcaatttttttctttaaatagaattgattatctgaagaaatggatacttctccctccagaaaatatccagttaaaaaacgggtgaaaatacatcccaacacagtgatggtgaaatatacttctcattatccccagcctggcgatgatggatatgaagaaatcaatgaaggctatggaaattttatggaggaaaatccaaagaaaggtctgctgagtgaaatgaaaaaaaaagggagagctttctttggaaccatggataccctacctccaccaacagaagacccaatgatcaatgagattggacaattccagagctttgcagaaaaaaacatttttcaatcccgaaaaatgtggatagtgctgtttggatctgctttggctcatggatgtgtagctcttatcactaggcttgtttctgatcggtctaaagttccatctctagaactgatttttatccgttctgtttttcaggtcttatctgtgttagttgtgtgttactatcaggaggccccctttggacccagtggatacagattacgactcttcttttatggtgtatgcaatgtcatttctatcacttgtgcttatacatcattttcaatagttcctcccagcaatgggaccactatgtggagagccacaactacagtcttcagtgccattttggcttttttactcgtagatgagaaaatggcttatgttgacatggctacagttgtttgcagcatcttaggtgtttgtcttgtcatgatcccaaacattgttgatgaagacaattctttgttaaatgcctggaaagaagcctttgggtacaccatgactgtgatggctggactgaccactgctctctcaatgatagtatacagatccatcaaggagaagatcagcatgtggactgcactgtttacttttggttggactgggacaatttggggaatatctactatgtttattcttcaagaacccatcatcccattagatggagaaacctggagttatctcattgctatatgtgtctgttctactgcagcattcttaggagtttattatgccttggacaaattccatccagctttggttagcacagtacaacatttggagattgtggtagctatggtcttgcagcttctcgtgctgcacatatttcctagcatctatgatgtttttggaggggtaatcattatgattagtgtttttgtccttgctggctataaactttactggaggaatttaagaaagcaggactaccaggaaatactagactctcccattaaatgaatacctgattattattgtctcattaatgttcagttattatgtatactgccattttaatgtttacctatgaatgtcttttgtgttatataactgacagagtgctataaaatatataatatatacaaatgcagaaaatttattctagtctaatatattcaaatacaaatattaaatatatgaaatacgttatgaatctggtatctttattggtatttatgggtgtctttccaggtaaattgtagtagaaggagaatgttaactgctattactaaataatagaagactcaaagaaatgacccctttcagatggaactgaagttcaaaaattagaaatgttctacaaatgttcaacaaaactccttcatttgtgaaaaatacactataaggtgaaatgttgaacaccaaaccctgttttgtcatctacttgcattagaaaactagaagtcatagggctgggtaaaggagcctgggttgaggcaagaaaagaggaaagaagggaaaataagtggttttttaatgacaatgggtggctgtccaaagttagaacaggaaattggttttctccttattatgagcacattaggcgatacataggaaatagaaatagggagaagtgtggattcttgccagtcctacctagcccatgccattttgtccctgatgtttggagacctaacgttggggtagggtctgcttatcctcagttatgtagatctcttccaaggctgcccttgtttatgattttgtggctagtgtatgtgtgagctgcagtaaaagtactccttactcctgaaaaaggcaccaacagtaatcataatgtagcagaaaattgacatggtatcctgagattcttttcaaaaaggtctaaaagtctgtaaaagcacatatgatggcattaagtctaattttggccattcttaccaatttagcacaaataaatgatatggtactgtttattaaactattgtctcaggtccacattcccccttctatacatttctctgtaatgctgtggctcaaaccctgcaaactacatttttttctatgtcagctggtgtctcactaggttccatcaataaagggcattagagggagactggaaggcagaagggaagaagggacttcctcctttccatttgtttgcagtttctgtcactgttatcccagcaacaagcaagagccctttgctccagcagcagcaattgatttcagccttgagcttcttttgacatcctccccatccacaactagcctcatcatatccttccctgaagtagtaggatcagccagacagcatcctctcaggggtctgagcaatactcagccaggccatttgtctgagtttctgagacctgataatccaccttgagtccccattttcactagatctatcattgacagctgctccctgcagttatcacctctgggtaacctcagtgttccgtttttgctttttcagtcaatgaaaactcaatactaaatcctctctgtagtaatatcatctaatttctgatttcctgactaacatatctctaaaccttccccaaaggaaactacagccatcagcagggtactgtgctttgggaaaatgtcaacatttagattttttcagggattactagacagtggctctcaatagaaattatacaaactgaaaaaagaatgaacagagcctgaatgacctgtactaagtactgagaggtctagcatgagtgtaattgtagtcccagaagaagaggagaaacagaatgggacagaaaaaaaaatttgaagaaatactggacaaaagtcttccaaatttgataaaaaaaaaaaaagaaaagaaaagaaaatgagaaaccagcaatccacagacccagggaatgaaatgaaccccaagcaggataaatacaaaaccaaaaccaaaacaaacatcacagtgtaatgaaacatcacagtgtaatgaaacatcacagtgtaacttttgataaatataatgaaaatcttataagcattcatagaaaaagacacctagaaacatcagtgttaacttttgataaatataaacaaaatcttaaaagcattcatagaaaaaggcataagacatacaagaaaacaatgataagaattacaactagtttctcacagatataatggaggctggaaaacgagaatgacatctttaaagtgctgaaaacaaaaacaaaaaccctttgaatggcttctcattgcctataggataaactctaaggtgcctgacttccataacctggttattgattatatttctagctatcttctgctctagcaatattctactatcgtttaatacctttttattatgcaggctcctctatgtggacagattttttctagttaattgcctgactaacctggccacacaactcctttcccctgtggcttaatgtcctccttgcactggactgtctataacaatttctaactataagctatcaggtttctgggaaaggtcttgacatggaggctcatttttccctttcttgtgttcccaaattcttttattttggattaataaagtaagccacctgcgtgtttttaatcatagacagattagctgcccatatccaaagctccacgtgtagtccctagataagttttgtttttgttttgagatgtggtgtgatcatagctcattgcagcctcaaattcctgggctcaagccatcctcccacctcagcctccagagtggctgggactacaggcacatgccactatgcccagctgattaaaaaaaattttgttttgtagagacagggtctagctctgttgccagggctgatcataagttttgacttacattttcttgttgcctgattctggttagtccctgatccactcagcactaattagcaaggatgattcctgtttttggtttgagttcccctgaaagagaggaagcagcagccatgtgcatgtttatatttggaagctggggagacagactgtgtgaaaggaagtctctgggacagctcccaccccattaaaacatgtactgcatcccttctaagtgcaattacatacatgcctttctgcctatctgcccttccagtctatgctttcctttttcattgctgtttgcttatttttcttctttgactcctcttttgcatatatttttggaggtttcttaaatttttttaaagagttcctgttaagaatgagtgatgagaaagattaaagaaggaaaattaagaggataaactagctgggtgctgtggctcacgcctgtaatcccaacactttgggaggctgaggtgggtggatcacctgaggtcaggggtttgagacaagcctggccaacattgtgaaaccccgtctctactaaaaatacaaaaaattagccaggtgtggtggtgtgtgcctgtagtcccagcaacttgggaggctgaggcaggagaattgcttgaacccgggaggtggaggttgcaataagctgaggtggtgccactgcactccaacctgggcaaaaaagcgagactccatctcaaaaaacaaacaaacaaacaaaaaccctaaatgtatgacttcagcatactttttgctgggttaattttccccacttaaggtggtggtaagctacatgaaggcaagaactgtatttctgtattttacctgttgtatttatattcacaccttctgcctccatcgtatgttaaatatgtaattagaattaaaattgagtcacgctgtgctaacagtttgatgggtgattttgcagcaacagttttaactctggacaagtttcttcaaaaatgaatataatatctcagtctgtaaactttataaaatgtatcaacaaataaaaccattgtattagcttgggctgccataataaaatactagattgggtggcttacacaacagaagtttattttttcaaagttatgtaggttgggaggtccaaaagagggtgccagcatggtcagttttgggtgagggctctctctctggcttgcagatgtctgtctgcttgctgtgttctcaaatggagagagctctctggtgccactttctataaagacattaatcttatgggattagggccccacccttatgacctaatttaatttttattacctccctaaaggcctagctccaactagagatggtccctgacttaagatttttttgactttatgatggtccaaaagccatatgcactctagaatctgtactttgagtacccataaaaccatccagtttttcattcagtatttagtagattacatgaaatactcaatactttattaaaaaataagctttgtattagatgattttgcctaactgaaagctaatgtaagtattctgagcatgttttaggtaggctactctaagctatgatgtttggtaggttagaagcattaaatgcatttctgacttaagatcttttcaacttaaggtattttcagtttatggtgggtttattggaacataacccctttgtaagttaaggaacatttatatagtcacattaggagtgagggcttcagtatgaatttttgggggggatgcaattcagtccataccagtcatgataaaatatgcagttatttaaacccttagaataaactcaaaattcaccgccattattcactttggatgctaataacagaatgtagacatagagtagctgttgcccagtttcatggtctacttgtcccagtcaacctgaggatagtacagcataaataggtaaatttgtgcttgaccttgtgatcctacatatggcaggctgtcttagtccctttagtgttgctagaaaggaatacccaaagctggataatttagaaatagaaaaggtttttcggcttatggttctgatgtctggaaaagttcaagactgagcatctgcatctgatggtagcctaagactgcttctactcatgccagaaggcaaaggagagctggtgtgtgcagagattacatggccagagaggacgcaaaagaagaaaggaagtgcgacgttctttttaaccagctctggtggaaataaagagaactcatttaccctctccccagggaggacattaatctattcctgaaggaaccacctccatgacccaacactgcccattagtccccacctccaacattggggatcaaatttcaacaggaggtttaggggaacaaacatctaaattacagcacaggccaaccacatgcatgcattaccaatcacgtaaataattttgaagttaaatgcagaaaactgcaaacttttgaggctgatatccagggccaggattaaaataaaaagtattaatgccttaaacagtatttactgaccatctaccctactgcaaggccctagggagaaactgaacagacatggttactgattcaacggagtttacaatctaggtagacatacaggcaaaccatttcaatagctcggatggagaaaacacctgtgctccaaggaaggtacctaactgagcaagcttccctgaggagcgatcctaaactgtgccacaaagatggttaagaagagatgaggcggctgggcgtggtggctcacgcctgtaatcccagcactttgggaggccgaggctggcgaatcacgaggtcaagagatcgagaccatcctggtgaaaccccgtcactgctaaaaatacaaaaacattagctgggcgtggtggtacatgcctgtaatcccagctactcgggaggctgaggcaggagaatagcttgaacccggaggcggaggttgcagtgagccgagatcgtgccactgcactccaccctggcgacagagcgaaactcgtttcaaaaaaaaaaaaaaaagaggcaggttacggcgcgggggcggggaagggggcctgcagcaccggcgaggggaagaaccaacttactgatgcctcagccagtggctggagccctaagaatggacagacctggctccgaaggtcctcttcataacactactgccgccaagaatgtaagctgcccaagcacgaggacacttttagagggccctcagactcagcttcttttggtctgtgcctcaaattaagcacatgtcttacatttctcccaggtcccaattttcaggtctgcttttctttgtttttctttgtcgctccccgctcctaagaaccttcggctgggatgacattcttcaggtgcagaaaccagggggaagctcccagagcagtgggggctgaactcaggacacagtcatttttgctgttaagtctctcctgcggcgctgaggaggcaggctcaaagtaaccaaccagagcagccgcagagggaaaagctaagacagttctggtccggcccagcgcttctcaccctctagctctctactctccgccgcgcagcctccgctccctccacatcaggcacggcgcttgattgacatgagggcccgcccaatcccagtgcggcagagaccgttgtcgcgtcagggaccggggaagggggcgactgaacctatcagattgggtccagagtgggtttcctgcccgcgcggatccgcctgcccaccgcgcgtgccccgcctctctcccaagagctacgcggcggcggcggagcgcaggcctcgtgccgttacggccatcacggcggccgcagtggcgtcctggagccctcctcaggtgagctggagctgcccggctcggcagcgggaaggtgagacggccttgttggcaggcagacacacacacaccccccttcagtccgctgtccgtccatacagcctgttactcgctgcgtcgcttcctcttctcgcgctgagttagccccgggggcgccgtctgcaggctcggagccgagccggagggggcgcggaggctgctcggagggtccagacttctgcaccgggattccgcgagaccctcgggccgttgccccagggagcgtgaccccgcggcctccttgtcagcccctggagcgctgtgtcgggctgagagcccgggcggccgcccgtgcgagcctgggaggtcgagtgtgcggcgcgctggttgacttgtctgttttctcatgaaaaagtccttttgccagctgtggcgtaatccgaggccgggaaggtagggacgtggtaggaggaagggcgctctcacctccagcccgagaggaggggaggcgtcagcctgcgcggtgctgcgggtggacatcttcgggacgcgccctctcccctccccccacccaccggccgttttctagtctggggctgtgactttaatggtctggacctgcttcagattcgtacgcgagttgctggggctgtgaacttttgacttgagttgtaatatgtttggtaaaacaaaaaaccatttcgataggttttgtaacctttcttctgtattaacatacaagttaaattcgccgttagaagctcaggaagctgggttttgttcaggggtgaggacgtaaccgtaggaacgctctcggtgtcaaactgatggacccggagtcacctgaaaataattatgcacgttagattaggtaagaagccctagaaattaggaaagaattaggttaaagagaatttcctaactcctctttgggtagggagcaaagcagctcaatgtcctcccaaaacgggtgttgccaaaaggtactcatttttaaaattttactttgatagacgtatgacaaaccaactataacgatttcttcagcacctggaaaccagtgtgcctagactctcagccttcggcgaggtcacacagtaaacggagaaataacctaagaagaaagttttgtttggtaattgtcaataatattcgttcttttctttttaaaacacttaattttcttgtggggggtggagtctgtgatattcttaaataggcatcccattcacaacttgatagtaatatgcactggttgataaatggtgctttcttttcatcttgaccacaaactctgagacttctttgggaaaattgtgatctgtggaaattggctgtaatatccataaacatagtttgcagagtgttcacatctactcagctgttggctcatgtattaaattttaaaatgtgtacttatttttctaggcattatcttttgtccaggttttgacagtgctttcaggtccatctaaataaaatttgaaacctacgtgtaatgttttgttcgatactgagggagtccaggcggggtagctcaaacctgtaatcccagcactttgggaggctgaggcgggcggatcacgaggtcaggagattgaaaccaccctagcagacacggtgaaaccccgtctctactaaaaatacaaaaaagtagccgggcgtggtggcgggcgcctatagtcccagctactcgggaggctgaggcaggagaatggcgtgaacccgggaggcggagcttgcagtgagccgagatcgcgccactgcactccagcctgggcgacagagcgagactccgtctcaaaaaaataaataaaatgtgtatttatttttctaggcattatcctttgtccaggtttctgcagtgctttcaggtccatctaaataaaatttgaaacctacgtgtaatgttggccgggctcggtggctcacgcctgtaatcccagcactttgggaggccgaggcaggcggatcacgaggtcaggagatcgagaccagcctggccaacacggtgaaaccgcgtctctactgaaaatacaaaaattatccgggcgtggtggcacgcacctgtaatcccagctactcgggagtctgaggcaggagaattgcatgaacccgggagtcggaggttgcagtgagccaagatcgccactgcactccagcctggcaacagagcaagattccgtcacacacacacaaaaaaaaaacagaaacaaaaaaaacctatgtgtaatgttttgttagatactgagggagaccaggcggggtagttcaagcctgtaatcccagcacttgggaggccaaggcgggaggatagctggaggccaggagtttgagatcagcctaagcaatgtagtgataccctgtctctaaattaagaaaatataaaaaaatttaaaaaggaaaataataaagaaaagagatacttagtgatacttcatggttctgggtttttttcttttcttttttttttttttttttgagacagagtctctgttgcccaggctggagtgcagtggcacgatcttggctcactgcaacctctgcctcccgggttcaatcgattcttgtgcctcggcctcctaagtagctgggactacaggtgtgtgccaccatgcctagctaatttttttgtatatatatatatttttctttttcttttgtttgtttttttttttgagacggagtctcactctgttgcccaggctggagtgcagtggcgggatcttggctcactgcaacctctgcctgccgggttcaagcaattctctgcctcagcctccccagtagctgggattacaggcgcctgccaccacgcctgactaatttttgtatttttagtagaggcagggtttcaccatcttggccaggctggtcttgaactcctgacctcgtgatccacctgcctcggcctcccaaagtgctgggattacaggcatgagccaccacgcccggcctgtatttttagtagagacggagtttcaccatgttggcaaggctggtctcgaactcctgacctcaagcaatctgcccacctccgcctcccaaagtgctgagattacaggtgtgcgccactgtgcctggcctatattcatttttcaaaaattttctagagttttacattttcattgctttgtacttttactttgtcttattttactttttcaccatgtgtttttcaaagctgaaggtatatttgatgtgattattataaatcacttgtcaggaagacttgacttaatgaatacagatacagttcatttttaaaatcatggtttaataatttttagaatttacctttataatatagaaaaataccaaatgttctttatctgcactagaaaattaaatgattatttcattaataagtaaaattgaagggaacttttgaaatcactgagcagttaacaaattctctataaatactgtgatgttaggaagacaacaaggctaaatatgacatttaaagatttaaggaaactttatgtctggctgatcctcaccttaaactctaatgaagatagaatttatagtcttcccttcaaaactgattccatatgctgactttgttttggtgacattaccatgctttcaattacccagacacaaactttggttttatctctatgcgcgtaacaatattggctgatttttgccagccatttttatctttgaactactcactagcctttaattgggttttttgcttgatttttctctctacttagtatgtcttcctaaatcttagaattatgcttcaaacacatccttcacttttcggaaaccagtgataactctctgttatcttcagagtatagttcagaattcatagcctaataacagtctgctcaaacctgtttttctggggccagcactatttctttctttttttttaatcagtgccagcactatttctttataggagctgtccactctaaccaaaccaatctctgattcttatttactctttgtatttttgtaccttcgtatcattcctttttctttctttctttctttttttttttttgagacagagtctcgctctgttgcccaggctggagtgcaatggtgcgatctcggctccccgtaacctctgcctcccgggttcaagcgattctcctacctcagcctccctagtagctgggactacaggcatgcgccaccatgcctggctaattttgtatttttagtagagacggggtttctccgtgttggtcaggccagtcttaaactcctcacttcaggtgatctacacatctcagcctgccaaagtgctgggattacaggtgtgagccactgtgcctggcctctttctttcttctttttttttttctttgaggcgtctcactctgtcacccaggctggagtgcagtggcaccatcttggctcactgcaacctccgtctccttggttcaagtgattctcctgtgtcagtcttccgagtagctaggattacaggtgcatgccaccacgcctggctaattttgtatttttagtagagatggggtttcaccatgttggccaggctggtcttgaactcccgacctcaggtgatccacatgcgtcggcttcccaaagtgttgggattacaggcgtgagccactgtgcccgtccagtttgcctagtctttaaaattttttttttctcctaaattaccaagtagcaaatgaagtaaaatttgttgaattttcgcttttggtcctttggtgcagtcttccaaatgtttttcctgttccctatgttgcttgcttttctttctttctttctttctttctttctttctttctttctttctttctttctttctttctttctttctttgtttctttctttccttccttccttccttccttccttccttccttcttctttctttttctttcttttcccttccttccttccttccttccgtccatccatccgtctgtccgtccgtctgtctctctctctctttctttctttcttctttcttttttgacaggatctcgctctgttgctcaggctggagtacagtggcctgatcacagctcctcattgtaacttgaacctcccaaaggccaggattacaggtgtgcatcaatgtctggctaatttttttttttttttttttttgtagagatagggtctcactgtgttgttcagactggttttgaattcctggcctcaaacgatcctcccaccttggcttctcaacgtgctgggattataggggtgagccactgtgcctggtctgttgctttcctttaaacccataccccttattattttagtattcccttggtttttaatgttgtgtggacttgaatcatagaattatagagcattattgctggaatgttggaatccaaccttgtgttttacagataaggaaactgaaatacaaatagactagatgcaccaaaattcaaacatttagtgatgggggcagaacaaagactcaacccttgatcttctgacgcaagttctgtgtgtttatgaaaccatactacttctcatctcttgtaattttgccttatttgcctcacattattttgcattttgtgtatttatgccttctcatagattgaaaacttcagggcaggggaaccttcatatttacattgtaaatttttttttttttgagacagagtttcgcagtttttgccctggctggagtgcagcagcatgatctcggctcactgcaacctccgcctctcgggttcaagcaattctcttgcctcagcctcctgaggagctgggatcacaggcacctgccaccacacctggctaattttgtatttttagtagagatgggtttcaccatgttggccaggctggtctcaaactcctgacctcaggtgatccgctcaccttggcttcccaaagttctggaattacaggcatgagccaccatgcccagccttacattgtaaattatttaaacaatgatataaagtctatatacagtttctttcccctatgcttgttaggtgtattaacaccattaacaaaaataatattgtcatgtttaccattgagttttttttttcttgagacggagtcctgctctgtcactcaggatggagtgcagtggggcaatctcggatcactgtaccctctgcatcccaggttcaagggattctcctgcctcagcctcctaagtagctggaattacaggtgcctgccaccatgcctggctaatttttgtatttttagcagagacagggtttcaccatgttggccaggctgatctccaactcctaacttcagttaatcagcctgctttggcctcccaaagtgctgggattacagggatgagccaccgcacctggccagtgtttaccattgaattctatcatctgctaaaaaatgaatctcttacaggttttactgctgcaatttagtttgtcttttcgaatctcttgataatgccaattaatctttggaggccttgaatgtggatacagaacaatgtaatgatttagaggaaacctggagggcttatcatataactaaatgcagtgatctagctgtaatgttctttttctcttttgagtgttagaactgtaacaccttcacattttgctactttttgtcctcttgttcatctgtcaggaaccatcacttcttgttgagcaagacaagacaaaatatcttgttgaggccgggcgcggtggctcacgtctgtaatcccagcactttgggaggctgaggcatgcggagcccctgagtccaggagtttgagaccagcctggccggcatggtgaaaccccatctctactaaagatataaaaaaatgagcccactgtggtggtgcatgcctgtagtcccagctacccgggaggcagaggcaggagaatggcttgaaccccagaggcagaggttacagtgagccaagatcatgccattccactccggcctgggtaacagagcaagactctgtctcaaaaaaaaaaaaattttatttgttccgctaggcctgatggctcactcctgtaatcccagcgctttgggaggctgaggtgggcggataacttgatcccaggagttcgagaccagcttggccaacatggtgaaaccctgtctctactaaatacaaaaattagctgagtgtgatggcgaatgcctgtaatctcagctactcaagaggttgagacaggagaatcacttaaacccgggaggcaggggttgcggggttgtgagatcccgccactgcactttagcctgggtgacagagcgagattgtctcaaaagaaaaaaaagaaagaaagaaaaatcatttgttccatttggtgagttagagtgcttttatatgtttgttcttcatgtttatttttcctcttaactctaaagtttctgtaacagaaaccatgtatggttgctttcgtatttttcttatgtgtacgtaacaatagttgaatgctgtaagacagcatagaagactatcaggtaaaatctctctgtggagggaaaggaatgcttattctcttggtctgtttttcatttattttttggttgttaatagttgctttttctatttgtttaaattatcagttaaaaaaacctgttaaaacactgattctcttgtttctattcctgaaattgtaagtaatgattgctgaattggacatgaatatggtatggataatttttgcttttgttcaaacagccagttgaataaaacaagcagtgaaaatatgtggaaatatttaaaagaatggatgtttctcaaaagttttttttttttttttttttttaaaagaatcatcctggcccagcgcagtggctcatgcctgtaatcccattgggaggccgaggcaggtggatcgcttgaggtcaggagttcgagaccagcctggccaacatggtgaaaccctgtctctactaataatacaaaatttagctgggcgtggtggtgcatgcctgtaatcccagctacttgggaggctgctgcaggagaatcatttgaacccaggagccagaggttgcagtgagccgagatcatgccactgcactccagcctgggtgacaaggagagacttaatctcaaaaaaaaaaaaattcatccttttcttccaaaaattttagcacgtattttcatatgttagtgtgtagatcaattcaaataatagatacaacaaatactgtaatatgttgtgtaccttgtaattattccagctgtatcgcagaaatattttataaatttaatagggctgggcagttttttttggaaatgcttgatcatttgcaagtactacatgctcttgaataatatattttcatttttagaaacatttagaatatttagtgtacaacccctgtctcccagtaattctgctgcccaaggaaatcagttactttattttttcttttcatttcttagctatagtctttaaaaaaaaaaaaaaaaaaatggcctgtgaggtcttgcatgatttggcttttgtctacgtctcacttcatctcttgcttttgtctctttcctctttcagccttgaatagcttagcccttttttgctttggtgtctgtgatcatgctcttcctcagggcagatggctcctttaggttaatcagcattaagtttggctactagtatcagacagatgccaaatattaatttctctcacaccagagaaatccagggttggcatggcattcatttattaaatgttatttccaggtgtgtgtatgtgttttgctattgtaaattctgcaataaagatctttgtgtataaggctttacattttttttccttttgattaattcctgttgtggatccaactaaaaagcttactaatttttttttaaaaaattgtttagtctgggcatggtggcttatgcttgtaatcctgcactttgggaggctgaggtgggaggatgccttgagggtaggagttagagatcagcctgggcaatatagcaagagccggcctttacaaaagtaaaaaaaaaaaattagccaggtttggctgtgagcgtctgtagtcctagctacttgcaaggctggcgggaggattgcttgagtccaagaggtcgaggctgcagtgagctatgatcgcgccactgtactctagcttgggggacagagcgagacgctgtctaaaaaaaacaaaattaaaaatttgtttagagaaagtatctttaaatgtttattgaaaactgcacaaatttaaatgtatagaatgtttatatttgtagatatctgtgtagtcatcactcaaatccagatgtggaacatttttagtgttcgaaaaggctctcttgcgccccctccaatcagtgtctctttccctctcaaaggtaatcactattctgtcctctatcgccataaactatttttgcctgtttttgaactttatataaatgtaactgatatggtttggctgtgtccccactcaaatctcatcttgaattgttactcccacaattcccacgtgtggttggcagaacctggtgggaggtaattgaaccatgggggtgggcctttctcgtgctgttcttgtgatagtgaataggtcttgtgggatctgatggttttaaaaacgggagtttccctgcacaaactctcttctcttatctgccgccatgtgagaagacatgcctttaaccttgtgccatgattgtgaggcctctcctgccatgtggaactgtaagcccattaaacctctttattttgtaaattgcccagtctcaggtatgtctttatcagcagcatgaaaacagattaatacagtaaattggtaccagtagagtagagtgctcctgaaaagatacccgaaaatgtggaagcaactttggaactgggtaacaggcagaggttggaacagtttgaagggatcagaagaggacaggaaaatgtgggaaagtttggaactttctagacttgttgaatgactttgcccaaaatgctgattgcgatatggaccataaagtccaggctgaggtggtttcagatggagatggggaacttgttgggaactggagcaaaggtgactcttgttatgttttagcaaagaaactggcaacattttgcccctgccctagagatctgtggaactttgaacttgggagagatgatttagggtgtctggtagaaaaaatttctaagcagcaaagcattcaagaagtgacttgggtgctgttaaaggcattcagttttacaagggaggcagagcataagtttggaaaatttgcagcttgacagcgtgatagaaaagaaaatccccttttctgaggagaaattcaagctggctacagaaatttgcataggtaatgaggagctgaatatgaatccccaagacaatggggaaaatgtctgcagggcgtgtcggaggtcttcatggcagcccctcccatcacaggcgtggaagccttggaggaaaaagtggttttgtgagccagacccaatgtccctgtgctatgtgcagcctagggacttggtacccagcattccagctgctccagccgtggctgaaaggggccagcgtagagcttgggctgtggcttcagagggtgcaagccccaagccttggtgttgatgctgcaatgtggtgttgatgctgcaagtgcacagaagtcaagaattggggtttgggaacctccacctgcatttcagaagatgtatggaaatgcttggatgcccaggcagaagtttgcagcaggggtagagcattcgtggagaacctctgctagggcagtgcagaagggaaatgtggggtcagagcccccacacagagttcctactcgggtaccgcctagtggagctgtgagaagagggccaccatcctccagcctccagaatgatagatccactgacagcttgcaccatgcgcctggaaaagctgcagacactcaatgcaagcctgtgaaagcagccaggagagaggctgtactctgcaaaaccacagagtcagaggtgcccaagaccatggaaatccacttcttggatcagcatgacctggatgtgagacatggagtcaaaggagatcattttggagctttaagatttgactgccctgctgtattttggatttgctagaggcctttaacacctttgttctgggcaatttctcccatttggaatggctgtatttacccaattcctgtacccccatcttatctaggaagtaactaccttgcttttgattttacaggctcataggcagaaggggcttgccttgttttggatgagactttggactgtgaacttctaagttaatgctgaaatgagttaagacttcgggggactgttgggaaggcatgattggttttgaaatgtgaagacatgatatttgggaggggccgggggcggaataatatggtttggctgtgtccccacccatatttcatcttgaattgtagctcccacaattcctgtgtgtggtgggaggaacctggtgggaggtaattgaatcgtgggagtgggcctttcctgtgcttttcttgtgatagtgaataagtcttttgagaactgatgatttttaaaaacgggagtttccctgcacaagctctcttgtctgccgccacgtgagacatgcctttcactatgcgccatgattgtgaggcctctccagccacatggaactgtaagtccattaaacctctttcttttgtaaattgttcagtcttcatcagcagcatgaaagtggactaatacagtaaccatatagcttgtatacctttttgtggatggctacttttgcttaacattgtgtttgtgagattcatttatgatgtagagtgcagcagtagttccttttcagtgatagtagtattccattggatgaatataatgtaattttaaaaaattggacatttgattttcagttttttggctattgtgaataaagctattgtcaacattcatttacagttttttacattttttatactttttttgagatagagtcttgctctgtcacccaggctggagtgcagtggtgcgatctcagctcactgcaacttctgcctcccaggttcaagtgattgtcctgcctcagcctcccaagtaggtgagattacaggcacttgccactacacctggctaatttttatatttttagtagagatggggtttcactatgttggctgggcaggctggtctcgaagtcctgacctcaggtgacccgcccaccttggccacccaaagtgctgggattacaggcgtgagccaccacgcccggcccgtttacaggtctttaatgaacttatacactcatttctcctggctgtatatacacattggagtagaattgtgctgtctttatctagcagtttttgaatctgcttgatctggccctctatggctgatacatagtagtttcctggcatttcttcctttctgataaaactagcgactccctttgtctttctcctgtgttaaatcttttttttccctttccatgaatcatatagtgtttttgtttgttttgttttttgtttaacctctccatttgatggagtatatcatacaatagattcctgtggaagactgaaatcttgcattaatgaaaactttttttcatgttcatgcttgatttggttggctaaggattctaggttggaaataatttgccttcagaattctgaaggccttgctgcattgttttctagcttgtcatccttttgagaagtctgaagacattctgattcttgattgtaaaaatgttttgcttttctggaattttgtgtttcctatattctgaaatttcataaggttgtagcttggtgttacgtctatttttaacaatttttcttggatatttgtgtaccttctgaatctgtaaaattcattagttctgggacattttctttaattattttattgacagatgtattagtctttgaggactgtcataacaataccacagtctgctctctgtttgtctgttattggtgtataagaatgcttgtgatttttgcccattgattttgtatcctgagactttgctgaagttgcttatcagcttaaggagattttgggctgagacaatggggttttctagatatacaatcatgtcgtctgcaaacagggacaatttgacttcctcttttcctaattgaataccctttatttccttctcctgcctaattgccctggccagaacttccaacactatgttgaataggagtggtgagagagggcatccctgtcttgtgccagttttcaaagggaaatggaaaacaaaaaaaggcagggattgcaatcctagtctctgataaaacagactttaaaccaacaaagatcaaaagagacaaagaaggccattatgtaatggtaaagggatcaattcaacacgaagagctaactatcctaaatatatatgcacccaatacaggagcacccagattcataaagcaagtcctgagtgacctacaaagagacttagactcccacacattaataatgggagactttaacaccccactgtcaacattagacagatcaacgagacagaaagtcaacaaggatacccaggaattgaactcagctctgcaccaagtggacctaatagacatctacagaactctccaccccaaatcaacagaatatacatttttttcagcaccacaccacacctattccaaaattgaccacatacttggaagtaaagctctcctcagcaaatataaaagaacagaaattataacaaactatctctcaggccacagtgcaatcaaactagaactcaggattaagaatctcactcaaaaccgctcaactacatggaaactgaacaacctgctcctgaatgactactgggtacataacgaaatgaaggcagaagtaaagatgttctttgaaaccaacgagaacaaagacacaacataccagaatctctgggacgcattcaaagcagtgtgtagagggaaatttatagcactaaatgcccaaaagagaaagcaggaaagatccaaaattgacaccctaacatcacaattaaaagaactagaaaagcaagagcaaacacattcaaaagctagcagaaggcaagaaataactaaaatcagagcagaactgaaagaaatagagacacaaaaaacccttcaaaaaatcaatgaatccaggagctggttttttgaaaggatcaacaaaattgatagaccgctagcaagactaataaagaaaaagagaagaatcaaatagacacaataaaaaatgataaaggggatatcaccaccgatcccacagaaatacaaactaccatactttgttttctagcttggcttttatgaacatccttccgtgtcagtgtatatataaatctaaaggttttttgttttttttttaaaccaaaaaactttgcctattttgtctctgttataaagttcctgattttctttaatagagctgtttctacttttattcctacaaagaatatacgtattttttttaggtggctaaaaacttcatttttttctcatctctagtatgagagtaatacttagtcaaaggatagctgtaaggctacagtgagaatttacgaatcagtgtaactgctaagcagtgtttggtatccatgaagagcctgtctggatctcccttcctgcctaagatcaatttctaaatgtaaaataactggtttcaaagatacagatgtttatttaaaatgttgctgactgttgccaaactgctatttagaaaagacattccaatttacacctttaccacagtgttttttaactctgtgttatcattctttctaatctttgccagcatggtaggcaaaaaatggacaaaactaaaaggagaattagacaaatccataagcataatatgagatatttcagcttgcctctctgagtaattagaataatgagacaaaaatacataaaagatttaaacactataattatcaaatgaatctaattgacatgcattgaatatttcacctaatacctacagaatgcagattgtttttaagtgcctatgaaagtttttcccaaattgacacatgctggacaataaaaaagatcaaaataatcaattcttgagtgttttctgacgtgttggaattaagcaagaaatggattaccaaaaaaactagaaaattgtcagctgtttgaagataagcaatatatttctgagaaattcggggattagagaagaaataacattaaactatttagaacagaaccatgaaaatatagtataacttaaaggatgtgtatagagccatgcttagaggaagagttatagccttcaaatctatacatgagaaagaatgaaggctaaaaataattgaaaggacttctaaataaagatggctgagtgaaagacacatttacttttactccctttgatagcccagcaaggtgacagtaaaggatacttttagaagatttgaactacacaggtaaagagaataaagaaaagacggcaacaataaaatctggaaactggaaagcgagtgaactgatgggaaacttcttagtggacttaaaaatgttcaatcctaagtggcgggagcaaaagtagaaaatacttcttaggctcaggaattggcagcatcaggtatttttggcagggaggaggtgagggtggtgctaaaaacaggaggatttcttgaaaatctgtttaagaagcagctcagtcataatagccccaaagtagaagcaactcagatgtccatcagctgataaatggttacatgtaatgtatatccacacaattaaatactatttggcagtaaaaaggaatatagaactgatacatgttataacatgatgaaccttgaaagcattatgctgtgaaagaagccagtcacaaacgaccacagtattgtatgatacatgctataacacagataaacctttaaaacatgctaagtaggccggacatggtggctcacacctgtaatcccagcactttgggaggccaagacgggcagatcacttgaggtcaggagtttgagaccagcctggccaacatggtgaaaccccatctcaactataaacacacaaattagccggatgtggtggcaggcacctataatcccagttacatgggaggctgaagcaggagagtcgtttgaactggggaggtggaggttacagtgagccaagatagcaacacagcactctagccagggcgacagagtgggattctgtctcaaaaacaaacaaacaaatgtgctaagtatactaaagaccacattgtatgattccatttgtatgaagtatccagaaattgtgtatttgtagagatagagtggttgcataggactgggagtaggggaggttagagggaaatgggaagtgactctagggtatggagtttctttttggggtgacaaaaattttctaaaattcattgtggtaatagttgcacaactctgaatagactaaaacattgaattgtatactttaaatgagtgagttttatgataatctgagttgtatctcaataaagctatttttttttaagaaaggttgagtctagattcctttgttagtttgtatcactaagttactgccttcttgagtaccccagcaagaagactgactattgtttctgacactgagggtgggccctagacacaattggaggtcaagcgttctacagaaaacactgaattaagttaaaatgctcaatattgagaccgttactgaggcctcttctctttggcttccagaattctggcaatcaagtaggaatttggaggatggttctcttactaacccaagaagagaatctgtgttatttacaatagcttttatggccctccttttaaatatgagaagataatcaaggatcaccagacatgtgaagaaagcttctcatataagaaacctcttaaaagaaatagaaaacaaactgggaacaatcagaacaacaaaaaaaaaggctcagtagaacagtcaatagaaaagttgaagttagagtaaaggagttctttcataaagtagaggaaaagatggaaaataaatgagaaaagaaaattaaaaggtccgtcagaggtcaacttccaaataacagaagtactagtagacatcagagaaaagaaggaattatcagtaaaatattcaagaaaaattcccagaatcaaggaacgtgattttgcagaatgagaggctctatgggtatcctggaaaaatgaaagaaaatagatatacgctttcaattaaagcctagtcaggaaaatggagaccacaccaattactgtaacagaatctaaaataaagagttgtttagccagatattatgggttgagttatatcttcctcaaaaagatattttgaattcttaatccctagtacttaagaatgtgaccttatgtgcactattcacaatagcaaagacttggaaccaacccaaatgtccatcaacaatagtctggataaagaaaatgtggcacatgtacaccatggaatactatgcagccataaaaaagaatgagttcatgtcctttgcagggacatggatgaagctggaagccaccattctcagcaaaatatcacaaggacggaaaaccaaacactgcatgagttgaacaatgagaacacatggacacagggaggggaacatcacacattggggcctgttggcgggtgaggggctgggggagggatagcattaggagaaatacttaatgtaaatgacaagttgatgggtgcagcaaaccaacgtggcacgtgtatacctctaacaaacctgcacgttgtgcacatgtaccctagaacttaaagaatattaaaaaaaaaaaaaggctgggcacagtggctcacgcctgtaatcccagcactttgggaggctgagatgggtggatcacgaggtcaggagaatgagaccatcctggctaacacggtgaaaccccgactctactaaaaatacaaaaaaattagccgggtgtggtggtgggcgcctgtagtcccagctagttaggaggctgaggcaggagaatggcgtgaacccgggaggtggagcttgcagtgagccgagatcatgccactgcactccagccggggtgacagagcgagactccgtctcaaaaaaaaaaaaagaatgtgaccttatttcgaagtggggtctttacagaggtaaacaagttaaaatgaggttattagggtggaccctaatccaccatgacttcgggccttttaaaaaagggagagattttgacacagagacagaacaccagggagaagatgactatctacaagccaactaggagggagcctagagcagattcttcctagcatcttcagaaggaacacgttcctgctgaaataccttgatttcagacttctggcctccagaacagtgagaatgtgtttccttgatgttgccacttgatatctcatggatcttgaacttaagacaatcaacaaactttgtttgtttgtttttttgaggcaggttcttgctctgtgacccatgctagagtgcagcctcaatctcctaggttcaagggatcctcatgtttcaacctcccatgtagctaggaccacctaggtgtgtgtgccaccatactagctaattttttgaccctttgtggagatggggttctcacttctttgccctggctggtcttgaactcctggtctcaagcagtccttccacctcagcctcccaaagtgtggggattacgggtgttaggctaccacacccagccaacaaactcttgatcccttcattcttaaagtacactccaggtctgctttctgcgctctaccctacatttgttcattcctgtctttctcatttcattaaatgatattgccatccactcagtagctagaagccaaggtgtcatacttgatacctttcttttcctcattctaactcacatacttccagtccatcagcaaatcctgtcttttctacctccaaatacatcttgaagtcttctgttctttatctgcatcaccatactactcaagtcaagcagccatcatctcttcacttacactattggcctcttattttatttaattttttttgagatggagtctcactctgtcacccaggctggagtgcagtggtgcaatcttggctcactgcaacctctgcctcctgggttcaagcagttcttcttcctcagcctccttagtagctgggactacaggtgcacgccactacgcccggctaatttttgtatttttagtggagacgggatttcaccatattggccaggctggtcttgaactcctgacctcatgatctgcccgcctcggcctcccaagtgctgggattggaggcatgagccaccacgcccagcttctattttttattgtggtaaactgcataagcataaagttgaacatcttaaccattttaagtatacagttcagtattaagtatattcacattgttgtacaaccagtccccagaactttttcatcttgtaaaactgaaactgtatacatactaacaactccccaagtcttccctcctcctagcccctggcaaccactattcttcatgtttctcctttatgtttgtataaatttgtttgctctatgtacctcatataaatggaatcatattgtctttccgtggctggcttatttcacttaatgtcttgaaggttcatccgttttgtagcacatgtcaaaattttcttccttgttaaggctgaataatattccattgcttatatataccacattttgtttatccattcatttgttgatgaacagcttgggttgcttccacattttagctgttaagaatagtgtttccatgaacatgggtgtagaaatatctgttcaggttcctgctttcagttttttgatgtacacccagaagttgaattgctggattatatggtaaactattttttatcttttgaggaaccaccataccattttccatagcagctgcaccattttacattaccaccaaccgtgcataagagttccaatatcattacattttcactaacacttgtttcctgcatgtttttttaaaaatagtagctatcttaatggtgatatctctgtggttttgatttgcatttccataatggctagtgatgatgagcatcttttcatatgcttgttggctatttgtatatatttcgagaaatgtctattttgttcgtttgcccatttttcatttgggttatgtttttgttgagtctgaacaggtctttttatttttacttttgtctgtccatttaactcattcttcacacagcagcacacaacagccagagaaatgtttttaagatttctgcattaatgatacaacaatacctcttacttggcagcataatacaatgaaagtttacattactttcccacatcactgtgtgtgtgtgtgtgtgtgtgtgtgtgtgtgtgtgtgtgtgttgaggggcacctttgctttatgcagtcacttggagcacaggcacctgtatcttatgtcaccaccataatcagctttggcttctcagattgttttggaaggggaagtgtgtgtggagaaagattttagggtccaggctagaagtggcatatatcacttttacccattcagttccattggtcagaactgagtcatgtgatcttatctaattgcaggggtggctgggaagtgtagtatagcagtgtcttaatgaagagaacacagtcattagtgaatactagcagtctctttcacagcgtgtgttggattataatttccttgcttaaaacccttattacatgacttttttaaagacagtctcattctgttgcccaggctggagtgcagtggtgtgatctcagctcactgcaacctccgcctcctgggttcaagcaattcttgtgcctcagcctcccaagtagctgggattacaggcatgcgccaccacacccagctaattttttgtgttttttagtagacacagggtttaccatgttggctaaggctggtctcgtactactggcgtcatgtgatctgtccaccttggcctcccaaagtgctgggattacaggcatgagcccccatgcccagcctacttcttattacatgtagaataaaattggcctgtgtctctcccaacctcacattgtaccacttttgcccttgttctctggccacatctctagccatacggtcattttctgtaacgtgagacttttttttcccctcctggaacctatgtactttgcagtttcttttgcttggagcactctactttaaatatttacatgactgcctcctcttcatccttaaaatgcccacttaaatttttttttctctaactaaaagctgtaattagagtagcactcatattctctgtcctttatggtagcactgtgttaatctttgtcacagcattttttgcaacctataattattttatttgaaaaaatttaatttcctctgctagaaagaggtgtctgtcgtgctcactgttgtatccctgcattaattggccagtgcttaggatacattagtcattcagtagatatgttgttggagggaatctattatatagaaccgactgaaatggagatagttgaattttaaccaagggctcttatgataatttaggtgagttgctgaaggcttgagttttagtgatgtcagtgtaaatggaacagaaaaggatggatgagagacatttcaagagaaaaaccaacacaaattgatgtgtgacttaaggggagcctgggtgaattggaagataatgatttacaattataattaatagattggtaaagaggatagaagagctggatttttggagatgatgcatattcaatttttggagattgatgcatattcaatttgaggtgatagcaagatatttaagtagaaatgttgaggaacagtagcttggattagagaacacaattcaaattacagagtctaggccagaggtgatacgatgaagtcataataatgaacgagctatctagagagagggtatatgtgagaagagcagatggctcagtggaaggaaaatgaggagccagaaatggaaaccagaagcaggtggcgtggagggagggaaaccaatttaatataggggtaaggaaaccagcagtttcaagaaagagggatgattaagttggctgcatccagtagagctatcccttgtcatatgcatttgaaagttctgaaatgttaccttttattaagtagtttgagatcagagggtaccttgggttttatttattctataagaaagtatagcttaatgagaatgatagagtacagctttgagttcttgtcttttctttttttttgaaacacggtcctgctctgtggcccaagctggagtgcagtggtgcaggcttgctcaccgcaacctccgcttcctgggttcaggcgattcttgtgcctcagcctccagagtagctgggattagaggcgtgtggcactatgcccggctaatttctgtatttttagtagagatggggtttcatcatgttggccaggctggtcttgaggtgatccttctgccttggcctcccaaagtgcaggcttgagccaccatgcctgagcttttttttttttctttttttgagagggagtctcactctgttgcccaggttggagtgcagtggcctgatctcagctcactgcaacctctgcctcttgagttcaagggattctcctgcctcagcctcccaagtagctgggattacaggcacctgccaccacaactggctaatttttgtatttttagtagagatggtttttcaccacgttggtcaggctggtcttgaactcctgacctcaagtgatctgcccacctcggcctcccaaagtgttgagattataggtgtgagccactgcgcctgctgaagttcttatgttttagagatatttacttaaatatttatggatgaaaatattttttcaggtatacactgaaatatttacataaatttttagaggtatacaccgaaatatttacagacaaaagttttttgcttcaaaatacttaagcaaggaaacaggaatgggtgagaatatggatattgtggccgtggacaagtggccatgagttgatgattttagctacatgatgggtttaaggggtttgttctcttctttaatgtatgtttgaaattttacataatagaaattataaaaggagggaattgtcttttccagctgtaatctagggcacattacttaacttttttgagacagggtcttgctctgtcacctaggctggagtacagtggcctgataactcttcagctccttacgtagctggaactataggtgcatgccaccatggctggttaatttttgaattttttgtagagacaggattttgccatgttgcccaggctggcctccaactcctgggctcaagtgattcgtctaccttggcctctgaaagtgctgcaattacaggtgtgagccacagcacccagcgtacttaaacctttgaagccttagtttcttcagttaaaaatggtgatattaatactgattgtatcagtttgctgtggtgattaatgacagtgtattaaaactacttagcatacttactctgtgcactcattgtccagtaaatatttctgaagtgaaatacagtgagataatacagttaggcatcaaggttaaggggtttgtagagggagaaaaggttctgggctctttatagcaacctttcataagagatacgttctttttagaatgttataaagttggaatggctaacttaaaagcttccatagacataatatttatttattttggcatgtttttaataggagttttctgatctgaacgtgtacaaaagcagcagtacagtggtatttcatctgttctaaaccacatccttttactgaatgttattccggaagcatttataaggcaggtgcccctttgaaagacattgtcctttaaagtagtttgaaactaaattttcatttaacattaaagtcaaatgagggaatacttaagatggaagcatgggttaataaaattgtattaacactaatttcttagagcacctgacttaaagtatatattttttggtagtaacttggctataggtagtatatagttatccttttttttttcttttgcagtaaaacttggttatggatagtatatacttgtcctttggtatccatgaggtgttggttccaagactccttgcagataccaaaatttgaggatgcttgagtctcttgtgtaaaatggggtactatttacatataacctatgcacattctcctgtatactcgaactcatctctagattacctaatacattgtaaatggtatttaggtagttaatgctatattgtttagggaataatgacaaggaaaaaacgtctgtatatgtttagtacaggtgcttttttttttcctgaatgttttaaatccacggctggttgaattcatagatgcggaacccatagatacagagggccaactgtactaagaaattgctgtcacagtctgtagatgtcatacagttttgtctccagataaatgagagacctgtgaacacaaaggaaactttcttgtatgccttttcattctcatgtttttaaagttcgttcattttttgtttagggaactttaatgagttacttaggcagagtttggaactgtcctgtagttacatgatcagtcttttttttttttttttttcctatctttctttttctttttttctgagacggagttttgctcttattgcccaggctggaatgcaatggcacaatctcatctcactgcaacctccgcctcccaggttcaagcgattcttatgcctcagcctcccaagtagctgggactacaggcaggtgccaccatgcccggctaatttttgtgttattagtagagacggggtttcattatgttggccaggctggtctcgaactcctgacctcaggtgatccacctgctttggcctcccaaagtgctgggattacaggtgtgagccactgcacccagcccctatcttttatattgtgttttatttctttagaaatgaggtttcactgtgttttccagactggagtacagtggctgttcacaggcaccatcataatgctgtgtggcctccaactcttggcctcaaacgatcttcccaccttatcctcttgagtagcggggactacaggagtgcaccgccatgctcagcattttttttctatcttaacataaaatggaaaagttactgttgccttttctcctgataaatagcagcctaagtaagactggtagtttggaataaaggataagttaaaagggcaggaaggtgaggaaagaagtgtttaaaaatgaaggcgagaaggagaaaaagaagttgagagataaagtttatattttcctgtgccttagtatcgacttgcagtgaattagttgaaagttgccttgccagttacatataattggtgacttttaagttatttgtcacctggaacagacataacttctttagcatacaattcagatacaactgtcattgaatttatgtttccataaaattggtggtagaatttttagcattaggtaggagaagaggacagggaaagacagctgtgtctcaggcactgtactgttttacctattttgttaaatcctcacagcaaccctgtaggtaggtgttaactgaagcagagaggttagataacttgctcagtgttacacactgatgataaatgacagagcaagaattcaaactgtaatgtttcggttcttgttatcttttattcatcgcctttattgtttcttttctttctttctttctttctttttttttttttcttttgagatggagtcttgctcttgtcgcccaggctggagtgcaatggcatgatctctgctcactgtaacctccgactcctaggttcaagctattctcctgcctcagcctcccaagttgctgggattacaggcgtctgccagcacgcctggctaatttttgtatttttagtagagacagggtttcgccatgttggccaggctggtctcaaactcctgacctcgtgatctgcctgcctcggcctcccaaagtgctgagattacaggtgtgagccaccgtgcctggccctccttgctttattttatgattccattcagtcattagtcttgtcggtttttaaaaaaaggttttattgagatatgattcacatactatacagttcactcattaaaagtatacaattcagcttttagtatattcagagttgtgcaaccatcaccacaatatcagaattttttttttttttgagacggagtctcgctgtgtcaccagggtggagtgcagtggcaaaatcttggctgactgcaacctctgcctcccaggtttaagtgattctcctgcctcagcctccgcagtagctgggactacagaagcttgccaccatgcccggctaattttttgtatttttagtagagacggggtttcaccatgttggccaggatggtcttgatctcttgacctcgcgagccaccgcacccagccatattggaacactttaatcacctcccaaagcaatgccatactcattagttgtcacccctaacctcccctctccgtgtcctaggaaaccattaatctgccttctgtctctatacatttgctcattctgaacctttcatatacatggaatcatatagtatgtggtcctttgtaaccgctttctttcacttagttcaatgttttttttgttgtttgttttgtttttttcttttttgaggcaaggtttgctctgttgcttggactgtagtgcagtgcttgatcacagctcactgcaacctctgccatccaggcacaagtgatcctcctgcctcagtctcctgagtagctgggactgcaggcatgtgccaccatgccaggctaattttttgattttttttttttttttttttttttttttttgtagagacagtctcactgtgttgcccaggctggttttgaactcctgcgctcaagtgatcttcccatctctgcctcccaaagagctaggattacaggagtgagccactgcacccagcagcttgatgtttctaaggttcatccatgttatagcacatactggtactgtgtctggaattggtgggttcttggtctctctgacttcaagaatgaagccgcggaccctcgcggtgagtgttacagctgttaaggtggcgcgtctggagtttgctccttctgatgttcagatgtgttcggagtttcttccttctggtggaatcgtgatctcgctggtttcaggagtgaagctgtagaccttcgcggcgagtgttacagctcataaaggcagtgtggacccaaagagtaagcagtagcaagatttattgcaaagagcgaaagaacaaagcttccacagtgtggaaggggacccgagcgggttgccactgctggctcgggcagcctgcttttattctcttatctggccccacccacatgctgctgattggtagagctgagtggtctgttttgacagggcactgattggtgcgtttacaatccctgagctaggcccaaagttctccacctccccaccagattagctagatacagaatgttgacacaaaggttctccaagtccccaccagagtagctagctacggagtgtcgattggtgcattcacaaaccctgagctagacgcagggtgctgattggtgtgtttacaaaccttgagctagagacagagtgcccattggtgtatttacaatccctgagctagacataaagattctccaaggccccaccagactcaggagcccagctggcttcacccagtggatcccgcacaggggttgcaggtggagctgcctgccagtcctgcgctgtgtgcccgcactcctgagcccttgggtggtcaatgggattgggcgccctggagcagagggtggtccttgttggggaggctcgggcggcacagcagcccatggggcggggaggctcaggcatggcgggctgcaggtcccgagccctgccccacggggaggcagctgaggcccggcaagaaatcgagcgcagcgctggtgggctggcattgctgggggacccagtacaccctcttcagttgctggcccgggtgctaagccccccactgtccggccggcagggccggccggctgctctgagtgcgtgcggggcctgccaagcccacgcccacccggaactccagctggcccgccagcgttgcacgcagccccagttcccgctggcgcctctccctctacacctccccccaagctgagggagcaggctctgcccttggccagcccagaaaggggctcccacagtgcagtggtgggctgaagggctcctcaagtgctgccaaagtgggagcccaggcagaggaggtgccaagagcgagcgagggctttgaggactgccagcacgctgtcacctctcagtacttcattcctttttattgctgaataatatgtaattttacagttaataccacattttatgcattcatcagtttacaggcatttgagttttttctcccttatgcctattacgagtaatatggctactggcattcatgtacatgtttttaaaaagttattgtggtaagatatgtgtaacataaaatttaccattttaaccatttttaagtgtacagtgataagtatattcacattgttatgcagccatcaccaccacctgtttgcataagtttttcatttttgccacctgaaactctgtacccattaaacaacaactcccaagtctgccatccccccaacctctggcaatcaccattctactttctatctctatgaatttgacaactcctggaaccatgtgtaagtgaaataaatcatacaatatttgtcctttatgactggcttatttcactgagtatagtgtcttcaaggtttattcacattgtagcatgtgtctaaagttcctccccgaccaaaggctggtactgttccgttgaatctatatttaccacatgttgtttactcattcaactgatgacagacactgaggtggagttttgctcttgttgcccaggctggagtgcagtggcacgatctcggctcatttgcaacctccgcctcctgggttcaagtaattctcctgcctcagcctcccaagtagctggaattccaggcatgggccaccatgcctggttaattttgtatttttaatagagatgggggtttcgccatgttggtcaggctggtcttgaactcctgacctcaggtgatctacccgcctcagcctcccaaagtgctgggattacaggcatgagccaccacgcctggcctgatcatggacactttggttgcttccactttttggctgttgtgaataatgccaatatgaacatgggtgtacaagtatctatttgagttctcacttttacttcttttgggtttgtatccataagtgaaattgctggattgtatggtaattttgtttctaattttttgaagaactgccatatgggtttccacagtggctgtaccatcttatcttcccaccagcagtgcacaagggttctaattttctacattttcaccaacacttgttattttctgtcatcatcatttttttaataataaccatggtgatggttgtgaggtggtattattgtggttttgatttggatttttctaagggatggtgatatgatcatcttttcatgtgcttattcactgtttgcatatcttctttggagaagtgtctattcaattcctactccatttttgtgttggatttttattttattctttttagagacaaagtctcactgtatcactcaggctggaatagagtgacataatcatggctcattgcaatctcatcctcctgggctcaagggatcctcctgtctcagcctcctgagtagctaggactataggtgcatgccactgcttggctcatttatttattttttgtagagatggggatctcactatgttgcccaagcaggtcttgaacttttagcctcaagggatcctcctgtctcagcctcccaaagtgttgggattataggtgtgagtcaccacacccagctggattttgttgttgttgttgttgttgtttttgacttgtaagagttctttatatattctgaatatcagtgtcctatcagatgtgatttccaaatattcctttctgtgggttaccttttcactgtattaatttagtgtcctttcatatacaaagtatgttaaaaagatcttaattttgatgaagtccagtttgactcttttcggttgcctgtgctactgatgtcctggattatctgagtgggctctggtaatcacaagagtccttatcagagggaatcaattagtccaggaaagggatgtgatgctgaaagcagaaatcttgatgatgtggccaagtgcaaaggaatataagcagcttctaggagctggaatagacaaagaacagattcttctctagagccttctgaaggaatgcaggctttgattgtagctttgtaatctactccatccaggctgctgcaaatgccaaacaggcctgtaagacctgttttagacttaatgacctctagaactgtgagatcacaaatttgtgttgttttaagccactattgttacacagcattaggcaattaatacaactagaatcaaaggagagactgagagcatgaagattatacatgagacttttaaaatactttatttcagtaggtttttggggaaccgatggtgtttgattacatgagtaagttctttagtggtgatttctgagattggtacaaccatcacccaacagcaatgtacactgtacccaatgtgtagtcttttatccctcacgccaccacccttatcattcatatgcttttgcgtcctcatagctttgctcccacttatgaatggagaatatacgatgtttggttttccattcctgagttacttcagttagaataatggtctccagttccatccaggctgctgcaaatgccattattttgtttctttttatggctaagtaatattccatagtgtgtgtgtgtgtgtgtgtgtgtgtgtgtgtgtgtgtgtatatatatatatacacacatgtgcaagtatctttttcgtataataacttcttctcctctgggtagatacccaggagtgggattgctcgatctactttcagttctttaaggaatctgcgccatccacgtcaacatctattttttgattttttgattgtggccattcttgcaggagtaaggtggtactgcattgtggttttgatttgcatttccctggtaattagtgatgttgaacattttttcatatgttggccatttgtgtatcttcgtttgagaattgtctattcacgtccttaggctgttttttgatgggattgtttttttcttgctgatctgagttccttgtagattctggatattagtcctttgtcagatgtatagatggtgaagattttctcccactctgtgggttgtttactctgctgattgtgtcttttgctgtgcagaagctttttagtttaagtcccatctctttatctttgtttttgaggcatgagacttttgatagaatctacatcttgctttgctcagattggcttaaaccctacattgattctaatccatcaccaagtcttgacatcttccatggaaatttgagaagggttagtgatataagccagtggtacctgctactgcaactggtattgaggcaggaattactattcatcattaccttcttttactacctattctagatttcctttatgctgggccagcatttaagctggtttaagttgcttctgtcctttaggctttcatccttgtgggacttgagcctttagttgccttgcctgttttgagccatggttgctgtaatttcctgtttaccctattagcaagcatggaaataccctgcattccagacagattgctccctaatctcattgtgtacaacaggtcctaataatcagggtcatttatcactgctagtatatttattcctttctttgcctgctcgttcatcagtatgagaagcccatagtgaccaagtggtggttgtggctttaggctccgtgaacccctactgtggaagcattaccctcaggatctctagtacagcagagattttaaattgtggggataggaaatccacatgccataagtgagttactgggagtgatggtgaagagtcaatctaacttctctaccccttggtttctaaacccgtgcatctcaggtagtagggatataataccctagccattggttcagtgcatatgctgcatcccaaatgaccagcagaatgacttcttaatcgagcttttaatttaatgcaccactttatgattttgttagccggacagtttctaggtgatgtggtatgtggtgtaggaccagtggatgccatggtcatgtgcttaatgttgtatcttcttcaccattaaacgagtcctttagtttgaggtgatgttaaagtgaatcccagattggcaaagcaaacattttgaaaccattgaggtactgtaaatgtccagagacactcagggcaggaaaggcaaactcatttctacagtaagtgtaaatcctacttcccctggaatgcaaaggttccaattccatcctgccacctgctcagttctgtgtctgataagttgtttcctgcattctgctgtgatcctaaattttgctagattttttaaatcttattagtacttttaattatatttttcagaaataagctgatttttttgttttgttttgttttttttttgagatggagtttcactcttgttgcccaggctagagtgcagtggcactactatctcggctcactgcaacctccacctcctgggttcaagcagttctcctgcctcagcctcccaagtagctgggattacaggcatgtgccaccaagcccagctaattttgtatttttagtaaagacagggtttctccatcttggtcaggctggtctcgaactcctgacctcaggttatccacccgcctcggcctcccaaagtgctaggattataggcatgagccactgcgcccagcaagctgattttttttgataatagggatgtgataaacagttttcactttaacgtagtcaactatatgattccatttgtatggaattcaagaaaaggcaaactgatgatagatgtgtataaggctttggtatgtttttggtttattttattatatatatatatcatgtttccgtaccttttaatgttgcaataaaattgttttgtctgacattaaaattgccataccaccttttttaaaaaattgccataccaccttttttaaaaaattgccataccacctttttaaaaaaaaggtttgtcagaatttatttttttcatcttttctctgttaatgttttagttcacttttataaacagctttagttgaatttgtatgttgtttttattttattttatattatttattttttgagatggagtcccactctgttgcccaggctggagtgcagtggcacaatctcggctcactgcaacctctgcttcctgtgttcaagtggttcttgtgccacagcctcccgggtagctgggattacaggtgcgtaccaccacaccccgctaatttttgcatttttagtagagacagggttttgctatgttgaccaggctgatctctaactcctgacctcaggtgatcctcccaccttggcctcccaaagtgctgggattacaggtatgagccaccatgcccagtctgtatgttatttttgttattttctgttacaaatgagttaaattcattcacatctattttaattatgatatatctggatttttgtcatcttgctttgtttgccatcctttttctttgcttctcttctcctttcctgttttttgttttttattgatatataatattttacatatttacgaggcacatgtgacattttgttacataggatgtgtaatgatcaagtcagggtatttgggatatctatcaccttgagtatttatcatttctatgtgttgggaacatttaaagtcctctcttctatctactttgaaatacacagttttgctagctatagtcaccttagtctgctatagaatattagaatttttatactttttctttaacaatatgtttgtgtacattgagcaacctcttttcattacctaccacccatgtacccttctcagattttggtgtctgtcattctactgtctacctccatgagatcatcttttaaacccactgaatgagttagaacatactatatttgtctttctagtcctggcttatttcacttaacatagtgacctccaggtccatccatgttgctgcaaatgacatgatttcattattttttaatggccaaatagtatcccattgtgtatatatgccacatatgtccattaatctgtttttgttttgttttgtttttaaaggcagggtctcactctgtcacccaggctggagtgcagtggtgcaatcatggctcactgcagtgagtagccgggaccacaagcataccccaccacacctggctaattaaaaaagaattttttttgtagaaatgggggtctcactatgttgcccaaactggtctcaaattcctgggctcaagcagtcctcctgcctcggcctcccagagtgctaggattacagacctagcactgtgcctggccccatacatctgttgatgaacacttaggttgattacatatatttgctattgtgaatagtgctacagtaaacatgcaagtgcaggtatccctttgatatactgatttcttttcctatggataactacccagtagtgggattgctggatcttgtggtagttctgttttcaattttttgagaaatttttgtaggtttccaaaaagtatgtactaatttacattcttaccaacactgtataagagttccctttttttctacatccttaccagtgtctttttttcttttgttttacttttatttattattttgagacagaatctcactccctgtcacctaggctggagtgcagtggtgtgatcttagctcactgcaacctctgcctcccaggttcaagtgattctcctgtctcagcctcccaagtagctgggattacaggtatgtgccaccatgctcggctaattttttgtatttttagtagagatggggttttgcaaagtgttggccaggttggtctgaaactcctgacctcaagtgatctgcctgccttggcctcccagagtgctgagattacagacatgagctaccacacctggccttttttgttatttaaataacagccattttaacttggctgaaatgatatttcatgtggtttttatttgcatttccttaatgattagtgatgttgagcattttttcatatacttgtttgccatttgtatgcctttctttgaaaaatatctattcatgtccttagcctacttttaaatgggattattggtggggtttttgtttttgttgtttgagttccttgtatattctaggtattagtcacttgttgaatagttcgcacatattttctcccattcagcagattgtctcttcaccctttttttagacaaatgctcactttaatcacagttctaaattaattattttcacgttaacatagatgttcccataaactgagaagaactgagctaagtattatacatttttaatggttaatatgatttgaaaattttttataaaaattgatcagaagctagttgaaattctcaccataaatataaaatattgattacaattgtttttcacagtaaattgagatctgagcttcctaaaaagctgtattatctaatatcataatagggatgactaaatacttgacaactactttctgaagactggcttaacaaaaagttactatttgaagaaacagctttcccttgtttatatttacaagaaaaaggctaacatttttgcagaactctcattttatcatgaagtgtggacagtcagaagcaggtggctgttggtggggtgcagtggctcacacctgtaatcccagcactttgggaggccaaggcaggcagatcacttgaggtcaggagttcaagaccagcctggccaacatggtgaaaccctgtctctactaaaaatacaaaaactagctgggtatggtggtgattgcctgtgatcccacctattcggggaggctgaggcatgagaatcacttgaacccgggaggcggaggttccagtgagctgagatcgtgccagcctgggtgataggcaagactccctctcaaaaaaaaaaaaaaaaaaaggtggatgcagtggtatcaagaaaaaagcatttcaaaacatttccacttttattaaaggttttgacaatgaagatatcactaaatgtcttcaaattctatttgttatagaataaccatctaaataggagacacatgccataatacagcaaccattttagtgtgtaaaatacttctgaactcttactatgaaaaaatttggctaaaatacaaaacatctttgcaataaaactgataatatagcttaagtagcttataagatttcagaaatgtcttatgaaagaaatgagaatgtttccctgtgcgagataaaactgaacggttaacgttaaggtgctataaactagacaaagctggaaaggcacatcatgtaactagaaaagaacggcatgtgatgtggacttcctccatgtcaaactgacaggaaaatagaatatgctcttcagaaggaaaggcatgagaagataattcttacaaagctctcattgagatcttgaagagctttacagagaacataatcataaaatggctagagatcatttataggacatggtaatggattcctttgtattacaatacctgcctcagatataaacacaaatcaaatataaacacccttgtaaagctgtgcttctttcagccaaacatttctctggtaccacagtcagcctctagtagcatttggatgcaaaggtttaactggtgctgatctggacaagccacagcagagactctgatttggagacttcatggacactcctgccagtgcgctgctgctattgctgctacttccagatgctggtagaaccatttaggtctcttgctttcagctgaaggactgcatatttgtaatggtttcctagtggcatctgaagaaagataaatctcttttggcgaggactgagattctgatttgatggcagccagagcagtctaccaaagtcactaaagcattacatttggatttaggttccttctctttcttttctactggggattttaccttcatttcttttcttttttttttttttaaatttctttaactttactttttctcatagaggagtctttgtcattatcctcactctcaccaaaatcagaatcatcctcagaatcttcaccagttgccaagtctggtttggtgttattagcactattgccatcactgccttccagaaaaattttcctctgttgtaccgcagctttagatgctgcttttcttttcccttgaataccaccattgtctttcttagtaatcttatccaaatctaaataatcactggctacactgcaattagagatacgaggagacttactcactgtttctgttctactattgccatgtttttcaactcttttatcttgagacttctgcacattagtggtgactgttgaaagttccttcactgataaagctagtgcaacttctaagtctctctggtagagcttatcatctaaagccatccttttttttttaggggttttctcttctagtgggatttcttctttctggagattgttcaaattaggttttggtttatcttgttttaactcctttgatgttctggattgcttgtttaaaggtacagttgcagaaacaaaatcatcatcactgtcagagtcgccaaactgtgagtaattgattggtttcttacatctcacaggctgcaccatggtccctttcagggcttgatatttacacttcccaagttcttgttggctgtagtggtggtttcagttcccacccaaaaccagacattggcgctctcccttcactcttcattgtttcctttgctgtgcagaagccttttttgttgttgttgttgtttaatataatcagttggctttaaatatgtggatttatttctgaattatctgttttattccattagtctatgtgtctgtcttataccagtaccatgctgttttggttactgtaaccttgtaatgtattttgaagtcaggtagttttattctttttgcttaagattgttttggttgtttgggctcctttttggtttcatatgaattttaagattgcttcttctatttctgtgaaaaaagacattggtattttgatagccattgcattgaaaatgtagattgcttatggcagtatggtcattttaatgatgttaattcttattcttgagcatgggatgtctttccatttgtttgtgccctctttattttatctagtgttttgtagtttttatagctattgtaaaaagggaatgccttcttgatttctttctcagctagtttgttttattggtatatagaaacaggttttgtatgttgatttttttttaacactccctacttcacagatggatgcatattgatttatgtgtgttgattttgtcctgcaactttactgaatttatttagcagaactaagttttttggtggagtctaggtttctctagatataaaatcatatcatcagcaaagagggacagtttgacttcctcttttctaatttggatgccttttctttttttccctcttgcctgattggtctggctaggacttgcagtactatgttgaataggagtgattaaagtgggcatcctcgtcttgttccagttcttagaagaaagggtttcaacttttccccattcagtatgatgttagctgttgtcatatatgacctttgttatgttgaagtatgtttcttttatgcctagtttgttaagagtttttatcacgaagggacactgaattttatcaagtgctttttctgtgtctgttgagatgaacatatggttttgtcctttattctgttgaggttatgaatcatatttgttgatttgtgtaaccatccttgcctctctgggataaatctcacttcattgtggtgtatttttttttttttaatgttgttggattcagtttgccagtattttgagaatttttatctctgtgttcattagggatattggcctgtagttttctttctttttttttttaaatattttttattgcatccttgtctggttttggtgttaaggtaatgttggccttgtagaatgagttggggagaattgatgttagttcttctatgagtgtttggtagaatttggcagtgaagccatccagtcccggacttctgtttgttgggagactttattactgattaaatgtctttactcattatcagtctgttcaggtttcgtatttcttcctgattcaatcttggtagattgtatatgtctatgtctaggaatgcatccatttcctctcaattttccagtatgttagtgtatcgttgtttgtaatagtttttaatgttcttttgtatttctgtggaattagttgtaatgtctcttttcattttctgattttacttgggtcctctctttttatgttgattagtctagcaagtggtttattgatttaccttttcaaaaaatcagctttttgttgttcttttgtgctttttaaaaaagtcgtttcatttagttctgctctgatctttattatttctttccttctactaatttggggtttggttctagttccttaaggtgcattgctagattgtttctttaaaatcttactacttttttgatgtaggcatttgttgatataaatttccctctttgcactgtttttgctgtatctcatagattttcggtatgttgtattagattttcatttgtttcaataatttttttgatttcttccttaatgtcttccttgacccagtggtcattcagaagcatgttgtttaacttctgtgtatttatatagtttccagagttcttcttaactctttgttttttttttttttttttgtttttgttttttgagacagagttttgcttagtcacccaggctggagtgcagtggcactatctcagcttactgcaacctccgcctcctgggttcaagcagttcttgtgcctcagcctcctgagtagctgggactacaggtgcacgccaccatgcctggctgatttgtattttagtaaaaacggggtttcagcatgctgcccaggctggtctcgagctcctgagctcaggcaatctgcccacctcggcctcccagagtgctaagattacaggcgcgagctatcccacctggcctattattcttgatttctagttttattccattcttatctgaggagatacttgatacgatttcaatttttaaaaatttgttgacacttgttttgtgtcctaacttgatctatcctggagaatgttctatatgctgatgaaaagaatgtgttcacagtggggtgctggtgcccactttaatcactcctatttaacacagtactgcaagtcctaaccagaccaatcaggcaagagggaaaaaaagaaaaggcatccaaattagaaaagaggaagtcaaactgtccccctttgctgatgatatgatcttatatttagaaaaacctagactccaccaaaaaacttagttctgctaaataaattcagtaaagttgcaggacaaaatcaacacacataaatcaatatgcatccacctgtgaagtagggagtgttaagatgttagatgaaatgttctgtaaatgtctgttaggtctatttggtctgatatgcagtttaaatccagtgtggctttcttaatttttgtatctacatgatccatttaatgctcacagtggggtgctggtgtccctaactattatcgtagtggaatctatctctccttacagatctaataatacttgctttatatatctgggtgctacagtgttgggtgccttatatgtttggaattgttaaatcctcctcctgaatttttccctttaccattatataatgaccttctttgtctctttttactgtttttgacttaaagtttgttttgtttgatacaagtatagctacttctagtcactgttggtttctgtttgcatggaatatctttttccatcccttaatttcagcctatatgtctttacaggtgagatgagtttattgtaggtagtatataggtgggtcatgctttaaaaacattttaaaaaatctattcaatcagtatctatcttatttatttaattgagatggagttttgctcttgttgcccagactggagtacaatggtgcggtcttggcttactgcaacctctgcctcctgggttcaagcgattctcctgcctcagcttcctgagtagctgggattacaggcacctgccaccacgcctggctaatttttgtattttcagtggagatggggtttcaccgtgtaggccagcctggtcttgaacccctgacctcaggtgatccacctgcctcagcctcccaaagtgctgggattgtaggtgagagccacaccgcgcctggccaaattagtctgtatcttttaagtggaaagtttgatcagtttacattcagagttattgatgtgtgaaggcttatttctgtcattttattaactgatttatggctgttcagtatatcatctattccctctgtctcttattaattattattttggcttggtggttttctgtagttgtgagtctcttccttgtttgtgtttggtctatcagtggtttttatatttttttgtgtttttgtgatggtagatagtgttcttttgcttctggatgtaggactttcttaagcatttcttctagggccagtctagtggtgatatattccctcagcttttgcttgtttgtgaaatactttatttcttactcatttatgaaggataactttgctgggtatagtatccttgactgacagtttttttttcattgagcactttttaaaaaaattatttttttagacagtctcgctctgccacctaggctggagtgcagtggtgcagtctcagctcactgcagcctctgcctcctgggttcaagtgattcttctactttggcctcctgaatagctgggattacaggaatgtatcaccgtgcccagctaatttttgtatttttagtagagatagggtttcactatgttggccaggctggtcttgaactcctggcctcaagtgatccacctgcctcagcctcccaaagtgctaggattacaggcgtgagccaccgtacctggccttctttcagcattttgaatatatcatttcattctctactggcctataaggtttctgctgagaattccactgttagtttgatgggcgttcctttataagtgactagatgcttttcttgccatttttagaattctgtgtatttgattttttgacagtttgaagataatgtgctgtgaagaagacctttttgatttgtatttactgagagatccctgaacttggtgtatctgatgtgtaaatctgttgctagacttggaaaatttttacctattattttattgaacaggttttctaacatttttgttttctcttctcctgagacactgaaaatttgaatatttggttacttaatggtgttccatatgtcacacaggcttttctcatttttttttttttaattattactttttgtctcactggctcatttccaagggcctttcttaatgttctgagaatcttttatctgcttaatctagtctgttgttgacactttccaacgtagtttgtatttcattcagtgaaatcttcagttctggaattcctgtttggtttttcctttttttttttttttttctttttgagatggagtctcgctctgtttcccaggctagagtgctatggcacgatctcagctaactgcaaccttcacctcccaggttcaagtgattcttctgcctcagcctccgaagtagctgggactacaggtgcctgccaccacacctggtgtggcggcaatttttttgtattcttcgcagagacagggtttcactgtgttagccagtcttgtcttgaactcctgacctccagtgatttgccttccttggcctcccaaagtgctgggattgattacaggcatcagccattgtgcccaacctggttttcctttgtgatatctagttcctttagtaaatttctccctcatatcctgaattgtttttctgaattttttgtattgtttttcagaattctcttgtatctttttttttttgagacagagatggggttctgccaggttggtcttgaactcctggcctcaggtgatctgcctgcctcagccttccaaagtgctgggattacagacaagggtcacagtgtctggcctcagaattctcttgtatcttactgggcttctttaaaatcagtatttgagttatttttctgggatttcataaatttctttttttcccccctgagacagggtctcactctgttgcccaggctggagtgcaatggtgtgatcatggctcagtgcagcctcgacctccctgggctcaggtaatccctcaacctcagcttctgagtagctgggactacaggtgcatgccaccacacctggttaatttttgtattttttttagagatggggtctcactatgttgccctggctggtcttgaacccctaggctcaagcagtctgcctgcctcagtctcccaaagtgctagaattacaagtctgagctactgcacctggccagatttttttgattgggatgtattgcccgtgaattattgtggtcttttggcggtgtcatatttccttgctttttcatgtttcctgtgtccttacactggtatctgtgcctctggtgtaacagttgctccttctaattttttgaattgtctttcataggggaggacattttcctgaagatgtatttgtggtgttggttgaatatggcactttggctttgattctaggtatgtgtcatagtgtagtctctgtgtgttttctttcaatgtgaatgctgtcagtggtgtctgtgatttcttaggtggcttagattgtggttgttagtggaggctgtgataaagttttttataaaagaaaattttaactttcaataaaagaggtctcactctgttgcccaggctggtctcgaactcctgagctcaagtgatcctcccgcctcagcctcccaaagtgctaggattacaggtatgagccaccatgcctggcctgtgataaggttttgctgaggtctgggttgccaagtaggccagctctcaggccccagtggtggcaccagtgggttgaaattgcctgtccttgggcttcagggcagtgtatgctggcaccagtgttagcaggttcaggtaagccaatctttgagcctccaggtgtcttgcttgggtaccaggagtggcacaggtgagccaggcaggttgacaggtttttaaacctctgtgcagtgggcatggtgtggatgatggcagtagcagtggtgggataacctttaggacccaagctgtctgtgctggtgtaggcagtggctgtgatggactggacaggccaatcccccaggcttgcaggtggcacgtgtggttagttgccagctgtggtggtagaggcaggttgaataggtccaatctcagaccctgggaggagtgcttaggtgccaacagtggtggtctatgctaggtgatcgccaggcccacggattgcatgcttggttactgagagggatggagccaggttgtaggagcctgtccttaggctccccactggtacgtgcaggtactggctgtggtaggcaggggagagtgatcctcagactgccatcagaatgctctggtggcaacagcagggcttgtgctgtggccttgttaccgggaagggtggggttgctgtcagtgggagcattcataggcaggtggcttgcagggtcacatactttgcttgtgccttgctcctgctgctgcagcagctattgcaggcagtggaatttttcctcagtgcatgaaaatgcacgggtccccctctgctgcagtgtagggagacagttgctgccagtggctttggtcttggaccctgtggagcagctataggtggagaatgtcaatggggtctccagggatgtggagatgcagggtctgttgggttcccgggcatgacaaagtctggtgggggctgggctctcaaaatgaaggtacactgtacctgcttaggtttgtgggacttagcgtgagctctctctggaataatgttgttgcatggtttctaggcacctctttatgttagactcagggcctgcagcacttgagggcttctcccatggctaggattgtaagagtctggtgggactgtggaccagtggaggtctctcagctctccgctgatcctggttgagcaggctgtcttgcctcctcctcctttcttgctttcagtgcttctcgtcaccaccctgctgaattccagtgttctctcttaggtgatctatttgaagtgtgattatctcctcactattttgttcccttttcatggaagaggcaagtaccaaatgcatgtagtcagccatcttgaagttcctccctttcctgtttttttgatgaattgataattgaatactgtccatgactcagactgtaacaaagtgagaacatagaatcttacctattgtcctcagtgctacaggtattatatccttatatatgtggcgtcagcctcagtccccagatctttttgtacctaataagctaggaaccggtaatatcatggtcagcaagagagagaacatccttaacctaatatttgatcacttactctctttgggaatattttttcaatcttagtagtgatggtgtttctgaaagtccagtagttaaaggtagaattgaaagtgtttaccattcaaaagtacttcagtattttagtaaaaacatacattatagtaaacaatgataaatatgattttcagggaggaaaaaaagcatgagattctttataatagcaaaatagtctgtttacttagggtacataggtccgcaaccgtatcacttcgtcatattaacattccttcaccagtagctgcagggacccatatagtcttaataattaaagtacttttaaattagtttttaaaaatattagaacagatcatgtatgcctggtttaaatacaaaggaatgatagagggttttaaaagataaagccttgttcaaaaaatgaggtaaatttatctgtagaattagtggactagatgtacagcttgcaaagtgagggtgaggccacagtgccagcatttggatatggaaacagggttgacgtggttctgaattcatgtccttataagatcatcagggctgaaagagtcacacatgaaactggagaccaaatctgtggatactgagtaaaacaagaaacagggataggttgtcccacctgttaaaggaggcgaactgcgactgattactgccaatgtggtgacatctaactccaaaggagactgacaatatatattttttactgtggttgccatgtcccttactcaaaattggtagctcttaggaagaagagaaaagatattaaaagtagacagctaatggtttctgcatgtgaaggtacaaaaattataagaccattacaagagaatttcagattcagtgggatatatacagtatagtgctgtggtttgaatgtgtaccccaaagttaatgtgttggaaagttgatgcagtggtgttgggaggtggggcataatgggaggtgtttgggtcttggggacactacactcatgaatgaattaatgctgttattttaggaatgggatccatgactcttcccccactcacccccagatatttgatgccttcctccttgttgttatgtagtaggaaggccttcaccagatgctagtgtcttgatcttgaacttcccacccttcagaactatgaggaaataaatttctgtcctttataaatcacccaatctcagatattctgttatagcagcacaaaatggactaagacagtaagagagaggcagaagttaggtagaatcacagagaagggagtcactgactactcagagatatctaggcaaatggtgcaaagaaaatatgtgaattgggtcttaaaaatacgtagaagtttgctgagaggggaagggcatgctagactgaggactgaaacaccgtgtgaaaggagctgaaactcataatttgtaaatgctaaaaaccacgtgtatgatattctgttgaggtgccagggatacaaaatgaaacaaggctgtttcctctaagagcttgctctgagagacaattatttaaacaaccaatttcaatggcagaatgtcgagtgctgtaataatataaatgtcccatgtgcacttgagaagaatatgatttgtgttgttggatagtgttctctgatacagctaattggtttatagtattaagtcctctttcctcttttgtctgattattctacccattattgagagtcaggtattgaagtttccaatgattactgtagaactgtcttgtttctcccttaaattctgttagtttttgctttatatattttgatgggctgtcattacatgttaaatgtttatcatagtatcttcttgctatattaaactttttattaatgtatagtatccttccttgtctcttacaccttcttgttttatagtctatgttgtctgatgttaatacagcccacctcacttctcttacggttcctatgtgcatggactagcctttccctccttacacgttttacctatttgtgtctttggatctaaagtgagtctcttacggatagcatatatttagaattttttttctattcatcttgccaatctctgtcttttgattggagagtttatttacattagagtagttactgattaggagagactgctgttattttgctatttgttttctttatgccttacagctttcttgtcactcatttgctgcattactgtcttttgtgctgaatttaatagaataattccattctaatttccttttgtgtctattcagtagctactttttgtagttaccatggggattacatttaacattctgaagataaaacactccaatttaaatttataccagcttaacttcagtaacatagagtaacttcctgtacagctccatccctacccccttttggttattttatgcatttgtctcttatgtagaaaataaaatgtgtagtaacaaactaaagttacaattattctagcttttagagtaatgtttttgttgtgtagtaaagttatgtttaaaaaattacaaaccgaataaacctcagagttacaaactaaagttacagtaatactagcttttatacttgcccatgcatttacttttactttatatagcttcaaattactgtctagcatcctttcctttcaacctgtttgactcctcttagcatttatttattccagttttaaatttaatgttgttaattgacaaatcataattttatacttttctggggtacaatgggatgttctgacacatgtatacaatgtgaaatgattaaatcaagctaattaacatatccataaccttgtttacatatcattttcataacgagacatttaaaatgtactcttagttattttgaaatatataatacattaatactgactggaatcactgtgctgtgcaataggcctcaaagcttattcctcctctctgaaacttgatatcctttgaccaacaccttcccatcctggcttctccccagtctctggtaagcatcattctactctctacttctatgagttcaacttttttagattccacatgtatgtgagaccatgtctttctgtgccggcttatttaatttagcataaagtcctctaggttcatttatgttgttgcaaatgaaagaatttacttcttttttaaggctgaatttcattgtgtatatacaccacattttttcttcattaatccattgatggacacttaagttgattccatatcctggctattgtgaataatgctgcaatgaacatgggaatatagatgtccctttgccatattgattttagttcctttggatatatacccagaagtgggattgctggatcatatggtagctctaatttagttttttgaggaccctccatactctttttcataatggctgtactaatttaatttacatccccaccagcaatgtacaaatgtttgcttttctctgcatcctcatcaacctttttattgttctttttgataaaagccatgctaacggatcttagtgttttaaattgcatttccctaatgattagtgatgctgagcattttcttatgtatctgttgccattttcatgtctttttttgagaaatgtttgttcaagtcttttgcctattctaaaaccaggttgctttcttgctaccgaattgtctggagttccttatatattttggatattaaccccttatcagttgtatggtttgcaaatattttctcccattctgtgtgctgtctcttcgctttgttaattgtttgctgtgcagttgctttttagtttgctcttttagcatttcttgcacagaagttctagtggtaatgaatttccttaacttttgtttattttggaaagtcataatttttccctcacttttgaaggagagttttgccagtataggattcttagctgacagttttttttttattctcccctttggtagttaattagactattagactatattagcccactgtgttttggcctacagagctgctgatgagaaatctgcttataatatcattgaggatcccttatatgtgacagattactcttactcctttcaagagtctctgtttctttttggatagattataatgtgtcttgctgtgcatctccttgtgttcatgctacttggagtctgttgagtttattgaatatgtatatttatgtctttcatcaaatttgggaagtttttagctattattttttcttttttttttttttttttttgagaccgagtctcgctctgtcacccaggctggagtgcagtggtgtgatcttggctcactgcaacctctgccttccaggttcaagcaattctcctgcctcagcctcccacgtagctggaactacaggcacatgccaccacgcctggctgatttttgtgtttttagtagagatggggtttcgccacgtttggccaggctggtagccattagtttttcaaataatctctttgcccctctacttttggcattcccacaatgtgtgtgttcgttctcttgatagtgtctgtttgcctcttttgacttttcttcagtcttttttttttttttatgttgccctatcatcacacttgttgattctttcttctgcctgctcaagtctttattcaaatccctgtagtgaattttccattttagttattgccctcaggagctccacagtttgtttttagtttcctttgagatttttccctcctcttttttttttttaagacagggtctcagtttgtcacccaggttggagtttggctgtgtgatcacggttcatgggctcactgcagcctcaaactcctgggctcaagcagtccccctgcttcagcttcctgagtagctggaactacttgcgctgctgtgcttggctaatttttaaattttttttgtagaagcagggtcttgctgtttcccaaactggtcttggtcttgatatcctggactcaagtgatccttctgcctcagcctcctaaaatacaaggattacaggtgtgagccactgcacccagcctcctttgaggttttctatctctttactcattttcctactttctttctacattgttttcttgcctttctctgtgtcttcttttagttctttgaacacctttaaggtagctttttaaaagtctttgtctattaggcccgtcttctgatctttctctgggaaggtttctgttggtttatttttttttctttcatataggccatactttcccatttctttgtatccctttttgttgttgaaaactggacatttaaatctgctaatgtgataactctggaaatcagattgtctcctttcctcaggatttgctgggtttttgtgtgtgcttgtttttctttttgtttttagagtcttgctttgtcacccaggctggagtgcagtggcatgatcatggctcactgtagccttgacctcctgggctcaaaggatcctccttcctgaggagctgggactgcaagtgtgcaccactatgcctgcctaatgttttattttttgtagagacagggtctcattatgttgcccaagcttgtctagaactcctaggctcaagcagtcctcccgctttggcctctcaaagtcttggaattacaagtttgagacactgcacccagccctttttattttttgattgttgtaggctatctcagatcttttctgagcctttgccttttcctggacatgcacagtgattttcttttgttttgttttttgtttgttttgttttgtttttttgagacggaatctcactctttcgcccaggctggagtgcagtggcgcgatctcggcccactgcaagctccgcctcccgggttcacgccattctcctgcctcagcctcctgagtagctgggactacaggcgcccgccaccgcgcccaactaattttgtgtatttttattagagacggggtttcaccgtgttagccaggatggtctcgatctcctgaccttgtgatcctggcctcccaaagtgctgggattacaggcgtgagccaccacgcccagccgcacagtgattttctaaattccccatttatatggttgcttctgaatgtcctagtcctttaatgtctggcttccaaaaagggagaaagagaaaaatgaagaaataaaaataaaaggccctggtcttttaaatcccctttagcctgactgcggggagcagtggcctctagctattgggagggaggtgaaacaatagctgcctgcttctgtgtctgtatctcagtgatcagaaagcgcaattagctgtcagagcatagatacctgatagttggaggacaggtcttattgcccgaaagctgtggaacacatgcgtgtctgcctggagattggggaatgggtagtcactgctgaactaagagctgaaattgactaaaagtaacagcagtttattttcaggccctttccctggaacttgcaagccttagaatgtgctccagagttccaaaatacttaaataagacagattatactagtacaattgttgtctaggtggagagaagattcttgttgcttcctactctgctttctccccagaatcctctaatgttttttaaaggtttcattagagttagaagagttctttttctccttaattttgaggaactcaagaatagtaagttcattataactcaaagaaaatccattggagaccttttatttagcttttatcttcagttagcaaacatttatagaaggaatttgtgtttcagatcttttttgcgccctaatgtgacaactaatgtgacaacttctggcttccagccagaagatattgggacttgaaattgggagatcgcttgctatggtttgaatgttctctccaaatctcatgttgaaatttgatccccatgttggaagtggggcctaatgggaggtgtttgggtcgtgggagtggatccctcataatatattactgccatccctcttgagtaagtgagttctcactatattagttcctgtgggagccagttgttaaaaagagcctgacacctccccattctctctcttgcttcatctctcgtcatgtgatctgtgtacatgctggcttctctttgccatctttcatgggtggaagcatactgaggttctcaccagatgaagatgcccaatcttgaactttctagccatgagaattttgagccaaataagccttttttctttatagattagcctcaggcattcctttgtagcaacacagacagactaatacgtaccttaaggaggcttcatcaagtagatcacattactactaaggggtagtagtagtgagaatggagatacatggattcatttgagtcctattgagaagataaaagggacatgatttggtctgtggggggttgacgtagtagcattaattaatccagacagctggatttatggtggtactttttcttgaattataggtcacagaagcacaaagtattgtagggaaaggtgtatgaagatgtgcctatgcaataatattgtagaagttgcaaagttcttttatacccaggatttttaagtaagaatgtacggagtgtactggttccctgtaactccagtaggtcttatggcttgcataggccaaaatgataatgggaggcatgataaactttaatagggctgtattagtctgctctcacgttgctataaataactacttgagactgggtaatttataaagaaaagaggtttaaaaggttcacagtttcctcaggctgtataggaagcatggccagagcagaaggaagagagtgaaggtgaaggtgccaaacacttttgcttttgtttttttttttttgagatggagtctcactccgtcatccaggctggagtgcagtggagccatcttggctcactgcaacctccacctcccaggttcaagcaattctcctgtctcagcctcccgagtagctgggattacaggtgtgcatcaccacgcctggctaacttttgtattattagtagagacagggtttcaccacgttggccatgctggtctcgaactcctgagcccgggtgatctgcccacctcggcctcctaaagtgctgggattacaggtgtgagccactgggcccggcctagccaaacacttttaaacaaccaggtctcatgagaattcatcatggaacaacagctatcacagaacaacaaggggggaaatctgtccccatgatccagtcacctcgcagtcacctccagtcacctggagattacaattcgacatgagatttgggtggatacacaaatccaaactgtatcaagggctaagtggtagagtcctaaaaccattttgtgattaaaaatgacataagctcatggaaggcatgagggggaattggaattaagtgcagcaattaatatgaaaaattctcaaatgttatgattagtcataagttaaatacgtctgatatttcaggttaacacaggttttatgtatgtgaactcactcaagagggatggcagtaatgtattcatgaggtatccactcccacaacccaaacacctcccattaggccccatttccaacatggggatcaaatttcaacatgagatttggagagaaccttcaagtaagcatattcaggttttatgaatatgcttactagaagagatgacacaatctaaaccttattaataatgtaaagcatggggaaattatagtcagtgttctctgtgttagtttgtgtatgttgttttggaaatatgtataacttggagtgacactgaaatataataattagattagaagggtaaggatcagaatgagggtttagtgtaatgaaaaacttagaaaataaaacagtttgtttagttcaaaaaattgaaattgtaattttgatactcaataaaagagacttttttatattatccagttcaattcccttattttgtagataaggaaatggagtttctgggaggttggtatgacaggccctgagtgatcactaacggcagagcagtggctacaacccaagtgtgtggctaggagggaaattaaatatattataagcatattttgcttataggggcagccaaacagggctgaaaactagggtaagataaacaagttgcctaaggtgaaatattgtacatttgtaatttatcaaatgtattcatatgtaatatgtaaacatagtataaaatgtggagcattggttcagtttatgtgagaacaatgtggcatgttctgtgtcaagcttgtccatcctatgggctgcatgcagcccaggacagctttaaatgtggcccaacacaaatttgtaaactttcttaaaacattatgagcttttttttttttttttgcttaatcagctatcgttagtgtattttatgtgtggcctgagacaattcttcttccagtatgatccagggaaaccaaaagattggacacctctgtccatgttaagcctcatagatctttctcaggcctggcctggttcctattctcattttttccttgaatcagatctcagagactatattttactttgcatctttaaagttgttttaaccttcacaatcctttgggggtttttctccagcttttgaaaaattggagaatctagaccatcttcctagtgccctccaccttatagcccatgtaaccaaatatgaaagcaatttagagataatagtaaaagggaaataaaggatagttcatatcttacacttttcctgtcatgcctctggtttctagtttgtgactcccattttacttttgagggtcaagttacctaggtcagttctctctccttaggtaaaggtcacgtttctttatttataacagttctttcccacagcacttacgagttagaggtggtttaggttgagtaaaatctctgcttccatgtctcaggaagataattcccagaaccttcgcaatggatgacaaatacatcagtaagctctcaccaaatattagtgcttccctttttggcatcaccctttgtgaggagaataagaccagaatccatagtctctatcttacaaccagtgggtgtaaatttcttgtgttgcttctctggatctgtcctgttttatacctgacacctggcctgtccccaggatcattattctttttgttctttacacccttagagttcaaggcaggccgtttgtttttatattacatttaaaaataaattgtttatgtggagcattctgggagcttagagtttgtaaagtgaaaagatgggtggttttattgatccagcaagagttggctaaatgtatagctaggtttcttctgatattctttatagatacatatctaaataatatatacatattatctcttagttcatttctattaagataaatgaagatacagtcagccctccacatctctgggttctgcatccacagattcaaccaaccacaggtaaaaaatattctggaaaaaaaaatacactaattaaaatatacaaacaaaaaacccaatacagtgaaacaactattcacattttattatattaggtattacaagtaatctagagatgacttaacgtatacaggaggttgtgcataggttatgtacaagtactaggccattttcatataagagacttgagcatctctggattttggtattggggaggaggaaactggcactgatttcccttagattaaccttatccaacctgtggcctgcgggctgcatgcagcccaggatggctttgaatgcagcccaacacaaattcacaaacgttcttaaaacatgatgagattttttggtgattattttaagctcatcagctatcgttagtttagtgtattttatgtgtggcccaagacaattcttccattgtggcccaggaaagccaaaagattggacactcctgccttagatactgagggccaactgtattcattcatgtaacctttcttggcctcattgtcttgataaagtgatatatattcagtgttttcactaatgaccgtgtaaccatgtgagtattgttcattactggctcacctcctatgattaaatttattttcttgtttaacttagtttttcttgaaatttataaagttctcattaaataaatgatggttcgtccgtacaatggactactcagcactaaaaaggagtgaactactgatttacacaacacaaatgaaacaaatgcattatgttaactggaaaagccagactcagcgtctgcataaaacattctggaaaaggcaaaactacatagggacagaaaatagatcaatagttgtcacaaattaatggttggggatgggtttgaatacaaagcataaagcaatttttttttttcttgagggggagtgatagaactgttcttattttcttatttagattgtggcagtgattacataactcttaaatgtttgtcaaattttattcacaacaaacagtgaaaatcttactgtatgtaaaataaacagcaaaaaaatatatggccctatttttatccatctattatgtatcattcctcaatatatattgacagttttgtagatcttacaaatactgacaatgtaattgaatttcatgtagcctctggaatctctagtgaaaagggaaattaacatcctagtattatgaaaatagttttggctccgtagaccccttaagagatccactttagtaaccctttcttagagaactgctaatgtaaatacatgaataatgctagacaaaacacctgaaaacatgttctttcccaaactacttttataaattctataggtatagctatatattaatgacacaaagtttgtcaaatcatttaatcagtcatattgtgtataatttgtaaactgaggaagggtactgttggctgtgtatataggtcatgataaatatgaccttttttggcaagtcagtagttataccctaaggaaaatgtaaggaaccagctagcaataaaataaaattctaaagggaaatctcttgttcagttttagattctgttgtactttaacacataacttgacaatttcctgcttctgataagaatcagctaagtaacaatacccaagtgactaagtccggaagtttggttggggtacagatctcacagtaaacaatgaagggggagaaagtccccaattaactaacttggatatgctgtaagtaatgcaaaaagacaaggcaattcataagatgattttattctcttcagctttttaaaccctagtatctcatcaagtaattttaattggtaaatactcttactaatgaaacaactaatgaaacagatcccaccactgggaaaacaaaaaattacaggctagtcagaaataaaggctacttaaaaattaagtttttcttcttttttttttaaaaatagtgtaggtcaaataaaattccatctaattctgtccacttttggaaatatcactttgaaatcatccccaatatgagaaggcacaaaataatgacaaaggcaaaagtgctgtgcatagcacaattcattcacgtattcactcaacaaatgtttattgagtagttagtggagactaggagacagagcaaaggaatgagaataaagaaagataagcaaaaagtttgctcttaaaaaaacctcaactataattctgtttctttgacaaacttataaatatcttaggtatataagacattactgtctatatgattattttgttaggcattacagaatattacttattacccctctgaactataataaactgatccaagatcagtatcatcatcctataatctgaagattattacattttatctaaagaaagaagccattatgtgactacaaacgtaagagcaataatcttgctaaattatgagcaattagatataaaccaccaattatgaaaacgtgtaacataatgaatttattgtcataattaacacagcaaacatgtaagtacattaattgatctaagtcttatatactatatgggaattaaacataaatggccttatagttgattgtaatcatatttttaaatttctaaaaaattgtggtaaaaacaaatgttatgaactgaattttgtcccttcaaaaattcacacattgaagtcctaacccccagtagttcataatgtgactatatttggatatagtgtctttaaagaggtaactgaggtaaaatgaggtcgttaagatggaccttaatcccttatgactcctcttcctggttcacctggctagaaatattggcattaagtacattcacattgttgtacaaccatctatttccagaataatcttcatcttgcaaaacttaaactctgtacccattaaacagtaactcccctgtatatagatagccaaactaccagtcatgtatgagagaacaaaatcactttcagatatgcattctaaaaaatttaattccaatatatttttaactcaggaaacaactagaggacgtgctccagcaaaatgaagggtaaagcaagaaaaagtaagacataggatctaggaagcggaggaactgtgggcagtagttccaatattggtttcattttctaaacttttgctgtggtatttgcatctttgctttatgcagggatgtgtggggcttgagtggtgtttatattgtacttcatttcttagtgcctttgtgatgcttctttggatattctatgcatgtccaatttgggagagcccagtacttgtgttggtccataactagaattatagatgtcgaagataaactggacactagttaaaatggtaaggacagattttattcagtaactattgcagtagggaagagtgtccagtgtgaactcaactcacttttgccaaaacaaaaggggaagagacttttttaaaggttgagtatgctaagggaaagacactgctaagggaaagaaagatggtttttttgttttgttttgagacggagtctgtctctgtcaccaggctggagtgcagtggcgtgatctcagctcactgcagtctccgcctcccagactcaagcaattcccctgcctcagtctcctgagtagctgggactacaggcacgcaccaccacgcccagctaattttattgtattttagtagagacggggtttcaccatgttggccaggatggtcttagtttcctgacctcgtgatctgcctgcctcggcctcccaaagtgctgggattacaggcgtgagccaccgcgcccggccactgagtggtttttaagggcaataggtggtccatgtgagtaggccatctgggtttgttattggcatttatctggaagagaaacaaacttattatttatgacaggaggtggtggtacaaattaggcccaccaatgtttggcccttaccctctcgccagggactgggaacaaaagtgaaagttatctttttgattgtttgcattccaaagaggtagttctcaggtccttgggaagatagttcttgatggtagaagatttaagtcacaaagggacagagaaaggatttataatttcaagctttctaaggtaactgctctaaatgggggttcaggtgaccatctgcctatcaccaggttttggctggaacaaacggtaaattctggccatgtggagccttttcaggtaaggaacttgatggagttggagtcattattctaggatatggggaaaagatatgaacaagcactttacacagaaaaacaaatgtaaatgtcccttaaatatgggaaaagaaatcactgtaataagagaaatacaaattacaactctgaaatactatttctcccctattagattggcaaaaatccaaaagattgacaacatagtttgttggcaaggctgtggggaaataatcactgatatattgttaggagtttttaaaaatagtttatgaatacagaatttagcagtatctcacaaaattatacaaactttagctgtaactcaacattcttctatgattctaacccaaaggtacactaacagaaaatcaaaatgacacatgtatgaggctgttcattgcagcactatttaatcccagaaaattacaaacaacccattgaccatcagtaaggtctagttgaagaaagtgctacttacataatgatgacgcactctgcaattgttagaagtagtagatgtattagtaaaggaagtctcatgtgctgctgtggaatgatcttaaggatagattgttaaactgaaaatgaaaagattcaggcaatatagtctatgcctatgtgtatgtgtgtgtgtgtgtgcgcgcctgtgtgcatgtgtgtgtgtatgttttgttgtgggggtagataaaaattagaattttcaattttcttatatatttttcttgaatactttccttaaattatttaaaaaaaaatagaaacataaaccaaaacaaataaatagctgtccaggccgggcgcggtggctcacgcctgtaatcccagcactttgggaggccgaggcaggcggatcacgaggtcaggagatcgaaaccatcctggctaacacagtgaaaccccgtctccactaaaaatacaaaaaaattagccgggcatggtggcgggcacctgtagtcccggctactcggaggctgaggcaggagaatgccatgaacctgggaggcggaggttgcagtgagccagggtcgctccactgcactccagcctgggtgacagtgcagtgcgagactccgtctcaaataaataaataaataaataaataaataaataaatggctgtccagtggggtggatgggagaggggagagaaaagagaaggtatggaagaagacctctctaaatgttttaaatatgtttgatatttaagcatatttaatgtttaaacattcatataaacaatattaaacataatgttcaaacatgtttgatatttaaacatctaccttgcttgatagtttagcttttagaaccatccaaatgttttacataattatgaaacaattacattttaaaaagggaaaataaagtgatcttcaaaaaatgaaaacaagtgagcctaactctacgtccagttggtgtcataaccacacagaagtatatattctaccttttctgtaaggttttatgttttagggtaatagaacaataagcaaaattttcctttgagaataatcacagtttctgaaagcaggtagagctagcacatcatcattattgaaatagttgatctaggcagtgatcatcagtggcaggtaaaaccattgggtagaggtttgatgggggaactttataataatggataaatcagttcagtgctacaaatctaccattcagtcttaacatcacagaaaatggttcaggcagacataatgtgcctcctaataaatggcaataacaagtacacaagaatacttaacgaattattcttgcaacaatgacaaaacaacctagaaaaagtaaagcctctagaaataattaccagtttataggagataggggggatagaggaacaccatgaaaatatacactagccaaattcacgatgtgggaaatgctacaggacaagtgaagccagcttcttaaataaatgacatagagtggggaaagagaacagtgtcagagacttaaaacatgttagcttaagtgcaatatatcgacttagtttggatcccagttcacaccaactgtaagaatgtttaaaaaaatacacttagcaaaaattgaatattagcattagatgaaataagtgttgcaggagttcttaataaaggaacaccttttcaaaatgagcttttgaaaatatactgataatttaattttagtataattgacttgtttgcaatcttatatatttttatgcatcagaaacattgtgagtagaggttctatgtttcaccacactgccattaggcaggaggaggggaggtccatggcttaacccatttgtgcctagtgttccattattggaacgctaagcttgtgagagttatttatatcatgctcaaggtcgtcaccaaggtctgatttttcacacaagaaattgcaacctccggcatatatgggttaaaaaggggaaaaggtcaggagcccttgatttgttcatttttgaggggtatgggtttttaatctgttagtgcttaatgaaatcatgggattccagttcccccaccaaaaattagggggatagctgaaccacaaggcataatattgataaaattgggtgataggtataggattcattatactattctcttctgtaaatgttgaaaagtgccataattataaaacttaaaagcattatataaatttttagttattataccagtaatgtagtagaatgctatttttgtacattctggggaggactagataatattggtaatacttttgtcaccctgataggtaaagtgtggtatttcagtttagttttcatttctttaattataaagatattcaggatcttttgaatactttttgactatttgtgttttctctttcagtttttattttaattaaactttttattttgagatcattatagatccacatgcaattctgagaaactttagaacttattgcgagatccagtgtatgctttcctccagtggcaatacatctggcagaagtatagtacaatatcacaataatattacaaaatttcttcatattgcccttttatagtcatacttacttccctcctgttcctgctgccccgttaaccctggcaactactaatctgtttctaatttccatattttgtcattttgagagtgttatataaatggagtcatatagttaacctttgagattggcttttttcactgagcagttataattccctggagattcatccaggtcgttttgtgcatcaattgttctttttggtatgaacgtaccagtttgtttaattatttgcctgttgaaggacatctgggtggtttccggtttttgactgttagaaataaagttgctgttaacattcatgtaaaatgtgaacataaattttcatttctctgggataaatacccaggggtgcagttgctagcttgtatggtagttgcatgtttagttttatgagaaactgtcagacaattttgcggagtatctgtaccattttacattctcatcagcagtatacgtgtgatccaatttcaacttacccttgtcagcatttggtattaccactcttagccattctgacaagcgtatgtagtgacatctcagtgtggttttaatttgcatttctttaatagctaatgatgaataccttttcatctgcttatttgccatctgtaaatcttcagtgaatgcctcttcatgtttttttgctcattttctagttggatttgtttttctaatgtttctttaacttttctaactgcttaagatagatactcagttcattaatttatttttagctctttttaaaattttattttaaattttattattattattattattattttttgatacagagtctcgctctgcggcccaggctggagtgcagtggcgcgatctcggctcactgcaagccccgcctcccgggttcaagccattctcctgcctcagcgtcccaagtagctgggactacaggcacccgccaccacgcctgtctaatttttttgtatttttagtagagacagggttttaccgtgttagccaggatggtctcgatctcctgaacttgtgattcacccgcctcagcctcctgaagtgctgggattacaggcatgagccaccgcgcccggccactctttttgttttttaatgttactatttaaaactaaaaatctgtctatatacactcctcttgctacatcccacagagttcgatgtatagtttttaaaattatttacttctaagtattttcaaaattcaatatgatttcttcttagattcattagtttttagaagtttccaaacgtggtatttcaaaagttatctttttgttatggttgttggagaatatggttgtaggatatcagttacgtgaacattgagacattctttatggcctggcatttgattgctttttgtatgtgtttcatttgttttctatttggaagcaatattctgtatatgtctattaaatcagacttgctggttgtgatatgagttcttctctagccttaataatgtttttatttatttatttatttttttgagaccaagtctggctgtgtcacccaggcctggagtgcagtggcacgatcttggctaactgcaacctccgcctcccaggttcaagggattctcctgcctcagcctcctgagtagctgggattccaagtgtgcgccaccatacctagctaatttttgtatttttagtagagatggggtttcaccatgttggccaggctggtcttgcattcctgacctcaggtgatccaccagcctcggcctcccgaagtgctgggattacaggtgtgtgccaccaggcctggccgtttttatttctttgttttgttactctgataatatgttaaaaattgtcctctgtggtaatgggtttgtcaagatctccttgtggttctgtcaacatattttgaaactatcttgttactaggtacatagaagtttagatattgtaattgagtagaacatttttcattgggtagtgaactttattgctagtaatggtttttgccctttaagttttgtttgatactaatagagcaacaccagtctctttattgattggttgattgattgattgagacagattctccctctgtcgccaggctggagtgcagtggtgcgatatcggctcactgcaaccttcgcctcccaggttcaagctattcccatgcctcagcctcctgagtagctgggactacgggtgtgcaccatcacgcccagctaatttttgtattttagtacagatggggtttcaccatgttggccaagctggtctcgaactcaacctcaagtgatctgcctgccttggcctcccaaagtgctgggattacaggcatgagccactgcgcacggccatacagtcacagtctctttaaattactatttgcctcatgtatttttttccatattttttacttttcatctttatgtctttagatttttaggtgtgtctcttttgaaaagcatgtgaactaatactacctcaaccttacataaaaatattttccatgtgtttacagtgctgaagctgctgaaagatggcagaagaagtggtggtagtagccaaatttgattatgtggcccaacaagaacaagagttggacatcaagaagaatgagagattatggcttctggatgattctaagtcctggtggcgagttcgaaattccatgaataaaacaggttttgtgccttctaactatgtggaaaggaaaaacagtgctcggaaagcatctattgtgaaaaacctaaaggataccttaggtaagatattttttaaaagaaaagcaactttgttttaaatgaaacctgcaacttagttctttgtacataattctggcagcagtgtgcataattgacttgaaaaggcaagggctaggtaagtttgagtcatagcaggtggtcaacccagaagaccagtgaaggtcataagtgttaacgtgcagtttctgtaaatctaggcccatgctccaagtcaaggcagagtgataccaatgagtagaactaactctcaccttctagcaggggctttttgaaccatgaatcactgttggagtttagacttataggcagaattgcctctttggcaccaaggcaacttatgtacatggcacataatgaattttaacatctaatgaccttatgttttgaacttcacttaaaaccctccattttgtttttctatttgataagagaactgtggatcattactgtacattagcacctacagagctcttttctattttgtttctctttttccctttatttctccaaagtttttgttttttatttttactggccctccattagggcctgagacagtggagcccacttcacactggacttggctaagctgataggaaggaaatatgcatgggcaaggaatggcctcttctttaaaaaaaaaaaaaaaaaaaaaaaattaaactctccttagctgacaggaaggaattgggagggacagaatttcatttttggtgttcaggcaaacatgctatttgtgtaattgttctttgtctaggtgtagaagaaaagtacaatttctccttgtgcagacagtttgggagcaatatagcatgactgacaaatatgaaataccgttgactcactactttacattagtttttatttatttattttttatggttttgtagagatggagtcttgctctgttgtccaggccaaacttgaactcctgggctcaagcaaccctcccacctcagcttcctgagtagctgggactacagatgcttactaccatacccagcttagtttttattcttattcaacattattgttattctagaatgttcttctaattatcaataaaatacaaatatttaatgtttttaaccattgtaaaactgcaaaaactaaaatatagtacaatttggagtaagatataaagtagtggattatcagtttctgagataaaaatatttccagtgttctaaaggtaattaagtagatataatgtgatgtttaactgctgaggtaactttttaaatacttttgggttttgtgattaagaccattatttttagtttttcaatggaagacaaatcagaaagagattttccttcagtagcagaagagaccagggttagaatcagcaatactggttttgtaaatactggaatttatttaaagcatgatgattagagatattgggagaaattaaggtaatttctgtcaagaaagtatgcctcatagtgatacgtgcacagggtactaagacatacccagttagacttttttgttccattttaagaggacactggtatcttgggattagagtgaatgtgacagtaattaacaaaatatagtgaaaaaactattatcatagagcaaaggggggaagtagtccagtattaggtattactgtatgtaaatctaaaatcccatttaaatataatttttatttgttaatactccaggatgcattccgtactacagtattctgatgttattgagacagttttatcaagattttatctctatttaagtcttaggaaatctctgttaactttattactgtattacagttattgctacctttattccagggtgcttggaaacattgttttgagttagtgatctgtagttaacctgtaaagagatataagtccagcttttacattagataaacttttcccttttctcataatttctgtatccctttttggtaacttaaatatccggtgtaattaatggatttgtttcgcaatggttgtgctggtggagacattgtttgaaagttgagaaggaaaaggggaaaacaaaaggattaattcatgaatatattttaactataaaaaatatatatgctttaaagcatcttccaaaataagtctgaataataaggtcatatttttggccatgattatttacttgttatacaggctgtgttataatttagaggaaaaaaaagttttggaaagagaagcctcagaaaaattttctattgcctgggtgtgggccaggtcacatggattgggtgtgggaagtttcagtgttgcagaacagacgaggaagctcactgagaattatcctgagctgtgttaacaaactgacagaacacagaatttttactcaaaatggattggttaaacgtctttaaagattttttcagtaagttaatctgtttattaaatccactgttttcttgaagttgtgaattagattttctgcttttgtaaatttaaaggaaaactcttatttggtgggtttatgtaagctactacattatgtgtatgtaatataaaccaaatgattggtgatatatccaaaaattgtagtttcgacttggtaagtaaaataattttaaaatgttttagcatgaatgtttaacaagtagagaaaggatataaatggtttgagtttgatgcagttctaattcagtaattttcaacttagcacagacatttgaagtgaattaaataaattgtaaacattaaaaacattagataaaaaggattaggtgaacaaatttcttcatcctcaactttggaattaacttttttttttttaactactttttgcttactttttttttagcggaacagtgtaaagataatctttaataaaaacactagtaaagagaatatttttatttaattaatgtagtattgctagaaattgatgttttgattaatgtgagatttgatattttgatatgagttatgagaacagctatacaaccaagaggaaaatagtgaattcttgactgttattgagtttgggtcatgaagtaaaactaataataatttataagagcctaattctgctgattctgctagtggcctccttatgatcttatagtgaacttaatttgatctccttgaacatttgcttggtgtttctagaaaaatgaacagaggaattattatagaagtctcttatgcacaacaagcctaaggaaacaaagagtaacctgacaagagattccagagaaaagggcaaaagagaaaaggaataagcactttgttgaaaaagaatgttgtaattgtaatgtgaagactcatttgttagctttagtgactccctctggaatatgtctcttctgtttactttttggggagttactaaaatttcagatctttgcatttttcattttttgggtaagttttacctttgaagaacttacttatttgctcattcatttgtttatcaacacattcttattgagagcctactccaagccaggcagaaatcatagggtgaaaaactaatactaactctagcaaatcttacattctggtggagaggtatatgatgattgttattaataatacagtggatttcatatctagatttagtcataagtgatgttgaccataaagcaaccagaaatgacataaaaagaatccattgtggctaggcgtggcagctcaagcctgtaatctcagcactttgggaggccgaagtgggtggatcacttgaggtcaggagtttgagaccagcctggtcaacatggtgaaacactgtctctactaaaaatgcaaacattagctgggcgtggtggcgggtgcctgtaatcccagctacttgggaagctgaggcaggagaatcacttgaaaccagaggtagaggctgcagtgagccaagattgtgccactgcatgccagcctgggcaacagagcgagactccatctcaaaaaaaaaaaaaaaaaaagaatccattgtatcattgatacagtgattcaatatatatcatcaatacagtggtaaaattattctttttgctgagtcttaggaagttgatagttaatgcatttgcagactgggagtcaggatttgaaatttgtaaccaaaatgtttctttgctcaatccctgcagcaaccccagatttttatttattttgccaggcagtttgtcagagtagagacaggctattcatctacttcctacctgaatgggcttataaagtagaagaaacagagtattatgtgctttttgtgtggcagccagagtatctttgaaaacaaaaattgtacaatgttttaaataaaacaataaaaaataatttatttcatgtagatgaagtgaacagatggacatataaaaatttaaataaaaacctgtaatggaaggaataccatatatttatatgtggtatttcttagttctgttcccagacatatcacttacaagccatgtggcctgcaaaatataactgaacttctctgattttctgttccttgtaaaagacagagttgggcaagactaaatgatcctggaaagtcccttctaactctaaaagtcttacatcctggtaaacaactaagcagtcttaggtgtgtcataggaattgagcgaaagcaatgagtgagaaattggttttgaagaagtagaaacatgggaacagaattgtagttgactaaggaattagaagaaacagaaaaactttctttggccccattctcaacacttactcagtgatacaggtgaaggaaaaacaacatgcttaaactaaagaatactgaaatcactaataagtacactgggttcagaaatatatttggaaactaaaatcaagatagaaataaacaagatgaataggaacagacagtattgtaaaactctacattaaaattttaaaaggaattgtatagattggtgagaacctagcctggcagcagcttacatgagtaaaaaacttagtaagagctgctgtggtaatgtaggtactaaaactctcaacacagtccatggtgacattgattcgagtctgagaggtgcttaggtggaggtatgctcccttatgtgtgtgttggccaaataaaacatgatgtaattaatccacttttgatagatattctttaacaatggtattgagaaacttggatgcttccaaatgctggcatccagtatatcaaggatttgcaaaccaggtcacataaggaatagttatgggtacaaagacttgcctcagggagcacagctgtcatatgaagaaggaatgttcacagtgcttaaccaggttcttaagaattcttgtggagtttataatgcattgttctggttaagaaacagtgctataggaaaagagaagtaaagaccagtgggtggtagtgagggaaagatcagaaattatctttacactttttttttttaatttaagcaaagctaacaataaaaaactgcctcagaatggtacacttcctcagtgcttagatctgagcagtttccttccaactacagccaggtccagctatataatgcaagaataaagatttaagtaatctttttttttttcttgagacagtcttgctctgccacccaggctggagtgcactggtgccatctcagctcactgccacttctgtctctcaagttcaaacgattctcgtccctcagcctcccaagcagctgggactacaggtgcatgccaccacacctggctaattttttttgtatttttagtagagatggggtttccccatgttggccaggcatgtctcgaactcctggcctcaagttatctgcctgcctcagcctcccaaagtgctgggattacatgcctgagccaccttgcccggccaagtttaagtaattttgaaaattaaacaccataagcactagaaggtaggaaaatagtaaccaccattgatggagttcctgctatgtactgtaagtgctttacacatagacttctaaaaattttttacaagcattttatgaatttatttttttacacaccaccattgtacaaacaaggatactggaggtttttttttttaacttttagggttgggggtacatgtgaaggtttgttacataggtaaatacatgtcatgggggtttgctgttcatattatttctttctttcttttttctgagaccaagtctcactctgttgcccaggttggagtgcagtggtgtgatctcggctcactgcaacctctgccttccaggttcaagtgattctcctgcctcagcctcccgagtagctgggattacaggtgcctgccaccacgcctggctaatttttgtgtttttagtagagatggggtttcaccatgttggccaggctggtctcgaactcccaacctcatgtgatccatccgcctcagtctcccaaagtgctgggattacaggtgtgcaccaccgcgcctgtcctgttgtacatattatttcatcacccaggtattaagcccagtatccaatcattatcttttctcctactctcctttgcccacccttccccttcaagggggaagcatttggttttctgttcctgtgttagaaataaaaaagattaaataacttgaccaagatcacacaaccagtagcggaactaaaatttaaacttgtatctcctattaaagttctcatagtagatattttattactaaagagtagagaattggagtcggttaagcaatgggttagaagggtttgatgcaaaaaggactagtcaaggttaagaagattgtggtgaactgtgaggtcaggaagtgctatgacctgagtgtttgtgtcccccaaaactccgcatgatcttggctcactgcaacctccgcctcctgggttcaaatgattctcatgccacagccacccaagtagctggaattacaggtgtgcgccaccatgactggctaatttttgtatttttagtactgacagggtttcgcatgttggccaggctggtcttgaactcctggcctcaggtgatctgcctgcctcggcctcccaaaatgctgggattacagtgtgagcccccgtgctgggccattctttttttgacaatgtgtaattagtcttagacataatgtttttaaatataagcttccagagagaatcattctaggttttactgatcttttgcatttcttttaccatacaaaactgtgcaaattctgaattttcaaaaatatcatttgaaacttagtctgtattttcaggtttaactttttttttttgtatgtgcctcatatcattattcacttttactcaatttgacatttattgagaatctgctatgtgaaacagccactgttggcttttgagcagtgatgtcatgtgattgcagctttatttataggaagatcagactggttgatatggatgatgggtcgactgagggagaaactgaattaataaggaaactagtttagtggggtcacgaaacctctggtacaacataataggcctgaagaagagtgaccatagtgagaagggaaagtgttggcaataaggagataggattgtgaggatttgatgtaagactcttaaaaatttttttatgaggtaaaatttgtataacataaaattaaccattttaaagtatgtaattcagtagtattgagtacattaacagtgttgtgcagccatcacttctgattccaaaatgtttccatcaccccaaaaatagtcactctcaatcagtccctggcaattactaatctgctttctgtctctatggatttacctattctggataatttatataaatggaatcatacagtatgtgaccttttgtgtctggcttctttcatttagtataatatcttcaagttttgtccatgttgtagcatatatcagtaattcatcccttttatgtctaaataacttttttttttttttttttctgagacagagtctcgccctgtcacacaggctggagtgcagtgacgtgatctcagctcactgcaacctctgcctcttgggttcaagtgattctcctgcctcagcctcccaagtagctgggattacaggcacatgccaccacgcctggctaatttgtgtatttttagtagagatggggtttcaccatgttggccaggctggtcacgaactccttacctcaagtcatctgcccgcctcggcctcccaaagtgctgggattacagacgtgagccactgtgcccggctggctgaataactattatatgtatatatcacattttgtttatccactcatctgttcatagatggacatttgaattgtttccatattttggttattgtgaacagcgttgtgataaacattcatgtacagttattgtttgaatatctattttcagttaagtgtatacctaaaagtggaattgctggatcgtatggtaattctttgctttttgagaaaccatctgtttttcacatggtggcaccattttacattccaaccagtattgtaagggggattccagtttctccatatccttgccaacacctattttctttctttctttgcttatatccattgtagttggtgtgaggtagggtcattgtggttttgatttacatttctctaatgactaatgatattgaggatcttttcatgtgcctgttggccattcgtataccgtagttggaacaatctttattcaagtcctttgcccatttttgaagtagttgtttttgttgttgggttctaagagttgtttatatgttctggatactagacccttatcagaattatgatttgcaaatattctcttctaattctgtaggttgtcttttcacttcttgatagtgtgttatacacaaatgttttcaattttaatgaagtataatggatcttgtttttttggttgcttatgcttttagtgtcagtatctaagaatccattgctaaatccaaggtcacagatatttgctcctatgttttcttctaagagttttatagttttagctctgacatttggtcatttcgagttaatttttatatatgatgtgaagttggagtccagtttcattcttttgtttatagatatccatttgttccagtaccctttgttgaagaaactattctttcttcccattgagtgatcttggcaccattgatgaaaatcaattgaccatagatccatgggtttattttaggactctcgattctatttcattgctgtatatgtctgtccttattccaataccacactgttttgattactgtggctttgtagtaagttttgaaatcagaaagggagagtcctcccacttgattttcctttttcaagattgttttggttgcttagggtccaccttgcagttctgtgtgaatattagaatcagccttttcatttctgtggaaaaaacaaaatggttgaactttagtaagaattgcattgaatctgtggattgttttggatactgttgccatcttacacagaatatctttccgtttatttaagtcttctttaatttctttcagcggtgttttgcagtgtttagtatatgagtctgatacttggttaaaattattcctatgtatcttattcttcttaatgctgttataaatggattattttcttaattttgtctttgaattgttcattgttaacgtatagaaatacaactgattttgtgtgttgatcttgcagctttgctgaatttttttattctcactctgtgtgagtgtgtgggtgtgtgtgtattctttaggattttctatttataagatcatgtcatctgtggatactttttcccctccctaattgctttgactagcacttccaatacaatgttaaataaaagtggtggaaggagagcatccttgttcttgtcttgttcctgttcttacggtggaaaactttgtctttcaccattgagtgtgatgtcagctccacagttttttgcagatgccctttattatattgaggaaattcccttctaatcctagtttgctgagcattgttatcatgaaacggttttggattttgtccaatactttttctgcatcaattgagatagtcatttgttttttcccctttgttttactaatatgaggtgtcttatattgattttcatatgttgaaccacccttgcataaatcccacttactcatatacagtccttttaatatgcttgctggatttggttttcctagtacaaatgatccttatttttcacagattctgtatttgtgaattcacttattggctaaaatttatttataagcccaaagttgataattgcagtgttttgtggacatgtgcagtgtggcaaaaatgtgagtcatctgatgtgcacattcccagttgaggcaatgttcttccttcttatttcagctttcatactataaaccagtgtcctttgtgcagtctatttagtgccacattttttgcatttttgtgcttgttgatgattttgctgtttaaaatggcccccaagcatagtgatgaagtgttgcctagagttcataaacacaagaaagctgtgaatttgcttatggaaaaaatgtgtgttagataagcttcatttaggcatgagttatagtgatgttgtgaattctatgttaatcacaatttatattaaagtgtctttaaagagaaacacacataaaacagggttgtgtagtgattggttaacaaaaacatgattggagcctaaccctgtttttcccttaggagctgtggttcagtatttgctaattcagtatttatggtaactttatagaacataactactgcaaacaatgaaaatcaactgaattttgttgaggatttttgcatctatatttctaagtgatattagccagttgtcttgtgatagctttggtattctgggtaatattggcctcatagaatgagttaataagtattctctccttttttctttttagagatgttttagaagcattgatgttaattcctctttaaacgtttagtaaaatccaccagtgaaaccatctggtccagagcacatttttgatgcgagatgttttgttactgattgaatcttttacttgttatatgtctgttcagattttctattttttcctgagtcagctttggtagtttgtgtgtttcttggaattgatgtttttcttctaggttttttaatttattggcatacagttgttcatagtatttgtttataatcctttttaaaatatctgtaaggtctgtagaaatgttatttctgattttatttatttgagtgtctctcttgttggtctagctaaagagttttcaattttactgatattttcaaataaccacattttggttttgttgatttcctctgtttttctgttctcttttgtgtatatctctgctctgatttttattatttccttctttttgctttgagtttagtttttcttttccagttccttaagattaaatttaagttggtaattcgagatctttcttcttttttatgcaagcttttagggctataaatttccctctgagcattgcctttgctgcctcccataggtttttgtatgttgtgttttcattttcatttgtctcacagtagtgtctaatcttgtgaaatttcttggtgacctattggtttaagagagtgttagttgccacacacttgttaattttccagttttcctttctgttattgatttctaggttcattccattgtggtcagaaaagatactttgtatgacttcaatctcaaatttattgaggcctttttttttttttttttttttttaaaatagagacagggtctctctttgttacctaggctggagtgcagtagcatgatcatggctcactgtagcctttgaactcctgggttcaagcaatcctcccaactcagcctcctgagtagctggaactacaggaatgcaccaccacacctggctaattattttattttactttttatttttgtagagacaaggtctcaccatcttgcccaggctgccgtcagactcctgggctcaagtgatcccccgaccttggactcccaaagtgttggaattacaggcttgagccactgtgcctggcctattgagccttgttttgtgtcctaatatatggtctatcttgcagaatattccatgtatacttgagaaaaatgtgtgatatattctgcttttgtttgatgggatattctctatatgtctattaggtctagttggtttatagtactgctcaaggcctctatttccttaatgatttttcatttagttctgtcccttacagaaagtggggtattgatgtctccaagtatattgaactatttttctccctcaattctgtcattttttgctttatatgccttgaggctctcttgttaggtatgcatatatttgtaactgttacacttcttgatggactgattcttttatcaatatatgctgtcctttgtctttaagtctgtgttgtgtgatatatatttatttatttttagacagtctcgctctgttgcccaggctggagtgcagtggcgtgacctcggctcactgcaacctccgcctcccaggttcaagcgattcttctgtctcagcctcctgagtagctgggattacaggcacctgacatcatgcctaactaatttttgtatttttggtagagacggagtttcaccatgttggccaggctagtcttgaactcctgagctcaagtgatccacccgcctcggcttcctaaagtgcagggattacaggcatgagacaccgcgccgggcctatgctgtgtgatatttatatagccaccccactctctcagttatcctttacatgggatatcttcttccatcctttcattttcaaacctatttgcatctttgtttggatctaaagtgagtgtcttgcagataacagttgcatcatgttatttttaatctatttacatttaaagttatatctgataaggaaggatttctgctattttgctgttttcatttacttttttttctttcaattcttctattactgtcttcttttgtgatttctttttcttttttttttttttttggagggtgggggtcagggtctcactctgtcacccaggctggagtgcagtggtggaatctctgctcactgcaacctctgcctcccaggttcaagcgacacttatatgtcagcctctcgagtagctgggactacaggtgcatgccacgatgcctggctaattttttggtatttttttggtagagacgaggtctcagcatgttggccaggctgatcttgaacttctgacctcaagtgatccgcccaccttggcctcccaaagtgctgggattacaggtgtgagcctctgtgactggactattttctctaatatattgttttattacccttcttgtttctctttctgtatttttgtttttccttagtggttaccctggggattaacatcttaggtttttaacaatcatgtttgaattaataccaacttagtttcagtactatgcataactctgctcctttgcagctccatctttgtatattacatctttacacattaaaatatatgcccattaacctagaattgaaatttttgttttatgcatttgtattttaaattgtgtaggaaagaaaaggagaatttacaaaaaaaaactgcaatactactgacttttatatttacttatgtagctacctttaccattgttctttatttcttcatatgacttcaaattactgtccagtgttttttcattttagcctggaggattctctttagcacttcttttttgagacagtcttgctctgtctcccaggctggagtacagtggtgcggtcttggctcactacaacctccacctcccgggttcaagcaattctcctgcctcagcttcccgagtagctgggactacaagcgtgtgccaccacgcccggctaattttttgtatttttagtagagacggggtttcaccatgttggccaggctggtttcgatctcctgacctcgtgatccacccaccgctgtctcccaaagtgctgggattacaggtgtgagcccctgtgcccagcctctctttagcatttcttagcacaggtctggtagtgatgaattcctttagtttttgtttatctgggaatgtcttatgttctccttcatttttgaaggacagttttgctaaatatagaattctttgttggctcttttgctttcagcatcagatcagattctatcccctccccagggcttattactgctgcttattgtgagtggttgttgtttgcttgtttagtgactttactaaactacttttataagctctatattcctggtcatgtggggccgctgaagtctattccatttgcttagtaatcagctagggttttaacagagtttcgttaaacacctggagccaaaagaaaaaacaaacaaacaaaagaaaacctctccccatctttacagatggctttatgttggggcagtttttgaccacttagtgatgccatttataattctgccttagcctttgcttactgtttgctcaaagcctgaagatcagccagggtgaaagcttagggtcttcttgggcctttcctgaatgtgcatccagccctggccatgtgcacgtccttcttgattggtatacacaccccttattaccccatgtatattctttcccatcccctttctgtccaggcttttccatctgtctgttccttgtcccagttgttgtcccttgccccaggctgctgcatccattaaatgatttttgcaaaaaccacccaggaagactccctatgcctgggaatgattcaagtcaggcaaagccaaggcaagccattgctcaggtccttcagggagctgccagacaagttgaaacccacaatcacaattgtttaagaatgagatctgtattgcttcctctggcattaggagtgcaggttactgtccacacagccatcactgacttggggtgtgggggatggtgggcaggcaacttaggatgcgatagcactctctttaccacaaagcagcaacttctttctttaccaagccttgccctagattttataagttttttttttttactagattccagagttctgcaaaagttgagtctgacagtatttaccagctcattaattgcattcattactttttgcagggacagtgccttggagttccttactctactatttttggtggtatcaccccaaatgtagggatttctccgaaggctatcattaaccggaagtaagaaaattaggaaggaagaagttgatttaggggtatagactggattatttttatttggacatgagtgttgggtttgaggtactgatggcacaatctgtgggtgtctagtgacagttggaattgtaatgcctgaattccagaaaggtcttagagctgcaaagagatctgggaaccttctgcacagaaattatagaaaatgaaagtgtatgatttccttggaatagagaggaaggtcaagtatgtcatcttgtgaaacactttcagctaaggaattcttcatttattcattcagcatgtttgctgactgctgaatacataattttgtttttcctttgttcctactactgatgtatgtactgctaagcgttggagacagaaacgaataagatctcgttttctgccctcaggaagttcactcatattgaggaagacagacaaataaacaagtacaatgcagtgttataataacaaggttagaggagcctagacagaggtaaacaagaatatgtaaacaggttgggagggaaaataagaaattcggggaagtcaaagaagaagaaaacataatggagagagtgggctgtgatcttggttgctgcatatagagtttgagaaggctgaggactttaaaagttactgatttgacagtaaggagagatgacataagaatggtattcataagaatggttttaattgagtagttttgttagaatgttggagacaaaggatcagataataaagagttgggagtgtgagtggtgaaaaagtcgagggaaaaggaaaaacaactttttttttttttttttttttttttgagacagagtcttgccctgtcgccaggctggagtatagtgacgtgatcttggctcactgcaacctccgcctgccaggttcaaacgattctcctgcctcagcctcctgagtagctgggactacaggtgcacaccactgcacccagctaatttttgtatttttagtagagacggggtttcaccatgtttggccaggatggtctcgatctcttgagcttgtgatctgcccgcctcagcctcccagaatgctgggattactggcatgagccaccgtgcccagccgggaaagacaacttttaaaagagtggtatagtttattctataggaaaattggaccagttagagaaaaaataaataaattaccaaaatgttacggtttaaaagttgtagcagagttaaagtaacttcattttggagtagaaaagatatgagtgtgtttttagacaattgaagggactaaataggaaggaaaacaaggatgtcgagagtcccaagagagtcaggaaagatagtattaagatcctagaaggatcaggatttggagacttgagtgaagaacgagagtgaggataatgagagttttgagacaaaaggaatttgagaagttttacctagggaagcctcagttttctaggtaaagtagagcataaaatcacacgctaagaaatgggcagcagtgaaaatgcctgactgaagttgatgtagcgtacatttgtattgatagtaccatttggtgattttctcatttctttcaacacatatgtgttaagcatttactgtgtactaagcactatacaagatccttgggattctatctgtaaacaaacaaaactccctgtccttttggaggttacatatgactggggtaaggggagaaaaacaaataatattttaaaataaacatatgaggtaaatagagctacctgggtctgggaaccaagaaagcaaatgggaagattagccagacataactgcaattttatattgcatatcatattctgatttaagatagaaataattttatttttatacagctcattgtagaatctagcttgcttaaactaagacaagaagagtatgggtgtggtggagcctttgtgtacttagattgtagctatgaaagaaatctatatttacatttaagagggaattcattaatttaggacaactttataattatgttatatagttatttcagggcctttgacaagagaaaagatggtgaactgtcatataataacaaattaaatatttatttggttaagaaaaagaaaatttgcatcttatttccaaaaagatgatttttaactacatagaaatttgttatatttaaaagctttaaagatctatatagagttgaagatctctttttaataatgaataagttcattcttttggtaatcatttttttatattctcctctcatggccctttttaatttcaacaggcattggaaaagtgaaaagaaaacctagtgtgccagattctgcatctcctgctgatgatagttttgttgacccaggggaacgtctctatgacctcaacatgcccgcttatgtgaaatttaactacatggctgagagagaggatgaattatcattgataaaggggacaaaggtgatcgtcatggagaaatgcagtgatgggtggtggcgtggtagctacaatggacaagttggatggttcccttcaaactatgtaactgaagaaggtgacagtcctttgggtgaccatgtgggttctctgtcagagaaattagcagcagtcgtcaataacctaaatactgggcaagtgttgcatgtggtacaggctctttacccattcagctcatctaatgatgaagaacttaatttcgagaaaggagatgtaatggatgttattgaaaaacctgaaaatgacccagagtggtggaaatgcaggaagatcaatggtatggttggtctagtaccaaaaaactatgttaccgttatgcagaataatccattaacttcaggtttggaaccatcacctccacagtgtgattacattaggccttcactcactggaaagtttgctggcaatccttggtattatggcaaagtcaccaggcatcaagcagaaatggcattaaatgaaagaggacatgaaggggatttcctcattcgtgatagtgaatcttcggtaagttgattttcggaggtaaatacaaatagagctctgggtattttaaaaaaaagagagagagaaatggagaggttaagtggcttccctaaagttaaccaggtaacaagctgggacgtaacataagcataaatgttccaaagctaaagtccgcattctttctagctatctattttgaataaaagagagctgtggcagtgttgctacacactgaattatttcgtcttgtctagttctgttgattttgcattcctgatatattttctgtttctgttgcattaaactaaatggagaaaatggaacactggcctcttcattgagagtagaataatactatagattaaactgggaaacatttaaaaaattgctatgaaggtagtcactgtagtccttatgacataggaaatccctgaatttaaaaaattgatattaagtttcttcataaattggttacttggaaattggaatgcacttttattataacctcaaaaaacctattttagcagtgtttgaaatgcatttgcaataaaagataaattatattgcaatactagtaaacaataaaactataaaaccataaaagttgaaaaataatatggtttcatggtctcttttagatactgcttaggatattagaatttgatgacactcattttccttaaaaatggcctttctttttccttgatgaaagatatcactacttttccatttattaaatcatggttaatcttggctttgcgtgagtatatttgtacaaaagggaatgtgtaattgcacaaaattttgaaagaaaatgtgtggaagtggggtgtggtggggagagagattaattgaacttcctgatgtgaagttcaggaaaatggggcctgtgcctaatccctcagaaaagcagttggttggcagtagggaagagtgatgacatccattttctgttagttgcctgatctggctcactgtttgaaactttgggagtaactgtagaaaaagaggctttgggggttgatatagactgtaacaacaacaacaaaactaattaaaaagaagatagcttgaatgcagaattgtatgtattttcttgtgggtaattgagtgtagatattagacaaaatgcaatatataccattatttttagcagtatactttttaaggttagaggtctcaagtaggcatattttgtttagccttcacagtgttttttaaacatttaaattcattgccgatatttaaatattaggatatttattataaaaattcagactttagaccatttaaaattggaagaactaccaacattgagacctggttcctgcaaggcaacaatcacagctgagaagtcaccacttgtttagattggtgatacactgtcatttcctctgcccatctacctttccactctgacacttatttacattattcttttggctcttgtaggcatttgagtttgtggcctctccttaaagtttagattaattctcatttgtgtattcttcatttttgggaattcagcatgttatctctaagacagctactgttagctacacattgaaaaggggttgggtgggtatcttagactttctcatgtgtttctctgactggagagaagatagctcttgttcttcaaatatttaactaaaggatttgctgtgggtgtctgctgttggagccgtgggtgttaagagacttttgattatgcaggtttgaatcctggctctgttgttaactagatggatgatattggccaagttattaatagcttctttgagactcagttttcacatgtgtaaaaagggtttgttttgaagagtaaaggagataatctatgtaaataatttaccatggtgcctaggacttagtaagtgcttagattttagcttttagtttaatataaaaatactgatagagggctttcaaaatgtttactatatgtatcttttttttctcttttagccaaatgatttctcagtatcactaaaagcacaagggaaaaacaagcattttaaagtccaactaaaagagactgtctactgcattgggcagcgtaaattcagcaccatggaagaacttgtagaacattacaaaaaggcaccaatttttacaagtgaacaaggagaaaaattatatcttgtcaagcatttatcatgatactgctgaccagaagtgactgctgtgtagctgtaatttgtcatgtaattgaagactgagaaaatgttgggtccagtcgtgcttgattggaaattgttgtttctaaatctatatgagaattgacaataagtatttttattataactcagcccatacatatatactatgtatgcagtgcatctgcatagaacagttccttatccttggccttctgttttattgtttttttctttgctgttttccctttgcttctaatattacagttttgtattttgtaaacaaaaatcaaataatgcatatcagaatctttatatggaagaaatcctttattgcctttcctttgtttccttgtaaaggcaccctgttctgttatggtttttcattatataaaattattatatctatatatgacatatgctaaaatttcttggagagtgttaatcttttctgtgactaaatagcaataataagtggaaaattagaaattatttccaggtattatatttgtcacaggccattgtaaataccaagtatattgtgtctgccataatttttaaaaatacattcattgtcttcagtcatacagcaagacacatgagacatagattagaaaacatgttgtacaattttaatttacaactgttggaaataaaaatcacttaatttttttccagtgcttctccctcatctggttattcaagaaaacaaaacagtctctgagatatttagcttttcaaactgtaaatagatgctctagtgttatttatttttttaatcccacttgtattattttacctctagagcatcttgtattaggacatgttatatttatgccagtgggaaataagttatggccaagttttgcaaaaacaggaagcagtgagatacttgtttttttctcctcactaaatatcagtaattgtcaggaatggtattacctattttcatttcctcttttcagctttgttttgttgattgggacactaaaactgatgtatacctgaggaaaaaatagaatgtgctcatggttagggaaaattatattatttttaattttttaatttgttttttaaccaagtaggaatttgggtgtatggataagaggccaatctgcttctgtaggctatagaagaaaaccagttgtattttatggtcataatttgtccccctattattctggagatttaaatttaagtaaagtagccatcagtattttaattgaaaaatactaaagccacataactgagtaggatgtcgtatgatactttcaacaaattccctaatgctgcctaagcatatggatgttttaattctttgctgttataaacagatatctaatacgccagaattactgatggtaaaattgaagttgtgtaacttgtgaattttttttatcaatgttttaaatattatttaaatcttaaaatcatttaaagacttatgttgccactgggtggcagccatggcttctcccactaagcaacagaagtgaccaaatataattaagacaaattttcatctctattacatctgcttttaaaacattttagttcatattctattatttttctaactcagtactcctttgttgagggtaattattagtagttaagtttttaatggaaataaaaatcatgtatgcttatctttgctgtaaaatcaaatgaatataaattgaggaaaactttaaattgttgtaggatgactagtagtaaacatcatcttaatttttaacatatatttgatgatgctttccttttctctgtatgtttctgggtttttccccagtcttccttatgaaaaaaatgtatgtttgtaaaaagagaacaattaatgctttgcatcacagacataaactattcatagtaaactgcactgagctgatattaatagagcagacttttgagaaagtaggagtgtagtagcactggaaacagaatgcaaatttctgttccataattaggtttattgtagctatagcgctcccagataacccatgtgtgctagtaatatctattgtgtgctcttactatggtataaaaacctcgctggaagctacttattttgtacttaaatattttaccaatttttaaaaagtcttaatccaatgcttataccagtgactgtttttataatacttgaagtaactttaagaactgaaacaaccctggaaaactctacatagctagatagtaacaatacttgtataagaaaccaagtttccttattcccagcctggtgtctgtatcgtgacacactactctgtgtatgcttggttttagactaggaggagagtcctgggaagggcaatattacagaagttttcttccacatgaggagaatgcttagtttcaaatttaaatacatgtgtcagatggaaccctgcctaactcacttctacaaataacttccccaaaatcttagaaggttttttagaacatgatataagctttgtgacaaaaacaaatgccattgtgtcccttatttagtcataaaaccttaggattcagctgaatatatattcacacatgtatattacacatatatcactatacagttaacacatgcaccttgcactattagtgacaaataatactgctaaacaaaataggcttcatgcaatctattgccattgctagaagaataaataggcctagcagatgggcaacttgggttgttagaataaggtcattcttgcagaatatggcacttaaattatctccagctgtaatgtcctaccatataatccagaggttgcatagaagcagagttgtcacagtctctgtagcacgtttgtgagaattctctaggcaggcccagcccttctctagaagtttgaatttcactcccaccttgttgctggggtaccttcttcagggtacatctaaacacagtggccttatacagaaatgttgttcaacccacacagtgctttaaaaaattaattgccaacatttaaaaatcagggagtttcacataaaattcagacttcttgtttccctttaaaaatgagaagctaataacatgagttgaattcccacaagtcaacaatgagctggaatctaatatggatggtcctcttatctttaccagtgcacatggtgaaaaaattcaaacagtataataaagtcttctttcaagtcaaaatatagagacgaatctctgaaacgttttatttgggaagcaagaattgtaattcagggcatatacacagacagtagtttttggtatgtctaaagaacagagaagatggggagttttattataaagagaaatgttacgtatgttttgaaagaaaactcattggttctagataagtttttgggaggtggcaagctctgattggtgtgtgacagtgataggtaaaaccagtcttagagtcacagcaggtcatttcagcagctactaggtaaaactggtcttagggtttacagtagtctgtttaagtagctgggcttgtggaaaactgagttcttggagcagctgctatgtccttcatgtactttttccccttaatgcattgaatctgatttggttgggtatgacaataattacccaatttgtataattaactttcacactcccaacccttatccccctagttgagatctccagatgcagtttactctccctgtttttcctataacatggaaagttttgggtttggaatctggaaattaccatttttttcagaaacactcagttacattgtccaaatcaagaaatgaggagtgtggcattacagtactccctaagttttccattttaatactttgctagaagataaggggtcctttataatcttgcatttatatagaacttttaactttccaaatggcttcacaatcaaggtcactttttttcttaaaggacttttgatatagtatagatgctatcttatgttttgaacactactgttttttaaagaatgccaaattactgtttctggagaaacacattattagaagcattggcttgctactcgattctgataggctggttctgttagtgtttagcaagtttttgtgactcaattctctgctatcttttaaacacttgacagaccagcatgatatgcatgcccccacaccctaatttcttgctgtaacatgacctaaaccaaatgacttaggaactgaaatgtttatttctagtttactaatgaggtgcaccttgtatctgaaagcatacatagtttgctgagatatgtttaatgagtagaacctaggttaggcttggtggggttttgaacagaggaggagtttgagctatcagccaccttgttcacagagggaagtgttctaaattagtgtctttgagaatatttcctggcgggttaaaagtagatttctaaggtagttgctttaaataaatttctgtgctcagataatttatatctttagactgtggagaaatctttcagatagccttcatgaaattactgagacaaaaaggtgaattccagaatgagactgttaagtgttgtctattttaggctaaacacaggaatggttattaaattgatattttttgagtacttttgaaggaaacagtaatcattgagtaaggatggcttctctaggagaagtaatgtcaaacttgatgttttctagacttaataggcaagggggatgttacagagaacaaattcatcaaggcatatgatgatgtcaagatgcaaatattttttttaattgttacatctctatatgattttatgtttaaatagcttttggagatactcgtaatcaatttatccaaccaactcacctcaaatattttattgctgagctgagactgttctagcaatgtaacagtgaagaaaatggacagagtttttataaaacttatattttagtgatgtgatacgtaacggagaagagctctgaattaaaatagaacagatttgagggttgaagagtgagggtgagggtgttaatttatataggatgataaaaagaggcctctgataaaattgacctttgagtatactgtgtgctccacttaatagaatcactgatgactacgaacgaccagtgactgaataaaatacagcaaccaaaatcatttgaaaactatgtggaacttcactattacagagcattgtttctggttttcagatttttaatttgactaaaatggtattttatcgaaatgtggaacatttaactacagaaggctattctgaataaaccctgattctccattttaagaggagttttttggggggatgtcaggtagaaaaagataactacaggaagaggacagtttggccgacttaagggttctaattgagcacactctaaggaaaccctggaggttaaattcctgatgaccagacaaacatttgggaggaaattgaaaaactgaagtatttcagaagtgaaaaaggaatgcaggagccctgaaaattagattctaaaaacgtgtagaaattctacctggggccgggcacagtgactcaggcctgtaatcccagcactttgggaggccgaggcggggggatcacatgaggtcgggagttcaagaccagcctgaccaatgtggagaaacaccgtctgtactaaaaatacaaaattagccaggcgtggtggcacatgcttgtaatcccagctactggggaggctgaggcaggagaatcgcttgaacccgggaggtggaggttgcggtgagccaagatcacgccattgcactccagcctgggcaacaagagcgaaactccatctaaaaaaaaaaaaaaaaattccacccggaacagtcttggtggaagcatgaattagaagagtctaagacaagtggaattccgctatttaaattccctgtgttacttctaaaaagaaaaaatagagacacagtgaaatccaactaaatgtcagaagtgctacaagacagaacatagatatctaagaatcttaatgcaaagggaaggaactattttgtgttaagtaggggaaaggaagattactggactgtaataattgaccacatagttcattcaaggacacagggcctatcctggacttgcacaaccctaagagtgagtgcctcagattttgcgccctaggtgcttcccttaattttagtcctggccctgcagggcacagagagcttagggttctcttccttggccacaaaacttcccatccctccccactgcctctaccttttcataaaaccttttctctgcttgcttttccttccataattaaatatcagagatttaagtggcaaatagtgtaatcgaaaaaaaaatcctatttctgaactgtacctacctataggaaattggtctattcttccagcggtttatcttctgacatggatgaccctccaactctgtggaaggcaccagaaattaacttgagaagtgcaggaaacaggatagagaatagtttcgttgtgcatgttgcatagacaagacattacaacttctctttctatagaggggcacctcaaagccagaagagaaaggcaaaatcagggtcagggattatccaggaatgttaggggctagcaggtgaggcacagccctccagaagtcctcacccaaagatacagcccaggcagaggtgggtggtctgagttacttgttgggtcatgacccaggcttgaaacggattattgttcaaaaaatatgacaggcagatggcattatctctcagtgccccttgaggtgtgctgaacccagggcagactctgtgcaatggcttatgaaggattggcaggcagtactgtcttgccagagcattgtagtgctggacaggagtgtcttgacagggaccaatgagcaggtggagctaactagccatcgtaacacttcaaagtttggtaaacaactcttcttctccgacagcatagctaaatgattcttattctttcctccattttctctgtttactttcattttcatcttcttaattcagtctgtattcccctctacctttccatctttgctcatatcattctcccaaaaggaatgatgaacagtgtgcctctcttcccctcctacccatatccaattggtacatccggaacctcatattgaggtctacctattccctaaagcctttgctgatctcttggatcactcctttgtgtccctcagacacattcctttgatgctaactgggaggcagttaaagtgagtgaaaaaagcttggagttatgcagacctcagttagaattcctgtttccatccctgaatagctctgtgatctacagtaagttaatttccctgagccctgtgttctcacctgaaaagtggagaatcaaatcatatcttaccttgcaagtctgttgtataatatatggacatgtatatagtgtgtagaaaccctttaggacattcttggcagataatagatatccagtacacattggcttatattgctaacttttgacatgctggaactgtgagcagaagcgaacttaggagagaggaatcaggaagccaagatggagaacaaaggtaacattggggacagacgttgaggccatgtatgaagcactcttaagaggagcagtgagagactgtacaagcagctagtgaccagaggtcaaagtacagatgtggccactgactcacagtgctggaatcaaggaaaatatgcaccaggttttcttgactatggtgtggtaaaaagatatacagcaatgtttattgtatacttattttgtgccagatcctgttctaagtttcacttaatcctcacaacagccctgagtcagacactattataattgttcccaattttcagatgagaaccataaagcagatagtttaaatgacttgcctaaagaaacacaactaaaaagttgacaccaatcaacctgagacaaagattatttatatactagagactcccctgcccatataagcatctaagctcaaatttcgcaagctgaacatttgcagcctttttctatagcacccccaatcctgcctgtcctgaccacactccacccacttcattatttcacttgaggtgctgccatccacccagttacccaaactcagaacctgaaagccatgtttggctcctcctccccagccctcttaatgcactcaatatccaggagctatcagttctatcttctttatcttttgaatttggtcatttctctctgcagacatgagaaacctagtggaagccaacaatgtctgtcacctggatcactaccatagctccctcatggccctcctgccttcaatctggccccctgtgctgttttctccaccctagtcacaaactttttaaagctcaaatgcagggaatgacatggtcatatttgagctttgaacccttcctttgaccttcattcctctcaggataaattccaagctcctcaataaggcattcaaaactctctagaatcctgtttctgtctgccactaagccctatttctcgccatttcaaccttgttctcgtgttgcaccaaacttcttcttgcttcctaaaaacaacattcctggctgattttttttttttttttccagagtttaacacccagtcctggagtcacctcctccaggaagctttctgtaatcctacaaactgggttagatgtttctttttagtgatgctatgtttccttacgaatattgctgtcccttcattttaaaaattgacttatgattattcccgtgtctatcttctccactagttgggaaattcttgttgagggaatggactgttgaattcctaagaactagcacatagtaggccttcagtgaaggtttcttgaatgaataaataaatgaccaactttcccaaggttacattgtaagttctgaaacttgaaccaaaatacattatactctagaacccatgtttattccactattgtatttgcacattagggtggttaaagtccttcaagggctaaattttaaagggctaaatactatcacaaggtttttcttccacctattgaaattggttttaatttttcagtaatacattcacgtgactcagtaatcaaacgatatacaaagatattcagtcaaaagtcttgttcccatttttctcttccacctttccaattcccactttctctgccccaaggtaaccaatcttgttcatttcttatatcttcttttagtttttctttttgcaaatgcatgcaaatatgaagctatatattattctttaccctcctgacttttagaagggtattttaaattttttcaaatatctttagtttttctgaagtgggtacatattagaaaaaagagctagtcagtacccagcttgaatgaactcacagagagaaacttggaagaggacagctatttaatgagggagggagataatcctgcctgctcattggcttttagggaggtgcagagtcctttaggacagagcctgtggtccgggtattgctcataggcagattctcaagctccccaaagttacattttctctggaactctcctaggccactccctgctgatgcaacatctgggtttgggcagaaaggagggtgcttcggagcccgccctttctgagcttcctgggccggctctagaacaattcaggcttcgctgcgactcagacctcagctccaacatatgcattctgaagaaagatggctgagatggacagaatgctttattttggaaagaaacaatgttctaggtcaaactgagtctaccaaatgcagactttcacaatggttctagaagaaatctggacaagtcttttcatgtggtttttctacgcattgattccatgtttgctcacaggtaagtatgaattagaatacatccaatagtttgggccttgaatataggttaagaaggcaaaaaatactttcccagggcctggggttgaaatatgtgtatagaatatcgtatatctgttttacaaaagatttatcacctcctaaacctctattcccacatcccaaagaaaaggcctgcattctgtttggaaatctctcttcttaatgtccacacaacaatctagaaagagaaatcatcaaaataaataaaagcagagctctgtgcactttgttacttatctcatcgtctggttttatatagtgcaatgtagttctttcagacttactgtgtgtgtcttggagatgttaactgtaagaacaaattaaaacaaagattctagcaaaatacacatgaataaaaagacaatttgtgagcttaacattggatacgagacttataaaaattggatttctctactggtcattgaagaaaaggtactccatagcattctaaaaaatatttggtttgggacatttcccctgccagtgagattacatagttttctctgctccactcctggttgcttgtacctatctgctttattgtcttaaaattggaactctgtagcctttgatgtttgttcatgtcaaatcacgtttaagagaaacttctaattttgatactccaagacactaggcactttgcagtgttgatgggagccttgagtactttctctctctctctctctctctgtctctctgtctcactctctgtgtgtgtgtgtgtgttttacacagaactaatttaattattctagttagtttacatcaggtaacaaatcagtactaagacaatttgcaaaggtgtagaactggcttaaacatcaaatttatggtgttctttcctagcttaaaaaccttcacagctcccagttgttcagcacatggtgtccaaattctgttgtctctcatcacccagcatattcaggccccaccctatatttatttaaccctatttctcactactccttgaaaacgaatatggactacaagcagctgctggcttaacagtcagcatattataccttcatttcctcctcctggcctttattgttataatttcccaccagaagcagcatcttcagtatttccttctacgtctttccaagacctctctttgaccccaggtactttagcttcaggtggttacttctctttccagcactgacctggagggccagggcctgggcatcttttctgctgtccccacatctcctagcacaggctaagcatgctggttgtttggttagttagttgttggttatttagttgttggaacagaaatgttgccaagaaaacatccgtccactaagctgaaacgagaagatgggaggctgaatgagaagaggaaagcccagcatttttcgacttgacattttcttcaatgacgcccgtcttataagtattttcttgaaaactcctgttttaaatagatctggaggtgagtgtgcacttctgacgcttataaacttacatagaaaacacacacacaccaaaaaaacctcagtggtgaaatcacaaggatgtcatagccagaaagacctgtgtgtgagttttggctctgttactcactagctcaggactcaatcatgtaacgtcagtttcccttcctgtgaaatggtcataatagccactttgaggttatgaggggttaaataagatgacacaaacaaaagcgctttgaagacttcaacatttccccaccctcaaatgttagttattattatctgttggttatacagatggtggtatcagtagataattgctttagctgaggttgtctttatgcagttttgaccatttcctctggattgtgtaggtgcctgtgatgaattctgcaaattctaaatgaacttctattagttactagatcactgggcagatgggtagagttgtggctttttttttttttttttttttttttttttgaccgagtctcgttctgtcgccaggctggagtgcagtggcgcaatcttggctcactgcaatctccaccacccaggttcaagcgattctcctgcctcagcctcctgagtagctgggactacaggcacacgccaccacgcccagctaatttttgtatttttagtaaagatgaggtttcaccatgttgcccaggatggtctcgatctcttgaccttgtgatttgcccgcctcggcctcccaaagtgctgggattacaggcatgagccaccacatccggccatggctgtctttcatagaaatcatttgccttgtcctgtccctcccaaataatagtgtgtgattcagaaagctgattatgctaccaatagtaataatcacaatgacaatcacaactgctatttctgagtacacattgtgccttcagttagcaaaaatgttatcttgacttctcacatgaatcctgcaagttaggtgttatccccattccacacattagggatagagactaggagaggttcagttatttgtccaagtacctatatctagtaagtgcaggaattgggatttgatgatggtttggtctgctccagagcctgtgccctttatatatctctgcagaaaaagctgagacattaaaacaaggtagaagaagggaggagggacaaaggaaaggaaataaagaagatggtgctaccttttctaatgcattagccttaaaggctgatagaggtaaaggtggcagaagaggatccaaataaagggagtggacatcaggcccactgagcgtccttcagagaagagatgcaaagatttttgcctggaaaggttgccccagggctttttggtgggtagccttcatgctacttcccttggactgactcactcaaggttttacgaaataggtgttcagcagcagaaagggtctaatttaaagacgaatgagggattaagaaaagagttagacctaggctaatttccccaaggaagccaaagcttaatttacttgttcaactttcattcttttaacaccatttatgtaccaggttctgggatgtgtgctagttagagagattttaaaaacttgtcttcagggagcctaagagcctgctgggaagtacactaaagtctttggcatgtgggaatttaacaaaattttaactattctttagccaccagaagtaaagtctagatttgtggttcccaacctcaaatgcacattggaatcacctggggaactttttaaaagctaaattccgtgacttcacagctagagattctgagttaatctagggtgctgtctggatgttgggactttttcaaaacaatgtgggtggggctccttagagaagtgattgattccagggctgggcagggaaaaaacaagatgagacaagagcattttgtggtaagtaatgaagtgattaaaaaaggatgagggcctaagttaacaattaacatagtatcctggattggagcctgggatggaagaaagaactgagtggaaaaactagtgaaattcaaataaagtctggagtttagttaatgataatgtgccagtactggctttttagttttgacaaatgtattatggttacataagatgttagcattcagggaagttgggtgaaggatgtataggaatgctgtgtactatctctgcaattattctgtaaatctaaaattattccaaaaatttaaaaatctattaataaaaataacatgagtaaaacgggtgggaacaagttaaaagggcacaggcagcttgaaagtgttcccattggccaaaagctagaacaatttgaataataaaataacaatagtgttggactttacagaataaattaaaatatccatgagtccataccactaaaaataaataattgaataaataaatggtggagaaggaacagctcttcctaacaaaagaatacaattaaataaaatatcactactagaacatcacagcaataattattacaagaaatatccatcagtagatgttaaaattaataggtgaaagtttgaggaggaatggaatatttgcacagtctcaaagtatctcccccaaggtatttattaactacacaggggaaaatggtagctttacagtagagacactttcttaaccaagtgatcagggtggttaacatcaccagtaataagacgtattgatatcatgtactccctgtgagtgtctggaaaaaatgtgtaacctcaatcaaatcacgtgaaaatatcagacaaaaccaaactgagatacgttctacaaaacaactggccagtacttctaaaaaatgtcaaggtcggccaggcgtggtggctcatgcctgtaatcccagcactttgggaggccagggcaggtggatcacgaggtcaggagatcgagaccatcctggccaacatggtgaaaccccgtctttactaaaaatacaaaaattagccaagtatggtggtgggcgcctgtagtcccagctacttgggaggctgaggcaggagaatcgcttgaacctgggaggcagaggttgcagcgagccgagattgcaccactgcactccagtctggcaacagagcaagactccatctcaaaaaaaaaacaaaaaactcaaggtcattaaaaaagacaaagacagactgaaaacagtttggaggagactaactagacatgacagctaaatgaaaatcctgaattggattttggccaaaaaaaaaaaaaaaaaaagcattaggggaaaaactgatgaaatctgattaaatactgaagcttagttaataatattgcattaatattaatatcttaattttttataattgtgctatggttatgtacatatggagggctgagtgaagagtatatgagagctctctgtattattttgcaactcttctgaaagtctgaaattatttcaaaatacagttaatctgttcatcatatcactgggctaacatcaaggtatgggcaggactacattccttctggaggttttagagaatctgtttcccccttccatggtatgaatgtactacagtttatctaaccattcacctgttgaaggacatctgggccgattccagcttgactgtgaatatttgtgtgcaggtcttatgtgatgtaaagttttcatttctctgagataaatgctgaagagtgtaattgctagatcatatagtaactacatgtttagttttacaagaaactgccaaactattttgaaaaagagtatcattttacattcctaccaacaatgtataagtgatccacttgttctgtatccttgccagcatttagttttgtaactttgaaaacttttagccattctgataactgtgtaatgctatctcattgtgattttaatttggatttccctaatagctaatagtgtgcttatttgccatctatatatcctctttggtgaaatgtctattcatgtcctttgcctatttttagattggattgtttgatttttctactgctgagttttgagagttttttatgtgttctagatactagttctttttttttttttttattttttttttttattatactctaagttttagggtacatgtgcacattgtgcaggttagttacatatgtatacatgtgccatgctggtgcgctgcacccactaacgtgtcatctagcattaggtatatctcccaatgctatccctcccccctcccccgaccccaccacagtccccagagtgtgatattccccttcctgtgtccatgtgatctcattgttcaattcccacctatgagtgagaatatgcggtgtttggttttttgttcttgcgatagtttactgagaatgatggtttccaatttcatccatgtccctacaaaggacatgaactcatcattttttatggctgcatagtattccatggtgtatatttgccacattttcttaatccagtctatcattgttggacatttgggttggttccaagtctttgctattgtgaatagtgccgcaataaacatacgtgtgcatgtgtctttatagcagcatgatttatagtcctttgggtatatacccagtaatgggatggctgggtcaaatggtatttctagttctagatccctgaggaatcgccacactgacttccacaatggttgaactagtttacagtcccaccaacagtgtaaaagtgttcctatttctccacatcctctccaacacctgttgtttcctgactttttaatgattgccgttctaactggtgtgagatgatatctcatagtggttttgatttgcatttctctgatggccagtgatgatgagcatttcttcatgtgttttttggctgcataaatgtcttcttttgagaagtgtctgttcatgtccttcgcccactttttgatggggttgtttgtttttttcttgtaaatttgtttgagttcattgtagattctggatattagccctttgtcagatgagtaggttgcgaaaattttctcccattctgtaggttgcctgttcactctgatggtagtttctttggctgtgcagaagctctttagtttaattagatcccatttgtcaattttggcttttgttgccattgcttttggtgttttggacatgaagtccttgcccacgcctatgtcctgaatggtaatgcctaggttttcttctagggtttttatggttttaggtctaacgtttaaatctttaatccatcttgaattgatttttgtataaggtgtaaggaagggatccagtttcagctttctacatatggctagccagttttcccagcaccatttattaaatagggaatcctttccccattgcttgtttttctcaggtttgtcaaagatcagatagttgtagatatgcggcattatttctgagggctctgttctgttccattgatctatatctctgttttggtaccagtaccatgctgttttggttactgtagccttgtagtatagtttgaagtcaggtagtgtgatgcctccagctttgttcttttggcttaggattgacttggcgatgcaggctcttttttggttccatatgaactttaaagtagttttttccaattctgtgaagaaagtcattggtagcttgatggggatggcattgaatctgtaaattaccttgggcagtatggccattttcacgatattgattcttcctacccatgagcatggaatgttcttccatttgtttgtgtcctcttttatttccttgagcagtggtttgtagttctccttgaagaggtccttcacatcccttgtaagttggattcctaggtattttattctctttgaagcaattgtgaatgggagttcactcatgatttggctctctgtttgtctgttgttggtgtataagaatgcttgtgatttttgtacattgattttgtatcctgagactttgctgaagttgcttatcagcttaaggagattttgggctgagacgatggggttttctagataaacaatcatgtcgtctgcaaacagggacaatttgacttcctcttttcctaattgaataccctttatttccttctcttgcctaattgccctggccagaacttccaacactatgttgaataggagtggtgagagagggcatccctgtcttgtgccagttttcaaagggaatgcttccagtttttgcccattcagtatgatattggctgtgggtttgtcatagatagctcttattattttaaaatacgtcccatcaatacctaatttattgagagtttttagcatgaagggttgttgaattttgtcaaaggctttttctgcatctattgagataatcatgtggtttttgtctttggctctgtttatatgctggattacatttattgatttgcgtatattgaaccagccttgcatcccagggatgaagcccacttgatcatggtggataagctttttgatgtgctgctggattcggtttgccagtattttattgaggatttttgcatcaatgttcatcaaggatataggtctaagattctctttttttgttgtgtctctgcctggttttggtatcagaatgatgctggcctcataaaatgagttagggaggattccctctttttctattgattggaatagtttcagaaggaatggtaccagttcctccttgtacctctggtagaattcggctgtgaatccatctggtcctggactctttttggttggtaaactattgattattgccacaatttcggagcctgttattggtctattcagagattcaacttcttcctggtttagtcttgggagagtgtatgtgtcgaggaatgtatccatttcttctagattttctagtttatttgcgtagaggtgtttgtagtattctctgatggtagtttgtatttctgtgttatcggtggtgatatcccctttatcattttttattgtgtctatttgattcttttctctttttttctttattagtcttgctagcggtctatcaattttgttgatcctttcaaaaaaccagctcctggattcattgattttttgaagggttttttgtgtctctatttccttcagttctgctctgattttagttatttcttgccttctgctagcttttgaatgtgtttgctcttgcttttctagttcttttaattgtgatgttagggtgtcaattttggatctttcctgctttctcttctgggcatttagtgctataaatttccctctacacactgctttgaatgcgtcccagagattctggtatgtggtgtctttgttctcgttggtttcaaagaacatctttatttctgccttcatttcgttatgtacccagtagtcattcaggagcaggttgttcagtttccatgtagttgagcggctttgagtgagattcttaatcctgagttctagtttgattgcactgtggtctgagagatagtttgttataatttctgttcttttacatttgctgaggagagctttacttccaactatgtggtcaattttggaataggtgtggtgtggtgctgaaaaaaatgtatattctgttgatttggggtggagagttctgtagatttctattaggtctgcttgtgcagagctgagctcaattcctgggtatccttgttgactttctgtctcgttgatctgtctaatgttgacagtggggtgttaaagtctcccattattaatgtgtgggagtctaagtctctttgtaggtcactcaggacttgctttatgaatctgggtgctcctgtattgggtgcataaatatttaggatagttagctcctcttgttgaattgatccctttaccattatgtaatggccttctttgtctcttttgatctttgttggtttaaagtctgttttatcagagactaggattgcaacccctgcctttttttgttttccattggcttggtagatcttcctccatccttttattttgagcctatgtgtgtctctgcacgtgagatgggtttcctgaatacagcacactgatgggtcttgactctttatccaacttgccagtctgtgtcttttaattgcagaatttagtccatttatatttaaagttaatattgttatgtgtgaatttgatcctgtcattatgatgttagctggtgattttgctcattagttgatgcagtttcttcctagtctcgatggtctttacattttggcatgattttgcagcggctggtaccggttgttcctttccatgtttagcgcttccttcaggagctcttttagggcaggcctggtggtgacaaaatctctcagcatttgcttgtctataaagtattttatttctccttcacttatgaagcttagtttggctggatatgaaattctgggttgaaaattcttttctttaagaatgttgaatattggcccccactctcttctggcttgtagggtttctgccgagagatccgctgttagtctgatgggctttcctttgagggtaacccgacctttctctctggctgcccttaacattttttccttcatttcaactttggtgaatctgacaattatgtgtcttggagttgctcttctcgaggagtatctttgtggcgttctctgtatttcctgaatctgaacgttggcctgccttgctagattggggaagttctcctggataatatcctgcagagtgttttccaacttggttccattctccacatcactttcaggtacaccaatcagacgtagatttggtcttttcacatagtcccatatttcttggaggctttgctcatttctttttattcttttttctctaaacttcccttctcgcttcatttcattcatttcatcttccattgctgataccctttcttccagttgatcgcatcagctcctgaggcttctgcattcttcacgtagttctcgagccttggttttcagctccatcagctcctttaagcacttctctgtattggttattctagttatacattcttctaaatttttttcaaagttttcaacttctttgcctttggtttgaatgtcctcccgtagctcagagtaatttgatcgtctgaagccttcttctctcagctcgtcaaaatcattctccatccagctttgttccgttgctggtgaggaactgcgttcctttggaggaggagaggcgctctgtgttttagagtttccagtttttctgttctgttttttccccatctttgtggttttatctacttttggtctttgatgatggtgatgtacacatgggttttcggtgtagatgtcctttctggttgttagttttccttctaacagacaggaccctcagctgcaggtctgttggaataccctgctgtgtgaggtgtcagtgtgcccctgctggggggtgcctcccagttaggctgctcgggggtcaggggtcagggacccacttgaggaggcagtctgcccgttctcagatctccagctgcgtgctgggagaaccactgctctcttcaaagctgtcagacagggacacttaagtctgcagaggttactgctgtctttttgtttgtctgtgccctgcccccagaggtggagcctacagaggcaggcaggcctccttgagctgtggtgggctccacccagttcgagcttcccggctgctttgtttacctaagcaatcctgggcaatggcgggcgccccttccccagcctcgttgccgccttgcagtttgatctcagactgctgtgctagcaatcagcgcgattccgtgggcgtaggaccctctgagccaggtgtgggatatagtctcgtggtgcgccgtttcttaagccggtctgaaaagcgcaatattcgggtgggagtgacccgattttccaggtgcgtccgtcacccctttctttgactcggaaagggaactccctgaccccttgcgcttcccaggtgaggcaatgcctcgccctgcttcggctcgcgcacggtgcgcacacacactggcctgcgcacactgtctggcactccctagtgagatgaacccggtacctcagatggaaatgcagaaatcacccgtcttctgcgtcgctcacgctgggagctgtagaccggagctgttcaccagagctgttcctattcggccatcttggctcctcctccctctctagatactagttctttgtgagatagtggtttgctgtttttttttccactttgcaacttgtcatctcatcctcttaacatgggcttttgcatagcaaaagtttttaattttgataaaattaaaatcatggtttttcttttatggattttgcttttggtgtcacatctaagaactttttgcccagccctgaagattttctcctgttttttcctaaaagttttagagttttatattttacatttttttgcacaaggtgtgaggtttagattgaggttttgtttgtttgtttgtttgcctgcagatatccaattgttccagtattatttgtttaaagcgttttttttgttttttgtttttttgttttttttttagacagggtcacactctgtcaccccaggctagagtgcaatgcctcaatcacagctcactgcggtctcaacctcctggattcaggtgaccttccaccttagcctctgaagtagctgggactgtattagctgagaccaccacccctggctaatttttgtatttttttatagagatagcgttttgccatattgcccaggctggtctcgaactcctgagctcaagtgattcacctgcctcagcctcccaaagttctgggattacaggtgtgagttgccatgccaggcctaaaagcctattggattttaggattacttttgtctggaattgtcaaaaagcagttgagcacatttgtgtggatttatttctggaatctctattctgtttcattgatcttgggtctattcctttgccaatacaatatagttttaattaccataagtcctggaattgggtagattgattcctctcactttataattaaaatggttttagttattctagtttccttccttccttccttccttccttccttccttccttccttccttccttcctttttttgagatggagtctcgctctgtcatccaggctggagtgcagtggtgcaatttcagctcactgcaacctccgcctcccaggttcaagcgattctcctgcctcagcctccccagtagctgggactacaggcgtgtgccaccacaccaggctaattttttgtatttttagtagagatggggtttcaccgtgttagccaggatggtctcgatctcctgacctcgtgatccgcccggctcggcctcccaaagtgctgggattacaggcatgagacgctgtgcctggccttattttctattttctttatttcacgtggggtaaatgtgaaatattgttactgtatataatgtatagtgataaattcagggtacttaggagagtcatcacctgagtacaacacatttttgttgactatagataaccctagtctgctatcaggtattgaatttattccttctaactatatgttttgttttgtttttttgagacggagtctcactctgttgcccaggctggagtgcaatggcgccatctgggctcactgcaacctctgcctcccaggttcaggtgattctcccgcctcagcctcccaagtagctgggactatgggcatgtgccaccacacccggctaatttttgtatttttagtagagatgggatttcaccatgttggccaggctggtcttgaactcctgacctcaagtgatctgcccaccttggcctcccaaagtgctgggattacaggtgtgagccaccgcgcccggccacttctatctaactgtatgtttttaccatttaacctacgtctcttcatcctcccactcccaccccactcactcttcccagtttctgttatctgtcttttcgctctctacctctgtatgataaaatcgtttagctcccacatgtaagtgagaacatatgatatttgtttttttgtttctggcttatttcacttaagatacagttcaattcacattgctgccaatgacatgattcctttctttttatgactgaataaatagtattccattgtgtatatgtaccacattttctttatccattcatccactgatggacacttaggttgatttcatatctttgctattgtgagtaatggtgcaataaacatgaaaagggaggtttccctttgacatattgatttattttcctttgggtagatacccagtagtggggtggctggatggaatggtaattctgtttttagttttttgagaaatctccatactgttttccatagtggctgtactagtttacattcccaccaacagtgtgtaagagttcccttttctctgcaccctcatcaacgtttgttattttttgtctttttagtaatagccattctgacctggggtaagatgacatctcattgaggtttcaatttgcatttctctgatggttagtgatattgaacattttttcatatatctgttggccatttgtatatcttcttttgagaaatgtctacttatgtccttagcccacttttggggatttgttttttagtgttgttatttgagttttttgtatattctggatattactctgttgttggatgaatagtttgcaaatattttctcccattcaacggattgtctcttcactcagctgattgtttcctttgctgtgcagaagctttttagtttaatgcagtcccatttgtctctgatttttgcaatagtctcaggaggattgatattaattcttctttgtatgtttggtagaattcagctgtgaatccatctaatcctgggcttttctttgttgggagacttattattgattcaatcttgctactcattatccatcgttaaggttttctttttcttcctgattcaatcttggtaggttgtttgtgtccaggaatgatccatttcttctaggttttccagtttgtcagcttatagttgttcataacagtctctgatgattttatgtggtatcagttgtgacatcttctttttaatttctgatattctttatttgggtttcctctcttcttggttagtctagctagtggttttaagattaactttgttaatctttttgaagaaaaatttttttttttcattttcttgatgtattttttttagtctctattccattaaattctgctctgatctttattatttccttttttctcctaattttgggtttgctttgttcttgcttttccagttccttgagatgcattgttagattgttaatttttaatctttctactttttcaatgtaagcatttattgatataaatgtccctcttattactgcttttgatatatcccacagattttgctatgttgtgttcgatttttatttgtttcaagaaatttgaaaatttccatgttagtttctttgttgacccaatggtcattcaagatcatgttgtttaatttccatgtacttaaactggactttacaccagtttaagtttttcttggtgttggtttctagttttattccattgtgctctgagaagatgcttgataggattttgatttttaaaaatttgttggctgggcgcagtgtctcacgcctgtaatcccagcactttgggagaccaagatgggtggatcacaaggccaggagatagagaccatcctggctaacagggtgaaaccctgtctctactaaaaatacaaaaaaaaaaaaaaaattatccgggcatggtggcgcatgcctgtaatcccagctactcaggaggccgaggcaggagaattgcttgtacccaggaggcggaggttgcagtgaatctcaaaaaaaaaaaattgttgacactcgttttgtgacctaacatatggtttattctggagaatattccatgggctgatgaaaagaatatatattctgcagttgttggatataatgttctgtaaatatctgttaggtccatttggtctaaagtccagtttaagtacaatgtttctttgttgattttctgtccagatgatctgtctaatgctgagagtggggtgttaaagtcccccatccccagtcattatattgtagtctttctctttagatctagtagtatttgctttaagactctgggtgctccagtatggggtgcatatatatttagaattgttataacttcttgctgcattgatccatttatcactatatagtaaccttctttgtctttttttaattgcttttgacttgaagtctatcttatttgatataagtatagctactgctccttgcttttggttttcatttgtgtggagaatatttttccatcccttttagtccatatatgtctttactggtaaggtgaatttcgtgtaagcagcatatagtcggaactttttttttatttattcagccattttatatcttttaaatggagaatttaatccacttatattcaaggttattaatatgtgaggttttttcctgtcatattgttaattttttttctgtttgttttacatattatttagtgttttctttttctcctattgttcattgtgttttagtggatttctgtagtggtaccatttgagtcctttctcttcctcctttgtgtgactgctttacctatgagttttatactttcatgtgatttcataatggtaaatgttattatttcaatttcaggtttaggactcccttgaacatttcttgtatgtctggtctagtgataacaaattccctcaatattcgtttgtctgttaaagactatttcactttgatttatgaaggatgattttgccagatgtaatagtcttggctagcaggtttttctttttttcctttcagcactttaaatatatcattccattctcttctggcctatgcgatttctgctgagaaatccactgatggggtttccatcagactagatgctttttttctagctgtttttagggtttgctctttatctttgacttcagacagtctaactataatgaccattttacattgtatctctctggacatcatgagcctcctgtaactagatgtctaaatatcttgctagacataggatgttttaacatattatttggttaaataggctttttagtccttctgttctttctttccccttagggatactgataatacataaattcaattgctttgtgttatctcaaatgtcacgaagcttttgctcattctttttaaaaacttttgactggattatttcaaaagacctgtcttcaagttctgagattctttctcctgctcgatctagtctattgttgaagctttcaaatgtattttgtatttctttcaatgagtgttcagtttcagaatttctattggttcttttaaaaaatatctatctctttggaaatttctcatttatattctgaattgtttttctgatttctttttattgtttttccaaattctcttgtatcccactgagcttctttaatatcagtgtgtttaataattccttctctgggatttcaaaaatttctttttgattaaggtctattgctggagaattgtgttcctttggagatgtcatatgtccttgccttttcatgtttcttgtgttcttatgttgatatctgcacatctggtataacagtttcttcttcccatttttgaatttacttccataggggaggatgttttcctgaagatgtatctgtggtgttcattggctacagcatttggcatttatttatttatttttatttttatttatttttttgaaatggagtctcgctctcttgccaggctgaagtgcagtggtgcaatcttggctcactgcaacctctgccttccgggttcaagcaattctcctgcctcagcctcccgagtagctgggactacaggcacacaccaccatgcccagctaatttttgtatttttagtagagatggggtttcaccatgttagccaggatggtcttgatctcttgacctcatgatccacctgcctctgcctcccaaagtgctgggattacaggcatgagccgctgcacctggcccatttttgcttttattctgggtactttggctgcagcgttagtagtatatgtgatttcatcagtgggttagggtacagttattggagtctgtggtgaagttgtgctgtgggatgccagatgggctggtctacaggccccaattgtggcagtggtggtctgagtatgcctgtccgtgtttcccagggttatgtatgcgggcactggtgttggtggttaccagaatgctgatcattgggcctccacatggcttgcttggatgctggcagtggtagtggtggactgggcaaggaggtgggttcttggggccctggacagctagcatggcacaagtgatggcagtagcagtggcaggataattatctgggttccgagagttgtccttttatgatggcagtgggtgtgacaggctgtgtaggacagtctccaggactgcaggtggtacttgcaagtaggtgccagttgaggtgatggcagctgagagtttaggcccaacctcaggaccccagaaggagtactcaggtgcccaaggtgcccttgtcaccctccaaggccctggcctatgtgctgtgtctcagagaagggagtgaagctgggttgggtgggcttgtgctcaggcccttcaatggtgggagcaggcagcagtcatggtgggtaggggtcagggcaatcctcaggtctcaggtggaatgcatgggtgaggagtggtagtagccatgctgaggtcctcccactggagaaggtggggctgacctctgtggctacagcctgggccagtaggtggggaatatgcacctgtctcatgcttcacagccctggcggggcttaccccccagccctggcagcagccagccacacctagcttgagcccttaccttgctgcaggagtccccaccagcttgtgactaagtcccagtggcaacttgtgcctgttttcctcccagtctcagccccggcagcactcacttcccagcattgtcagctgcagcccatgcctcatttgattctcagtctcagctgtgggagctcattcccagtttgtgccccagtctcagcagcaatagcctgagtttccctaatgcttcagtcttggtgctgctggccaccaggatagcatgtgcatctgccaaagactaggatttaaaatggtgccttgctgtaactgtttgggtctcagaaaaagtgtgggacacagcatgagttcccttcctgggacaattttgtcccccagtctactggcagctccctatgtatgttttcagggcttaggagggttgaggaattctctcacggtcaggactacatgattccatggtgggaatgagggccaccagaagtctctcacttactctgcccacattgagaagtcactcttggctgccagctgatcctagccaagcaggctgcctctcctcctccttccttgcttttggtgtttcctgtaacttttctgttgagttccagtgttttcttttggataatgtattcaaagtgtgactgtatatacatgatttcggttcttctaagtggaggaggtaagcatgaaatgcttctggtcagccatcttgaagcccctccccctccttttatgtattatagttcctttgacttttcttataaaatttaggaaaaacttatctatattaacaaaaagcttgctgaactattgataggaattgcattaaacctatatacaatttgggggagaattggcatcttaactgttgaatcttctaatgcatgaacacagtatgtctctccatttatttaaatcttctttgatttcatttagcattgtggagttttccctgagtatattttgtcagatttacacctatttttttagtgattataattttaatttctgtgtatgtgtttgttgctggtatatagaaatataatttttttttgagatggagtcttgctctgttgcccaggctggagtgcggtggtgcaatctcaactcactgcaacctccacctcctgggttcaagcgattctcctgcctcagcctcctgaatagccaagattacaggcacgcactaccacgcccagctaatttttctatttttagtagagatggggttttgccatgttggccaggctggcctcgaactcctgagctcaggcgatctgcctgccttggtctcccagagtgctgggtttacaggcgtgagccaccaggcctggcctggttttagatttttttttaagattctgtgggacttttctacatgtgggagagcatatcatgtcatttgcatatagggcaagttttactacttcttttataatctatatttcttttacttattttgcttgccttattacagtggctagaactttcagtagtatgttgaataagagtggtaagagtggacattcttgcctattcctgatcttggagaggaagcattcagtccttcaccattaagtaagatgttagctgtaggttttttgtagatggtctttatcaagttgtggtaactccctgcctgctcttaacttgaagagagtttttggttctgtcttgtttttttttttttttttgagatggagtcttgctctgtcacccaggctagagtgcaatggcttgatcttggctcactgcaacctccgtctcccaggttcaagcaagtctcctgcctcagcctcccaagtagctgggattacaggtgagtgccaccacacccagctaatttttctatttttagtagagactgggtttcaccatgttggtcaggctggtctcgaactcctgacctcagctgatccgcctgcctcggcctcccaaagtgctgggattatggtgtgagccaccgcacctggcctgttttgtcttgtttttcataatgaatggatgtgggttttgtaaatcctttttctgtgtcaattgatatgatttatgattttattctttagtttatcgacatggtaaattacattaactgattttcaaatgttgaaccagccctgcatacctagaacaaatcccacttggttatggtatatagttctttttgtacattactgaatttggattgctatattttgttgaagatttttgtctaagttcatgagatatatttttatgtagtttatgtatatattttcctcatctgattttggtatcatggtaatactggcctcataaagtaagctggaaactgttctttcctattctatgttttagaggaaattgcattttgttgatgttgtcatctttaaatgtttggtagaattttccattaaaaccatctgtgcctggagatttcatttttgagagctttaaagttatataattaaattacattaattaataaattgatttgttgacataatttaattatgtaattaaattagttatataaaatgtagctttgtatttatataggtttatattccccaaatagctggctagagaatttttttaaaactttaccagaggaaggtgtcagaggggaccattccttgtcctcctgtaccactctaccccttttcctttccatcccttgggtgatttcaagcttaggggtgggtgggggtcaggaagactgccttgtgggtgctccaggtgtttccccacagaacagaccatggatgctgagggtgagatggaggtgcatcactagggccctacattagagaaagggcagggaaaccaggtggggtgtccccagcagccttccatccctttgtggtcacagggcttgataacaaacagcaggtgccaatctggagataggcacagagatgaaaagtcccaaatgaggactccagccccacccccactatgctgtagatgctatcactgcactgtaacagcaaagggaggcaggtgttgggcatttaaacaggaacatagcagagagttcagactgtacctttgggtgacatgtgaggatgaagtttttggctttgtgactgcccaaagtccttatgagcaggttcagcttcataggcctctttcattctctacaaatcatagtcccactgtgtgcatactctgggcacactgtgtctgggtacactcggggcatacttgtgtcccagactggctcaggggcctgcagtctttccggggtggactcacagagctggcttggtgtcccacttgaatggactctctccacagcagatctgagcctgtacttcccacctggcaactgatgacccatttggccttgttgagggacatgaaacgattgctttggcatctgaggatggcagtagcaggagagggaggtgatgagaatgttgcagtagtctgcattggttttccatgaatgattaagaggctcacgtttatgcaacttgcttaaagccacatagtaagtggcagagtcactggatcctagccagtctaacagaagagtcataaataatgtgactcagttttctcatttgtacaatggaaaaactaatggtctttacctcccagtatggtcatgagaattcaataagacagtcatgtaacaatccagcacatggtctagatagaacatggtaagtattagataaatattagtcattattattattaatattgatatgtcatttatcaacaaagtcagaattataatggtggtacccaaaatttagtgttaacataagcatgataaaattagagttgtttctggtttataaacatgtgaggctttttttttttgagacagagtctcattctgttgtctaggctggagtgcagtggtgcaatctcagcttactgcaacctccgccagtgaggcccttcattagacactaatttgaagctatggcattcccccactatgagcccacctgtcagccaggctatctgccttgatcctagatgaagtggccattctgcctgcccctcagaacctctctgtactctcaaccaacatgaagcatctcttgatgtggagcccagtgatcgcgcctggagaaacagtgtactattctgtcgaataccaggggtgagttttttcttttaatagttcttctcccttaagcagaagttggttcctgaaggcatagcccttcctcctgagcccaaggtggctttttgagtccagggatagattatccccaaagatctaccccctctgtctgcataggcattgaaagagttgaagaagcaagggaaattgttctgtggatttgacagtgaactctctgggaagatgaatgtgcataacacattttggtggagttattttaaaaagtgaatcaactgtccaatgggtttgactctgacttgagatggataaatcactggagactcagatcctttaagggtggaggagtcctcacttttcctgactataagcttatacctagagccaaaacgaactataatcctaaaggtcagctggccctggggctgagcaggctctagtcttctccaggtgttcaggtgcttgcagctattgaatagtgataaggacacagaaattgctccatatatttcattaacaatgaatacagactgaacacctacatgtgtagacattcttctaggctcagggatacagttgacaaggtttctggattttgagagcttacatctagaggaggatacagatgataaatatactaggccagcattctctagtatggtagccaccagccacagctggctatttaaatttaaattaaattaaattaaattaaattaaattaaattaaattaaaatgtctgtttcctgccacactagtcacattttaggtgttcaatagccacatgtggccagtggttaccatattgaacaacatcgatttagaatatttgcatcatcacagaaagtttatttttggaaagcactgctctagggaattttggatagtaatcagtgctaggaggaagctaaaaggctgatgccatagagagttgacactgaggctcctttatattagatggcctgggatggcctctctgaggaggtgatatttatgccatatctgaaggacaagaggagccagccatgcgaacagcaggggcagagcgtttgagatggagtgaacagttagtcaaaggtcctaaggcaaaaagtgctcagcattttggagaaatgaccaatgtggcaagaatatcacgcttcggagcagagtgagagagaaggccaaagcatcttgtaagaccactggcaagagtttggatcccattctaagtcctgtaggaagccattaaggagagaaacgtcacaatctgctgagtggtgaatggttttgagaatggcaggtgtccaagctgggagatcacagcaaggcaaggaatgacagtggctgagattagggtgatgaccctggagatgaagagataaaagagatccagacacattgatgtttatgcctagctttccctatctggcaataaaaggagtaagggacgatggatggttggtagggaggagagtggaggagctaggataatgagaaagtacttattttacttacctgtacaaagtaggtgaacgaagtcagttacttgcaaccataactgagcctgtgtcagaggggctggtgtaactctgtgccctcctctctttgacagggagtacgagagcctgtacacgagccacatctggatccccagcagctggtgctcactcactgaaggtcctgagtgtgatgtcactgatgacatcacggccactgtgccatacaaccttcgtgtcagggccacattgggctcacagacctcagcctggagcatcctgaagcatccctttaatagaaactcaagtaaggcacttctctccttacactcccaccccaaccagcccctcctttaggaaccatgttcacctaaactttctagactctttttagcatcagaatagtcctgcaaagccagagtattgtgaacacaaacaacccttactggtatatttgaaaaattgccaactgctttctacatgctgctctctgtcatgccctttgactactcaagtcattcctgactgtctgtgtcagggtgtgcaggtgttggggatgctgacattgggaacctggaaggaaagctgctctggaagtgaagaggtggcaccaggactgctgctccctactctgattgtgcctccataaattgtgcctcccacttgaggcctcattaactgcatatttactgcccacgtaagcagctttgttgtgcaagaggatttatacacttaacagagccaccagaaaattgcccttctgtaatgacttctgtgggaaataaataacttttcttttggagtagtacctggaaaaggattgagaaagaagtaatagaggaatccagataggtggccaaatgtggctgagtacaagcactggtcattgtataaaaggacatgtgtgtttgcggaacaggagaggcaagggctgatgggcagggggtagggaagcagttgatcatgtggtgaagggctttgacacgaagcttgaccaagtcagtagagggtagccaatgaaagaggagaggatctagaccaggtctatctctttttttttttgatacggagtctcactctgtcacccaggttggtgtgcagtggcgtgatctcagctcactgcaacctctgtctcctgggttcaagtgattctcctgcctcagcctcctgagtagctgggactacaggcgtgcaccaccatgcctggctaatttttgtatttttagtagagacagggtttcactatgttttccaggctggtctggaactcctgacctcaagtcatctgcccacttcggcctcccaaagtgctgggattacaggcatgagccatggcgcccggccgaccaggtctatcttacaaagcaacactctggctgctgtgtggaaagtgaaccagagtagggcaagcctgcaggacaggggaagagtgaggagggggttgtaatactcctactgatcccaagagtttggaaggggatgggaaggagatgatgaatccaagaaacatggctgatttagaaaggacagagcttaggaatcaagtttgtggggacagaaaagggagagataatgatagtattcagctgtcaaatggaattggtgagaacaccagctaaggcaaataacccagggggaaacaactggtcttgaagaataggagacacccccggctttgagactgagatttctacaagatgtcatcttgtggatgtctgactggcagctggaaatcagtccctgaggcttagaaagctcaaaggcagatacataacacaaagtggttttgtttgtttgtttgttttgtttttgaggtggggtcttgctcttttgcccaggctggagtgcagtggtgccaacacagctcactgcagccttgccctcctgggctcaagcgatcctcctgcctcaggcccccaagaagctgggaatacaggcacatgccaccatgcctgactaatttttttgtatttttggtagagatggggtttcaccatgttgcccaggctggtctcggactcctgagcttaagtgatcctcttgcctcagcctcacgaagtgctgggattataggaatgagccatcgcacagggccatcacaaagttaacagctaaaggcttggaagtagacgagactgtttagggacaagacgctgaagataaagagaggacaaggtcctggaaaacctcagactttaaaatgtggatggagggaagggcaccagggtagaggataatggaaaggagaatagaacagctcctgagaggctggaggaagcccctggatgggcccttgagaaagtaacttcatggagtggaaaggatgaccatctggctgctggagtggaggattgcatggaggtaggaaggagcaaggaatgggtgggaatgtaaccagtttagagctgcaggaaaggcaagataagggtcttctttggtctctgttttcgtgatgtggcagaagagcttctgttgtgaaagatggtggaagaaggtttggggcagaatttgcagcattcggatgagtcaaaatttactgaggaatgtatgatattaggtggaaattaggaaggtttagaagaagaggagcccaagctgaagagcagaggagggaagggatggggcaggaataggaccattggaatgggataccaaaaggaattttggtgcagattgtgggctcctttgcccaggcctccttcccaggcaccaggactggaatggaatggaatggaatgacttcatggaatggagaggatgatcatctggctgaatttggtccaagaggagttggtcgaagtggcaggatctgggggagattaaggggccctgtagggcactgcaaaactgccactacctgcagtgcccaggcagcattcagcaccacctccctctggctcctaagagcatggggatccagccaagaccattgctgggggctggcagctgttgctggaaagcaggcatgggtcacataaagataagggagtgcctacaaaactatgtgggtggggatgtgctgtaaaaccttgtacttacgaaggcctgtataaacaggaaaagagcttgctgcaggggcagctgaggaacaggagtctgtacttgcatcagaagatggaagatacggttctatgatatccaagcaaataggctgggatggcgtcatgatctcttaagggcattaagtttgtcctcttccatttgaaaaaggccactcagacttctccccaggaatgtgaaaaatcttgatttaaggctctcctgaaaaggatccctactgtctctctctctctctttttttttttttttttgagatggagttccgctcttgttgcccaggctggagtgtaatggcatgatcttagctcactgcaacctccacctcctgggttctagcgtttctcctgcctcagcctcccaagtagctgggattacaggaatgtgccaccatgcttggctaattttgtatttttagtagagacagtgtttcactatgttggccaggctggtctcgaactcctgacctcaggtgatccgcccacctcagcctcccaaaatgctgggattacaggtgtgagccgctacgcctggctgagggtccccactcttaaagggaaactttttattgagagcagaggtttttaactttgcacatttgagtcacaggggagctttagaatcaattatgcctggggctcttccccagagagtctggtttaaatgatctgcatgcatcttattcactgggagtttaaaattctccccagattattttcatgtacagccagggttgagatccactagcaaagaggctaaacaccccacacaagggaggtagaaatgtagaaagaaatgggctcaaattctgtagattaactctgtgactctgggcatgtcacttaatctctctgtaaaacaggaacaatgttaggctgggcatggtggctcatgcctgtaatcccagcactttgggaggccaaagccagtggatcacgaggtcaggagatcaagaccatcctggctaacacagtgaaaccccgtcgcctgtagtcccagctactccggaggctgaggcaggagaatggtgtgaacctgggaggcggagcttgcagtgagccaagatcgggccactgcactccagcctgggcgacagagcgagactccatctcaaataaataaataaataaataaataaataaataaataaataaatataaaacaggaacaatgtttaccttctaaagcttcctgggcagattaaatgagataagcatgcagaaggcataggacagaggttcctgccccaacgctgtcaaacaactcttctctgaactgaaacttcagattattttctctaattctggtctcaataaagatggagatcagaagacccaattctgatgacatctgacagaaaagttgaggagtcaaatatctgtttcccttctgaaggtgtttcagaggtagtgctagtggtgctatgtggtcatatgaacctcaggactgagtgtgttttgcacagttggccctggcttcccaagtcctcctgacccctgtccaggtagctcttcaacaagcaggcataaacacttctctgatgagggacgcgatggggaaaggctttgttctctgaaaactccctgtaggaactgcctttcttctgagtgtccacttgtgtccggaattggtgggttcttgatctcactgacttcaagaatgaagccgcagaccctcgcggtgagtgttacagctcttaaggtggcgcgtctggagtctgtcccttctgatgttcggatgtgttcagagtttcttccttctggtgggttcctagtctcgctggctcaggagtgaagctgcagatcttcacggtgagtgttacagctcttaaggcggcgcgtctggagttgttcgttcctcctggtgggctcgtggtctcgctggcttcaggagtgaagctgcagaccttcgcggtgagtgttacagctcataaaagcagtgtggacccaaagagtgagcagtagcaagatttattgcaaagagcgaaagaacaaagcttccacagtgtggaaggggacccgagcgggttgccactgctggctcgggcagcctgcttttattctcttatctggccccacccacgtcctgctgattggtagagcccagtggtctgttttgacagggcgctgattcgtgcgtttacaatccctgagctagacacaaaggttctccacgtccccaccagattagttagatacagagtatagacacaaaggttctccaaggccccaccagagtagctagatacagagtgtcgattggtgcactcacaaaccctgagctagtagacacagggtgctgattggtgtgtttacaaacttgagctagagacagagtgcccattggtgtatttacaatccctgagctagacataaagattctccaaggccccaccagactcaggaggccagctggcttcacccagtggatcccgcaccagggctgccggtggagctgcgtgccagtcctgcgccctgcgtccgcactcctcagcccttgggtggtcgatgggactgggcgccgtggagcagggggtggcgctcatcggggaggctcgggccgcacaggagcccatggagggggtgggaggctcaggcatggcgggctgcaggtcccgagccacgccccacgggaaggcagctaaggcccggtgagaaatctagcacggcgccggtgggctggcactgctggaggacccagtacaccctccgcagccgctggcccgggtgctaagcccctcattgccggggccggcagggccggccggctgctccgagtgcggggcccaccaagcccacgcccacccggaactccagctggcccgcaagcgccgcgtgcagccccggttccagctcgcgcctctccctccacacctccctgcaagctgagggagccggctccagtcttggccagcccagaaaggggctcccgcagtgcagcggtgggctgaagggctcctcaagtgcggccaaagtgggagcccaggcagaggacgcgcccagagtgagcgagggctgtgaggactgccagcatgctgtcacctctcacactgaccccagggaaggcagatttagcccagaacatgccccacccctttccaatccaagaccagtgatcagggtggcccttctggtcctgcagtatctgggtctgaaaggcaagtataactccatcaccagtaaccagggtgtagagactatctgtgtgggcccttctgttcttggtctgctgatgggaaggtatccacaagggctgtgggcctctctgctggggaccttgcaatatggaagatgatgtttgtacttatgctgtaatttctagagttgattattggaatctgtaaaaagcctgtgggctgggcacattggctcactcctgtaatcccagcactttgggagctcgaggtgggcgaactgcttgagtctaggaattagagaccagcctgggcaatgtggtgaagtcccatctctacaaaaaatacaaaaaacattagctgagtgcggtgatgtgtgcctgtagttccagctacttgggaggctaaggtgggaggattacctgagactgagagttcgaggctgcagtgagccatgatagtgccactatacactccagcttgggtgacagagtgagaccctgtctgaaaaaaaaagaaacaagaaaaaaaaaagccggtgacttgccagctgagaactgggctgagaatagaatggccaaccctattcacaggctgctcatctgctgatatgtgaaagttatcagtagccagtacatgccacagatctgtgtgagctgtgggaatgcacatggccctgccaggtatgctcattcctaaggggcaaagactggggctggctgttcagtatagacctgagctcacataggcatttggcaagcattaaaatatagcatctgctcacttagatgagccaaagtgaggagcaatttctgctgaaaaagtggtgacaggaggggcatggatcataaaattttaaaagagcaagagataatgtttactggagtttttaatcacttttcttgtgtatatgtgcctcctggagaaggaacagtggactttattaaaggattaaaaaagaagagaattatagcatttgtcatttgtttcttcatttattcatcactcaaaaagcatttactgagcacctgctgcatacaggagagtatttgtgtacatgtttccatgagcttgaagctacagcagactcccttcctctcctacggagacggacatatttccatacatgacccggtcattgtgttccagggaaatcaaccctgtctggggctggctttgactctcctgttgtcttgccaacagccatccttacccgacctgggatggagatcaccaaagatggcttccacctggttattgagctggaggacctggggccccagtttgagttccttgtggcctactggaggagggagcctggtgccgaggtgagactccagccttggcctttgggtcaggcttcgggaaagaaggcacagatttctgagggtgagcaagggaaggctgcccctgctcactgggtgacctggggatgagcagtcctgggtgaagtgtgcaaaagatgagtatgctgaccaccccatcagcctcttctccaaagaacttccttggtccattcaatcatgccttggctgggagcatttccaggccagatctgctgaagtatggggctgcccccttaccctaaactctaacatagttggaccacaatatcttttcaatgccttttttctccctcatcagctcatctcctcagccacttaggggcagcaatcaggatttgtagatcaacaggatgatttcaaaagcacacaacgctggtacaaacctcctgagggtgtgtgtcttggcagggtgaagaggtagaggcagggatccaggagttggcttatgagtaaacccatctaactatgagcaggtgggccatgcagaatgctcaggtggggtgctgccctccccatgggaagggtgctacagcctgggatgggtgggaggccagccctcacagagggaatagccagacaagcagcagcagtatgaggagtggagcacgatcaggaactaggggacactcagacctgtggagcctctgtccaagcatatgatgacaaagcttagaggcccactccaggcagcacaagcaaagataggctttatcacaaggactaatacggtgcaataaggagctctcacagatctataaacagctggcagagggccaggctccagcctcacttacccagggcccttgctcccctctggtgggtccctgctcttgcacactttctatggccctttcctagcttattccaggctgtgatccctcatcaatgcttcctactcatgcctatgatgtgcccccagcctctcgaggcctctcaggcctgacttctcctcactgtgtcctctctcctttgtccctgcttctagctctcggtattcagtttcccaagaccaaatcctcagaagaagaatccaattggtcttgctcgtcttatcaggccaagcttcaggggttgctggtagccagctcgcctctgattggacccttctcaggccaagggtacccttgatcttatagcagtatctggactaagagcacatgcctcaccacccattcaaagagggctgtaggttgggtagcttcccatgaaaggtggtgtgggcaggtacaacactgggtttcggtatttacccctgctaggcaagagcccacggtaggatatggcattgccagccaggcagatggagtagtgttggggacagggcagagcctgtgcaggaggaagcatgcagctccctcagattcgctgggatggagcccactacccacctttggtaactggcagggccagggctaagaggggagcatgtaccctgagtcatctaggcttggtccaggcaagcctccacaggatcagatgcagagcacagcctcagggaggggcatggaggtggaagggtgaacagacggatggacagatgggtggatgagtgaggaggtgctgcccgtggctccactgcacactgattccttggcagcagtggccatgccaagcccctgctcaagtcagggtctctgcacaaatgttaccctatcagagaagccttctctaaccactctgtttaagatggtgcctcctcgttaccatctctttgctctgctttttccttcacagtccttgtcaccacctgatgtgtatttttttatagtctgtttcaccccatgtaagccccatgagagcaaggactttgtccattttgttcaatgctaggtccctgtgcttagagcagtgcctagcacatagtaggtacttaataaatatgattgaatgaatgagtgcctgaatgaatgtatgtgtgagagggaacattctgtgtgcatctggaaaggaagtatctgcaactttccttccctggcactttttgccctttccagtcctgctgccttctgggaataactgctttctttttatcttttattttttgagacagagtctcgctctgtcgcccaagctggagtgcagtggcacgatctcggatcactgcaacttctgcctcctgggttcaagtgattctcctgcctcagcctcctgagtagctgggattacaggcacccaccaccatgcctggctaattttttatttgtagtagagatggggtgtttcaccatgttggtcaggctggtcttgaactcctgacctcaggtgatccgcccgcctcaggctcccaaagtgctgggattataggcgtgagccaccgcacttggccaataactgtgttttctggtctgtcaaaggaacatgtcaaaatggtgaggagtgggggtattccagtgcacctagaaaccatggagccaggggctgcatactgtgtgaaggcccagacattcgtgaaggccattgggaggtacagcgccttcagccagacagaatgtgtggaggtgcaaggtaaggatggcttctctgtccctggagccctgcacaggtgatagcccctcctggcatatctcagaggcctgctgggttcctttggttctgagtttttccttgatttcactgacctccctcatggactgggtgggttcccatagtgaaattatgtttgtgaatctgattcccctagaggcaggagtccaccctggggctgggtggggttacgagcagctgtctgaaacactttcccccttaaagcttcctaggcctgggggccaggtgttgcaagactggtttaccagatggttactgcctgtgaatcagagtgggctgcaggagaggcagccacaggcttcagagggtcagaccttggaaggaggtgctacgttgtataacaccacagccttcttcatctggaagggaccttatggaaagcctagagaatcctcttgtttgaattactcttttcccttgaatattttaaggtcagaaaacctacaatgtttaaaaaccctttgaaaagaagcaaaaccaaacaagagcctacatcccatgatctgtcactcaaacatcactagttacatttttgtgtatagccttttagtctttaaaaatagaactatttttttaaaaagacgaattattatcttaattatatagtatatttatttatttatttttctttctaaaaaaatttattttgtttcatatgtagagacaaggtcttgctctgttgcctgggccttggcctccaaagagctgagattacaggtgtgagccaccatgctcagctcatttagggcatcatccttcagtcattgccatgtgtaggcacatgctgtagtcctataacatacacattttgtgcctgctttttcacaaatatcatatccataacatttttcatgcagatttcctgattactattttatgctactttataaaatcatacaagtcaagcttgcttaacaatccaaacaacaccaaagcatataaagtaagaggagggccaggcatggtggctcacacctgtaatcccggcactttgggaggctgaggcagaaggattgcttgagcccaggagttcaacaccagcctgggcaacatagcgagacctcgtctcattttaataaataaataaagaggtgagtgtgccccattctcctgcacatcactcaggaggtttccgttggtgagtctggcgtttaatcttccaggcgttgtctgtgtggtaccaatgctcacacacatagatgggatgatattgtacctactactctgtacttggcttgtcttcactcagtagtatattgtgaacatcttttcatgtcaatacatatggatctacctcattcttttttattatactttaagttctagggtacatgtgcacaaagtgcaggtttgttacatatgtatacatgtgccatgttggtttcctgcacccattaactcgtcatttacattaggtatatctcctaatgctatccctcccccaacccccaccccatgaccggccccagtgtgttatgttccccgctgtttgtccaagtgttctcattgttcagttcccacctatgagtgagaacatgcagtgtatggttttctgttctcgcgatagtttgctcagaatgatggttctccctcatttttaaagagccaggtgtggtggctcatgcctgtaatcctggcactttgggaggccgagacaggtggatcacctgaggtcagaaatttgagaccagcctgaccattgtgatgaaaccctgtctctactaaaaatacaaaaattagccaggcatggtggtgcacgtctgtaatcccagctactggaaaggctgaggcatgaaaatcgcttgaacccaggaggcagaggttgcagtgagccgagattgcgccactgcactccagcctgggtgacagagcaagactgtctcaaaaaaaaaaaaaatctatatgtcaatatatgtaaatgaaaggctgttgctctagttcagatgttgctaagaactgacttatgtatatagttgtttccttccttggaattagtttttggaattaaaatttcaggagttggggagaagtgaggatatgggcacgaaaaaaacagaaagaatgaataagacctactatttgatagcacaataggatgactatagtcaacaataacctaattgtatattttaacataacttaaagagtgtaattggattgtttgtaactcaaatgataaatgtttgaggggatggctacctattctccatgatgtgcttatttcacattgcatgcctgtatcaaaacatctcatgtaccccataaatatatacacctactatatacctacaaaaattaaaaataaaaaattgcaggagtggatgaaagggtatgaacactggtgtatctcttgatgcataccaccaaaatattttccaaaatcatggaaacaatgtacagtgcccccagccacaagtccaccagcttctccagtctcattgactgggctacccttcacattgcaggtgagtagcctggcccagagaggctaatggagttgctcaaggttacatagaactgagagatgggaaaataacctgtcccctcttctgcatctccagatgctcagatcgggccttttctgctacaattatttggtagaatgactgtgagctttggagccagtcctacctgggtaacctggggtagctcacttaaccattctgagcatagattcctcttctataaaagcagggatactcacactcattgtgaagaacaagcaactacacgtccagcccccagcatagttctggaaggcagtagtagccctagcctacaaaataggggcttgatatattgtagttattttctgactgttttctgaacaatttcctccataacatgaatcaatgccaagagtgaattgtgaaacacactttgttttcagttaccgcccagccccattctgtgctgttctctttcaatacctccccctcatcctgcccagggcttggcactctgccttcctcctggcagtggtgccaaggtacgtgctaacacagcaattggcttaacacatgatactcctcccttttgtgtcacaaggaaaagattttaatcttccctggggctttctggaaaccatgccttcatctggattctagaaaaatgcttttaatggtggtaattttggtcactagggcacacatcaaatctcaggattctgttatctgccgtcttagccaatgtgcagagtcaactccaggaaaccgggggaggctcaggattgaagttttaatctttgctgctgttttctaagcctgtttttatcttttgtttccaggagaggccattcccctggtactggccctgtttgcctttgttggcttcatgctgatccttgtggtcgtgccactgttcgtctggaaaatgggccggctgctccagtactcctgttgccccgtggtggtcctcccagacaccttggtaatagagtagttctttattcctttcagtataacactgaccagatgtagtttgggccttagctgggcatgggcacatgtttccatgtttctatcatgagattataggcatctgcacagagaggggagaggaatacttataaaatacttcatttctaactagaggtactggaagaaatctcccttctccagggcgtggtgaccttcctgaggcaagccacttctgctttctcccaggacctgggatggcaaagagagaagatgtgttgcccagcccaggatgctcagcattgcaggagtcactcatggtcttaccctcccagactggcctgctgagcattcttggcctcttcccacaattgtaacagcagctacacccaataacatgttccaacccaacttattcaattcacatgccaaaagcctcattgttctcagagtgaagaagatgtacatgggaggcatggactgtgttttgattttggtggggtagggtggggtgaagggacagcaacctggaccttgatagtgactgcctgagttaggggaccctacctgtattctcagatcctcatgaggtcagaattcttatcttactcctgagggccctggaccacaggtctgggtctctccagtgggtataggacccatgcacccatgcaatcgtaggggaaacacaaaagcaggcctccaacagctcccccatgttctctggctgcctctccagatgtttcccgccaacccccagacctcaaccacacaaagcagtgcaataaaacaaaacaaaacaaaaacaacaaaaacaaaatcaaaaagccccatccctgtcaccctagggaattctcacagttctctcctgggaagagggagccagtgtcagcttctgaaaagcaactaaagccagaactacctgcaacttatacatgcccatagctccttatcagcctggagtcactctttctgaaaggagtcatccttgtgacatccctgtggccctgctttctctccctaaacaggaggaataattcttactataattcagtcttcaggacacccctccactctgttattctaatgccagatctcccttctttcccatacttccaggtagtcataacgatgttagctgatactagtacagagctaagtgccagatactgttctaaggctttatatttattgactcatttcttttcataaagcttggcagtgtcctttttatcagttccccctccatccttctctgaatcacgaatggcttactgctatgcataaaggcaatgggatatatcataccctgggaaacagggtgggcctttattaccctttagcaagaacgtgagggtctcaaagtaccttgaagcataaaaggatatgtattctgcagttattggggaagtgttttatatatatcaattaggtcaaaatgtttcgtggtattgttcagatcatctttgtcatttttttttgtatagttgttttaatattgagagtaggatatcaaaatgccaccgagtgtgggcatatctgtttttctctctctctctctttttttttttcgagacggagtttcgctgtcatcgcccaggctggagtgcagtggcgcaatcttggctcactgcaacctccgccttctgagttcaagcaattctcctgcctcctgagtaactgggattacagacgcctgccaccacacccatctaatttttgtatttttaatagagacaggagtttcaccatgttggccaggctggtctcaaactcctgacctcatgatccacccaccttggcttctcaaagtgttgggattataggcgtgagccactgcacctggcctgtttctctctttatgtcagattttccttaatgtatttcgaggctctgttttaagtgtattcatattttgacatttaaatgtattcagattttgttatgattttccaagtaatggagtcttttatcattatgatatgttcttctttacctctggtaatattccttagtgtgatatcagtatatcttttttttttttttgctcactgtttgtatggtatatcttttttatttttttacatatttttactttaaatctatctgtatatttatatttaaggtgtgtctcttatagacagcatatagtcagtcttttctgttataattattttttggtataaatccattctgacaacctctgcctttaaattggtatttttagtccactaacttttttttttttgagacggagtcccgccctgtcacccaggctggagtacagtggcatgatctcggctcactgcaacctctgcctcccgggtttaaggaatcctgactcagcctcctgagtagctgggactacaggtgcatgcccccacacccggctaatttttgtattttagtagagacagggtttcaccatattgatcaggctggtcttgaattcctgacctcaggtgatccacccgccttggcctcccaaagtgctgggataacaggtgtgagccactgtgcctggcctccattaacatttaatataatgattgatatggttgaatttaggtccatgattttcttttcttttttttttttttttttcccctctgttctttttctgcctctttttgggttaattaaaaattttttttgaatttcactttagtgactttttagttattcttcttcacattactttttcatggttgtcctaagagttacaatatacatattcttaacttttcacagtctacttagagttaatattatatcatttcacatgaaatgtaagaattttggaataatttttgctttatatagtcatatatatttttaaggtatttaaaataatcttttatatttacccacatatttaccatttctggaactctttcttcttttctgagatctttatttccatctggtgtgggcttcctgtcattttataaaacttcttgactttttttaattataggtttagtaatgtagatctgctagtgacaaattctctttgattttttttatctgaaaatgtctttattttgctttcattcttgaaggatatttttgctggattcttggttggcaattttttcttactatattttcattttaaatattaattataatatttcaaaaataataacattttattttaataaagatggcatcttgctatgttgcccaggctagtctggaactcctgggcttaaacaatcctctttcttggcctcccaaagtgctgggatgacatgtgcgagagccactgcacccagctcttactactttaaaagtattgtttaattgtcttctagcttacattgtttttgataagaaaacatccatgatttttttaacatcattcccctatgtgaaatgtgttctttttctcttgctggttttaaattaccattggctttcaccagttaaattataacatgcctagatggggtttgcattatatttatcttgcttatagtatactgagcttcttgaatctgtacatgtatatatttttaagctacaatttggaaaattttcagcctttttttttctttttatttttttagagacagggtctcactctgccactcaggctggagtgcagtggcatgattatggctcactgcagcctcgaccttctgggttcaagtgatcctcccacttcagcctcttgagtagttgggactacaagcatgtgacagagcaaccagctaatttttaaattttatgtagagacagggtcttgctatgttgtccaggttggtcttgaactcctggctcaagcaatcctcctgctttggactcccaaagtgctgggattataggcatgagccactgcacctggccacagctaattattttatttttttgtagtgatggggttctccctatgtttcccaggctggtctggaactcctgggctcaagtgatatccttccgccttggcctcccaaagtgttgggcttaacagatatgagccactgctcccagcccatatttcttcaggtattttttttttttttgtctcattctcttctctccttctgtgagtccaatcttatttatattagaccttcagatattgtctccatagatacctgagactccattcatttttataaaaaacttcttttcctcttctttattcttcagattgaataattttattaacctatcttcttgttcactgactcttctgttatcaccagtctgattttaggcacgtctagtgaattttgtatttaaatttcagatattgtgtttttaaattctagaatttccatttgtttcttttttatagtaaatattctctgctgagattttctatttggtcatttattatgagaatattttcttctgtctttgagcatcattataaatacctttgtctgctttactttaaaatctttgctaatttcaccaggtgggtcatgtcaaggttggcctctattgatcgttttttatttggtgtaggtcacattttcctatattttgtatgtctagtgattttggattacagtctggatattgccaacaatatgttatagagattttggattcagttatgttcctctgaaaactattgattttttttgtttgtttatttgctttagtaagcagttagtttagaagaaagactcaactttggtctcctatgcagtaggcagttgatatctattagactgtttagccttagacagactggtaggagctttccccacacctgtacctcacacagttcaaaggtcaatcagatatttgggcagaatttatgtacagaattgcagctccccttttctggctctctcctttttgggatttttcctcttactttctaacttctgtgtttgcaccagtctctgttttttggcttttcaaaaacagtaagactatggcaccaagtgggacctgcctttaggcaaggagctgtgaaaaatgggaaactcacccagtgacattcccttcttccaagcatgaacttttagttgctctaccatgatttaaggaatctgtttttaatatttgggtcagttttaaaagttgtaatctgaggagtgttggtctgattggtgctctcctgacataagtggaagtagaaacctgcaataaaagaggaatcccttgacctaatccaaagcgatggtaatggtagggagcatttctggctgaggcatatcaatagctcttctttctcatacgtggtgaaaagctcagccttcctcagctgggctccatcagatggtcttctgttgtgatttctctctgaactctgctgcccatgcttactcttacaggcaactacactcttaacactctctcttatgttttctttactagttctatcagggggccagaagagtttttctctctacctcaagatcaggggaatgaagatcttcccaagacccagtgccttgttagtgaggaacagggtaaagagacagggaaagaaccatgtaaagggttaataacttacaggatttcaggtacacaagaagagtcctcaacagctaagatctcctaggaatcctgatgtatcatgagccacaccctaaaatcagcttttggagaaaacgaaatagcttagatgagaccagagactggaagactctgtgacagtatgaccaatttcatccatggcagatagacgtcactacccttgactaccttttgcttccctgttctctgttaccattcttcctacatcattctgatgtctgttcctacgtgcattcccttccgtaaggcttttaacttttatccttacttcacgctaagatttttaaagtggacaaattctctgagtctatgcatttccccacagtgctgtgtgagaagcagatcactagcgtccattgaatcccgcacaaattcttgagctgtgaatcaatactgccacctcccctctctccgctatgactttagcatagcctagctgcatttctacatgtgtgttacttacagatactaccccaaactattaaaaagtgatttctagccatccttgcaaagtcaactcatctttccaactaaaccatggaaaattaccaatcagaaatccttgacaattcttcaaaagggtctactgagtttgtgtttaatttatctgtatggacgaaacatttcatgtctacgtctaaaattttatagtaggtgatggttgcactctgaaatatgacattaagaattttttccattaaagtttatatcaccaagtaataatcttttattattattattattatactttaagttctagggtacatgtgcacaacctgcaggtttgaaacataggtatacatgtgccatggtggtttgctgcacccatcaactcatcatttacactaggtatttctcctaatgctatccctcccccaagtccacctcctgacaggccccggtgtgtgatgttccctgcactgtgtccaagtgatctcattgttcaattcccacctatgagtgagaacatgcggtgtttggttttccgtccttgtgatagtttgctgagaatgatggtttccagcttcatccatgtccctgcaaaggacatgaacttgtccttttttatggctgcatagtattccatggtatatatgtgccacattttcttaatccagtctatcattgatggacatttgggttggttccaagtctttgctattgtgaatagtgccacaataaacctatgtgtgcatgtgtctttatagtagcatgatttataatcctttgggtatctaccaggtaatgggattgctgggtcaaatggtaattatatttctagatccttgaggaattgccacactgtcttccacaatggttgaactaatttacactcccaccaacagtgtaaaagtgttcctatttctccatatcctctctagcatctgttgtatcctgactttttaatgattgccattctaactggtatgagatggtatctcattgtgattttgatttgcatttctctgatgaccagtgatgatgagcattttttcatgtgtctgttggctgcataaatgtctccttttgagaagtgtctgttcatatcctttgcccactttttgatggttttttttttcttgtaaatttgtttgagttctttgtagaatctggatattagtcctttgtcagatgggtagattgcaaaatttttctcccattctgtaggttgcctgttcactctgatggtagtttcttctgctgtgcagaagctctttaggttaattatatcccatttgtctattttggcttttgttgccattgcttttggtgttttagtcatgaagtccttgcccatgcctatgtcctgaatggtattgcctaggttttcttctaggacttttatggctttaggtctaacatttaagtctttaatccatcttgaattgatttttgtataaggtgtaaggaagggatccagtttcagctttctacatatggctagccaattttcccagcaccatttattaaatagggaatcctttccccatttcttgtttttgtcaggttcatcaaagatcagatggttgtagatgtgtggtgttatatctgaggtctctgttctgttccatttgtctatatctctgttttggtaccagtaccatgctgttttggttactgtagccttgtagtacagtttgaagtcagatagtgtgatgcctccagctttgttcttttggcttaggattctcttggcaatgcgggctcttttttggttccatatgaattttaaagtaatttcttccaattctgtgaagaaagttattggtagcttgatggggatggcattgaatgtataaattactttgggcagtatggccattttcacgatattgattcttcctatctatgagcatggaatattattccatttgtttgtgtcctcttttatttcgttgagcagtgatttgtagtgctccttgaagaggtccttcacatcccttgtaagctggattcctaggtattttattctctttgtagcaatggtgaatgggagttcactcattatttggctctctgtctgttaacggtgtataggaatgcttgtgagttttgcacatcgattttgtatcctgaggctttgctgaagttgcttataagcttaaggagattttgggctgagacgatggggttttctaaatatacaatcatgtcatctgcaaacaggaacaatttgacttcctcatttcctaattgagtaccctttatttccttctcttgcctgcttggcctggccagaacttccaacactatgttgaataggagtggtgagagagggcatccttgtgctggtttttaaaaggaatgcttccagtttttgcccattcagtatgatattgggtgtgggtttgtcataaatagctcttattattttgagttacgttccatcagtacctagtttattgagagtttttagcatgaagggctgttgaattttgtcaagggccttttctgcatctattgagataatggtgtggtttttgtctttggttctgtttatgtgatggattatgtttattgatttgtgtatgttgaatcagccttgcatcccagggatgaagctgagttgatcgtggtggataagctttttgatgtgctgctggatttggtttgccagtattttattgagaatttttgcattgatattcctcagggatattggtctaaaattctcttttttgtgtgtatgtctctgccaggctttgatatcaggatgatgctggcctcataaaatgagttagggaggaattccctccttttctattgattggaatagtttcagaaggaatggtaccagctcctctttgtaccgctggtagaattcggctgtgaatccgtctggtcctggactttttttggttgttaggctattaattattgcctcaattttagagcctgttattgatctattcagagattcaacttcttcctggtttagtcttgggagggtgtatgtgtccaggaatttatccatttcttctagattttctagtttatttgcgtagaggtgtttatagtattctctgatggtagtttgtatttctgtgggatcggtggtgatatcccctttatcattttttgttgcgtctatttgattcttctctcttttcttctttgttagtcttgctagcagtctatcagttttgttgatcttttcaaaaaaccagcttctggattcatttattttttgacgggtttttttgtgtgtctctctctttcagttctgctctcaacttagttatttcttgccttcttctagcttttgaatgtgtttgctcttgcttctctagttcttttaattgtgatgttagggtgtcaattttagatctttcctgctttctcttgtgagcatttagtgctataaatttccctctgcacactgctttaaatgtgtcccggagattctgctacgttgtgtctttgttgtcattggtttcaaagaacatttttatttctgccttcatttcgttatttacccagtagtcattcaggagcaagttgttcagttgccatgtagttgtgtggttttgagtgagtttcttaatcttgagttctaatttgattgcattgtggtctgacagacagtttgttgtgatttcttttcttttacttgctgaggagtgctttacttccatttatgtggtcaattttagaataagtgcgatatggtgctgagaagaatgtgtattctattgatttggggtggagagttctgtagatgtctattaggtctgcttgttgcagagctgagttcaggtcctggatatccttgttaaccttctgtctcgttgatctgtctcatattgacagtaggctgttaaagtctcccattattattgtgtgggagtctaagtctctttgtagttctctaaggacttgctttatgaatctgggtgctcctgtattgggtgcatacatatttaggatagctaactcttcttgttggattgatccttttactattatgtaatggccttctttgtctcttttgatctttgttggtttaacgtctgttttatcagagactaggattgcaacccctgcttttttttcgctttccatttgcttggtagatcttcctccatccctttattttgagcctatgtgcatctttgcatgtcagatgggtctcctgaatacagcacactgatgggtcttgactctatccaatttgccagtctgtgtcttttaattggggcatttagcccttttacatttaaggttaatattgttatgtgtgaatttgatcctgtcattatgatgttaactagttattttgcccattagttgatgcagtttcttcctagcgtcgatggtctttgctatttggcatgtttttgcagtggctggtactggttgttcatctccatgtttagtgcttccttcaggagctgttgtaaggcaggcctggtggtgacaaaatctctcagcatttgcttggctgtaaagaattttatttctctttcacttatgaagcttagtttggctggatatgaaattctgggttgaaaattcttttctttaagaatgttgaatattggccaccactctcttccggcttgtagaatttctgccaagagatctgctgttagtctgatgggcttccctttgtgggtaacttgacctttctttctggctgcccttaacactttttccttcatttcaaccttggtgaatctgacaattatgtgtcttggggttgctcttcttgaggagtatctttgtggtgttctctgtatttcctgaatttgcatgttggcctgccttgctaggttggggaagttctcctggataatatcctgcagagtgttttccaacttggttccattctccccaacactttcaggcacaccaatcagacatatatttggtcttttcacatagtcccatatttcttggaggctttgttcacttttttttttaactcttttttctctaaccttgttttctcactttatttcattaatatgatcttcagtgactgatatcctttcttccacttgatcaaatcatctactgaagcttgtgcatgcgtcatgaagttctcgtgccatggttttcagctccatcaggtcatttaaggtcttctctacactgtttattctagttagccatttgtctaatcttttttcaaggtttttagcttacttgtgatgggttccaacatcctcctttagcttggagaattttgttattaccgaccttctgaagcctacttctgtcaactcgtcaaagtcattctccatccagctttactccattgctggcgaggagctgtgatcctttggaggagaagaggtgttctgatttttagaattttcagcttttctgctctggtttctccccatctttgtggttatatgtacctttcgtcttgatgttggtgactagagatggggttttggtgtagatgacctttttgttgatgttgatgctcttcctttctgtttgttagttttccttctaacagtcaggtccctcagctgcaggtctattggagtttgctggaggtccactccagaccgtttgcctgggtatcaccagtgggggctgtagaacagcaaatattgcagaacagcaaatattgctgcctgatctttcctctggaagctttgtcgcagaggggcacctgcctgtatgaggtgtctgtcagcccctactgggaggtgtctcccagttaggctacacgggggtcagtgacccacttgaagaggcagtctgtctgttctcggaggtcaaatgctgtgctgggagaaccactgctctcttcagagctgtcagacagggacgtttaagtctgcagaagttgtctgctgccttttgttcagctatgccctgtccatagaggtggagtctagaggcagtaggcattgttgagctgtggtgggctccgccaagttcgagcttcctggctgctttgtttacctactcaagcctcagcaatggcagatgcccctccccaagccaggctgccacctcgcagattgatctcagactgctgcgctagcagtgagcaaggctccatgggcatgagacctgccgagccaggcacgagagagaatcaccttgtctgccagttgctaagaccttgggaaaagtacagtatttgggtgggagtgccccatttttccaggtagtctgtcacggcttcccttggctaggaaagggaaatcccctggccccttgtgcttcccgggtaaggcgatgccctgccctgcttcagctcgccctctgtgggctgcaccgactgtccaaccagtcccaatgagatgaaccaggtacctcagttggaaatgcagaaatcacccatcttctgcatggctcacactgggggctgcagactggagtgtttctattcagccatcttggaacgcaatcccaccaagtaaaaatctaaaaaaaaactatatatggaaggaaaattatattaattctgcccagtatatagtctctgtttaaaaatataatttattttctttgtcttgcacctgtatttgcttcatgggaatgggtgctttggtgctgaagggtctcagtttcctttctgtgactcactttattctttctcttcttgctgtcacattctgctgtaatgtaggtagcaagcataaagatggtcccaaattagtaattcttcaatgaaccgtccaagtatgaccttgcatgcttcatagaaagtggagtttgtgaactcagatgcctctgagtccacacaggctctggaaagaagaaaaaaaagcaaaaggaaagaacttgcagtgcaatgaatgtaactcaatagggagggggatggggatcatggcaaatatgtttcatcttctcagcgacagcaggttgctaccaagaggaagtgtgagccagtgctgccagatctccaagttttaaatgagaagcccagaaatctagatttttatgagaaatctcttgatttttaaatgttgaaaactgattccgattttataaaatatgctgagctttgcttgaaaattagttctaaactgtgggaccacagttttgcaccttccaaaattctgagattatgatgtttgttttacattaatgtgctagaactgcactgtctaatacagtagccactagtcatatctgttagacagtagaaatgtggctcgtccaaattgagatgtattttaaatataaaatatggaatggattttaaaggcagaataaaacaagaatataaaatatttcagtcattttttaagtgacgtgttaaaatgataatattttggatatatttgttaaataaaatatattattaaaattagttccacctgtttctttttacttttaaaatgtgctacgagattttaaaaattgcatatgtgattcacattatatttctattggacagcactgttctggaatttaaaaaatgatcatgtatgaccactgcagatgtagggagttagtgtcctgagaatctgactgcaccagcagcagcgagccaatgggcttcacactaacacccccgcttagtgaatgctgctgtgtgttgcctcttcctgttggcatttgcccatggacaccaagagtgagcctctgtggctgcctctttgcaaacaaggatgaagggagactggctcaatgaagctgatgtctcctgaggaactgaggtggaggaaaccattgtgcctatttgtgcccagatggtacccttgggagtgatgaggagaagggccgagagagataactgtagaagaacctagagattttggcagaggtgagcaggcgagtaataggtgggagagtccacctgaaaagttgatgtctgcatgtttataactagtaatgattgtgtactggggccactgaaagaagatggcgggaacctgaaatatgagcaaggaagggactcccatttatggaacatcctctctgtattgggcaccatgctaggtgctgttcataaagcatctcagaccaggtcataattctcagagctctctggtggaagaaggttagggttttgttgttgttgttgttgttgagacagggtcttgctctgttacctaggctggagtgcagtggtgtgatcagagcttaactgcagccttgacctcccaggctcaattgatcctcctgcctcagcctcacgagtagctgggaccacagacatgtgccaccatgcctggctagtttattttttgtggagagggagccttgctatgttgcccaggctggtctctaagtcctgggctcaagcgatctgcctgtttcagcctcccaaggcaggtgtgagccatcgcacctgcctttaattttttttttaagaaccagaattacattctgggtttttgtggggcagggtcttagaatgaggaactctgaccaagcagggcttcaagggaactgtagggtagtgaactgggagatattcttagcaaatgttggaagcccctgatctagggcttgaaattgttttttggtttttgtttttgctgcttggaaattaattaatcaaatagttaaaaatttaataatattctttagtattactactactgctatcctctaatgaatattaatgaaaattatttttcagaaaataaccaattcaccccagaagttaatcagctgcagaagggaggaggtggatgcctgtgccacggctgtgatgtctcctgaggaactcctcagggcctggatctcataggtttgcggaagggcccaggtgaagccgagaacctggtctgcatgacatggaaaccatgaggggacaagttgtgtttctgttttccgccacggacaagggatgagagaagtaggaagagcctgttgtctacaagtctagaagcaaccatcagaggcagggtggtttgtctaacagaacactgactgaggcttaggggatgtgacctctagactgggggctgccacttgctggctgagcaaccctgggaaaagtgacttcatcccttcggtcctaagttttctcatctgtaatgggggaattacctacacacctgctaaacacacacacacagagtctctctctatatatacacacgtacacataaatacacccagcacttgcaaggctagagggaaactggtgacactctacagtctgactgattcagtgtttctggagagcaggacataaatgtatgatgagaatgatcaaggactctacacactgggtggcttggagagcccactttcccagaataatccttgagagaaaaggaatcatgggagcaatggtgttgagttcacttcaagcccaatgccggtgcagaggggaatggcttagcgagctctacagtaggtgacctggaggaaggtcacagccacactgaaaatgggatgtgcatgaacacggaggatccatgaactactgtaaagtgttgacagtgtgtgcacactgcagacagcaggtgaaatgtatgtgtgcaatgcgacgagaatgcagaagtcagtaacatgtgcatgtttgttgtgctccttttttctgttggtaaagtacagaattcagcaaataaaaagggccaccctggccaaaagcggtctttaaagttctagttacattttcaacctcaagtccagagaggctccaaaggatacctttggtcaagaggactcggggtgggggtgggggtggggatgggagcagcggaggagcagccccagaagtccagagcccagggctgcctggttgggggcagcctctggctgcatgagaaccccaactgaggcagctggcataagcttcgcctggttaggtgctcctaagcctttcctgttggccccaccccacaggaaatccctggggaaccctcttttccttgacagcttactcagggtatccccagcccctcttagtctgctcatttaggacctacctctggaagcttctacccacccctttgccccaccaggtgaagaaaagagccaaccacagagaaggaatgatgggaggaaacttcttgaggggtgaagggattgatgggcagggcctgcgccttgctttctaaccccctcgaagctctggagcctccaagttggtttatcttcaccctcacttcctgggccctttccagccagcccagtggtgggacagtctaactgcatcaactgggtgtttccccagaggcccacagcccttcaccacctggaggggtctctccaggagcatgagatcgctcaagacccgttccttcttttcctttgtgttattttgtatgcttctctgtgttgttcgttagagggtgtgtgctaattttatatttgacctaaactagaaacacactttcagtttgcaaaaacaaagaccatattactattccagtcatcaccctccctcctctctcttcctgcccccttatggtggggtggtggggggcactatccttctgtcacagcccaggcgcagaactgagaaaggaccctgacctccatctgcttgagtctctcacaactattcccagtgcccatccattttttggcatctataggtacacagagatttctcttgattcttctgttgtctccccttgccctgaatgtgcatttatggagccccagccatgcacccgacctgccagcccccattggtggaggggctgcctcctctacagctggctgttccctctcccctggagcacttctatcccaagtccccaggcctcctccctgcccctccaatgcatttatccctacatctggacacttacatgagtgaaaaggaatgtgattagtaattacggcaggaccacagctgtaaatcgggactcctctgggcaaaccaggagccaggtcactctcatcataaggcacagcttcctgccacattctttttctagaagctccaaccctccagatgcccagtcactgagtccaggggctcaggctcagcactactggcttgctttgttttcacagtttctcattgagtcctgtgggaattgggggaagtacttgtgtgtgtgtgttgtggggggataagtatttgggagcagcctagagtggcttctgctgtttcactgaagactgtctcttgcaggccaacccagtagagtcccctgagcccccagaatcaagcccagctttcttagtcctgcctttagggtgcaactgccagggtccagtgaataaaatccctgctccatgaggcttacattccaatggggtaagggagaaataataacacaataacagtattattattcagtgaattatttagtatattgggagtttgtaagtcacggtaaaatgaaaaagtagagcagaaaacgggggctgggggcaggttgcagcctcttcaaaatgaaagtggatggaaacaatggacccagaactacctgtcagataagtccctgcatagccacatggtgtgagatattatgagagattctagaacaaagtaatttggcaacaaatccgtaggtgtatgtagtctaaaacaaaaactttattgagtatttatccctttgtattgatagtgtatttttgcaactattatcttatcagataaagcaagtaaataatatatattttgtatattttgataagaatctagattttaggattagtgacaaggaaggctaattttaggatcccaaatttgactaagaacagggcactgttggaactgaatcaaacatattaatatgaagtcatgtctttatgaaacatgacattaaaaatattttgacttttttccactgaaatggcccaggagaaatgtcacctccacaatgcatcttaatgctaagattttggtttctagtgttagttttctcccaaaggagccaaagtttcttggagcagtaatggatgccatgtcagtttggagttgaaaggtacaaggtaatcttaaaacacctatacctttttgagacagaaagcaaagcattaaataagggtcattcaaaattacacaaggaacaatctatacagggctcctcctggccaaagttgggacaatataagcaccagaaggagaatattggctggcacaattgataccatatatttgaaaagtcatcagtccatgacacccaagaagagcgaagctaccataatgcattctcagagaagatgaatctaatagaatgcatttctacttgttattcaatcgtgttgggcttatcgactcgtttatcgtgtcaatgaggaataccagtaaatgtaaatccatcagtcagaaggcattttttctcctctaaaggctcctctccgccccttaacgtccagtctttccccacttggctctccctgtcctgtcaaggggttcggtggaaaagtcttttaagttcccttcacagaagaattgtagactctgccggtctagtctctgggccaaccctccccgtctctttagtaaagatgttttttattattttccttgtgccgtgtattatccttaggctagagtaactttccgggcctgcagacctcttggtttcctttcaatctggaggacttgatcccatggccagcttcggagctcaccaggaggggaagacccattacatccacgggcgtctggcgccaccttgtggtcagtgctgaaaatgttttctgttcccactcgcaatgaaactccctgggcttcctggatgaagaaaggaaagctcaggtcggtttcctagaataataactcagttacacagtttccacgggcttggtccttaacaaacctccactgtcactggtggagttagaatttagcagccaccttctcctcgctctgtgtctgtatctgtcccgagctcatggtttggggcttcacgctgtacccacggctctcgctcttttctgggaccttggcctctcgcactctcctgtctgttgatctttccaccatgctgccattccctacctctcggaaatagactttttttggatgtctttttgttttccttctgtgtgacctatttgtaggatccctttactagactgactttccaggagtgttcctcagcccccgcacagatcagtagggaggagcctgcctgctgcttgctcatgctaaaccagcgtgctgcccagcctgtgaagtttggaactggaacactagagttggccccaaattacagctttctcttctggctcctgggactcccagtttcttcagcaacaacaacaaaacctggaaaaacgtatccttgccagaggtgggagaatgaggctcacaaaaggaaaacacggacctttcttgtctcccccagtgagaggttgcaagatcaggttgtaaaaccccattaaggaggaccttagaggaagaactgagcaaggagccttctcaggtgcctgcaaacatctccaagagcaaaagtataaatcctcatattgtggaggaggtacatgttcctggttccttcactggacctcactgagaaaattaaacaaacaacaacaacaacaactacgttaaaaaacaaccccacaaaaacaaaaaaacaaaaacaaaaaaaaccctggtggccgggcgcggtggctcacgcctgtaattccagcactttgggaggccgaggcgggtggatcaccttaggtcaggagttcgagaccagcctgactaacatggtgaaaccccgtctctactaaaaatacaaaaatcagccggatgtagtggcaggcgcctgtaatcccagctactcgggagactgaggcaggagaatcccttgaacccgggaggcagaggttgcagtgagctgagatcccgccattgcactccagcctggtcaacagagcgagactccgtctcaaacaaacaaacaaacaaaaaaaccatcctggcgtttggagaaatgagtgcctgaacaaacctcagtaacttctaaattttgcctctgtacctaaaacagctcctctaggaagtggccacatgcctccaaatttcctggagatgccagccagtcttctatgaaattgcctcagtataagattaggcctacaaaacatcatcttgagtttctggccctaggagatcacagcccagaaagtaggcccctctgatgtcatcccacctgcatcaatcacgaggacaagctttcccaggtgaaatcatttcattgacattaactgctcactgtctcacttgaactttttttttttttttttgagatggagtcttgctctgtcaaccaggctggagtgcagtggtgctatcttggctcactgcaacctccgcttccccgcttcaagcgattctactgtctcagcctcctgggtagctgggattacaggcacctggcaccatgcccagctaatttttgtatttttagtagagacagggtttcgccgtgttggccaggctggtcttgaactcctgacctcaggtgatccgcctgcctcagcctcccaaagtgctgggattacaggcatgagccactgcgccctgcctcacttgaacttttgagtcttgcaattggaaatagatcaaaatggaatagttttccccttttcttggcctcaccccagatcaggcctagattatggagggccagtgaggtggaacgcttactgtgtgtttttgtttttgtttttgtttttagacaggggtcttgctctgtcacccaggctggagtgcagtggcgtgatcttagctcactgcaacctccatctcccgggttcaagcgtttctcctgcctcagcctcccaagtagctgggattacaggcacctgccaccacacctggctagtttttgtatttttagtagagacaacgtttcccaatgttgcccaggctggtctcgaactcctggcttcaagtgatctgcccgcctcggcctcccaaagtgctgggattgcaggcgtgagccaccgcctgtgttttaaatgaagagtttcagtttagctgatggcagcaaatagaagctgaaatttaaatacaagtaacattaagtaacatctccctctgttgcaactttgggttgacaaaggcaaggctcaggttaaagaactgataaaaacttggtcatgaggtgtgggtctcatcatgttgcttaaaaacaaaaagcccagcttccagagatgtgcatggtgttgattgtggcagagggtatgagaaagtggggcccactcttttctttggctaatgactcatttaaaaactcatttgtcacctaaaacatttattccaaaattgggatttttaaattaaatgctatttaaaacttcagaaaggaattaaaaacttgataattgaaacaggtgatatgtcaattcaccttttaaattcaaataatatagttcagaataaatcataaaatttgggaagaatttggatttcttcaccaacactaaatagctattgcataagtgtgtgctgtaattgtaaacactggtgtattttacaaactggttttattggaatccatgtagtctgaaaattgtatgattctgtaaaaaagtttccacttgaactttctgagaacggtttaaaggtgaaataatctgatacacttctctgtcaataaaaaataaatcatgatataattggacatatctgctcatgtgttttttttttagatggagtctctctctgttgcacaggctggagtgtggtggcaccatcatgactcactgcaacctccatctcctgggttcaagcaattctcctgcctcagcctccagagtagctgggattacaggtgcttatgtatttttttttctttttctttttttcattatactttaagttctagggtacatgtgcacaacgtgcaggtctgttacatatgtatacatgtgccatgttgatgtgctgcacccagtaactcgtcatttaacattaggtatatctcctaaagctatccctccccccttcccccaccccacaacaggcccccagtgtgatgttctccttctgtgtccaagtgttctcattgttcaattcccacctatgagtgagaacatgtggtgtttggttttttgtccttgtgatagcttgctgagaatgatggtttccagcttcatccatgtccctacaaaggacatgaactcatcctttttcatggctgcatagtattccatggtgtatatgtgccacattttcttaatccagtctatcattgatggacatttgggttggttccaagtctttgctattgtgaatagtgcctcagtaaacatacgtgtacatgtgtctttatagcagcatgatttataatcttttgggtatatacccagtaatgggattgctgagtcaaatggtatttctagttctagatccttgaggaatcgccacactgtcttccacaatggttgaactagtttacagtcccaccaacagtgtaaaagtgttcctatttctccacatcctctccagcacctgttgtttcctgactttttaatgattgccattctaactggtatgagatggtatctcattgtggttttgatttgcatttctctgatgaccagtgatgatgagcattttttcacgtgtctgttggctgcataaatgtcttcttttgagaagtgtctgttcatatcctttgcccactttttgatggggttatttgtttttttcttgtaaatttgtttgagttctttgtagattctggatattagccctttgtcagatgggtagattgcaaaaattttctcccgttctgtaggttgcctgttcactctgatggtagtttcttttgctgtgcagaagctctttaggttaattatatcccatttgtcaattttggcttatgttgccattgcttttggtgttttagacatgaagtccttgtccatgcctatgtcctgaatggtattgcctaggttttcttctagggtttttatggttttaggtctaacatttaagtctttaatccgtcttgaattaatttttgtataaggtgtaaggaagggatccagtttcagctttctacatatggctagccagttttcccagcaccatttattaaatagggaatcctttccccatttcttgtttttgtcaggtttgtcaaagatcagatggttatagatgtgtgatattatttctgagggctctgttctgttccttggtctatatctctgttttggtaccagtaccatgctgtttcggttactgtagccttgtagtatagtttgaatagtgatgcctccagctttattcttgctttgttcttttggcttaggattgacttggcgatgcgggctcttttttgattccatatgaactttaaagtagttttttccagttctgtgaagaaagtcgttggtagcttgatgggggtggcattgaatctataaattaccttgggtagtatggccattttcatgatattgattcttcctatccatgagcatggaatgttcttccatttgtttgtatcctcttttatttcattgagcagtggtttgtagttctccttgaagaggtccttcacatcccttgtaagttggattcctaggtattttattctctttgaagcaattgtgaatgggagttcactcatgatttggctccctgtttgtctgttattggtgtataagaatgactgtgatttttgcacattgattttgtatcctgagactttgctgaagttgcttatcagcttaaggagattttgggctgagacaatggggttttctagatatacaatcatgtcatctgcaaacagggacaatttgacttcctcttttcctaattgaataccctttatttctttctcctgcctgattgccctggccagaactttcaacactatgttgaataggagtggtgagagagggcatccctgtcttgtgccagttttcagagggaatgcttccagtttttgcccattcagtatgatattgggtgtgggtttgtcataaatagctcttattattttgagatacatcccatcaatacctaatttattgagaatttttagcatgaaggattgttgaattttgtcaaaggccttttctgcatgtattgagataatcatgtggtttttgtctttcgttctgtttatatgctggattacgtttattgatttgcgtatgttgaaccagccttgcatcccagggatgaagctgagttgatcgtggtggataagctttttgatgtgctgctggattcggtttgccagtattttattgaggatttttgcactgatgttcatcaggggtattggtctaaaattctctcttttctttttattgtgtctctgccaggctttggtatcaggatgatgctggcctcataaaatgagttagggatgcttatgtatttttaatttaaactttattgaagtatatctggttgtattgttatggcattttcatttcaccttgggaagtttgaattttctatagagttaaggtagttggtaattgtgttttccaaagacttctgagaatttggaaatctacactctattggtctgtaattaaaataaggatgacagcaatatatatgaagcaaagtctacatttttattcataagtcaaaagagagtttgggccaaaatcttaagatactgcatttatagctactattcttggctaatcataaagaatctgatcctcctgtgagaaaataaaaaactttggttctgggtcaagaaactactgattgggagaaccattttgatttttcactgaaaatcttgatgtaataacacatacctgatatattaggttggtaagggggtgtagaatattataaaaggagggagagcctatagctcataaaaaggagcaagataaattaaaagcttggaagataagaacagaattaaaaagaaaaagaaaaaaacaaacaaactcctaaacctgtgaaagtaacatgggtttgatagataaaatgtcaggggcaaaactggctaattcagccagaaatcatgtgtgccaatctggattatacccatgtattaaaccattgtagatggagaaacacaaccgtcatgcagaatattggccactgcgctgctggaggctcctctatcacctcacggtagggaggatcccctgtttcctggtggctgccagtcacccccctctagagctttggtctgtcagctgttctgatgccagggctctcaaactgcaaacaaacgagaacagatgagccaaagctctatacagagccaaagagtcagaggttatgaatgagtttagagcaaagagatttttagcaaatccttagtggaatgccgtctaaaaataaacaaaaaagaactattagaaaagttgagctgtatttgataattggaaaatttgcattaatgttgtaatattattttagaactaatttttccagacaaataagtgatcatttattttgttagaaatctagacttcttagcataggagaagaggaactacaattgcagaatcaagaatttgagtaggtgatgaatatttcaattacactgatttaatctttaccagtgaggtgaacgtattaaattatcacatgtaccctgaaaatatgtacatctatgacttatcaataaaaaattaaaaaaaaataaaaccagaatggcactgatgtttcaaaccaagcaaaaaataccttaatggaattcataaaactaaaatttctaaagaaaaacactctatcccataaat

SEQ ID NO: 1113 - DNA, 1914 bp, Homo sapiens
cccaagagctacgcggcggcggcggagcgcaggcctcgtgccgttacggccatcacggcggccgcagtggcgtcctggagccctcctcagtgctgaagctgctgaaagatggcagaagaagtggtggtagtagccaaatttgattatgtggcccaacaagaacaagagttggacatcaagaagaatgagagattatggcttctggatgattctaagtcctggtggcgagttcgaaattccatgaataaaacaggttttgtgccttctaactatgtggaaaggaaaaacagtgctcggaaagcatctattgtgaaaaacctaaaggataccttaggcattggaaaagtgaaaagaaaacctagtgtgccagattctgcatctcctgctgatgatagttttgttgacccaggggaacgtctctatgacctcaacatgcccgcttatgtgaaatttaactacatggctgagagagaggatgaattatcattgataaaggggacaaaggtgatcgtcatggagaaatgcagtgatgggtggtggcgtggtagctacaatggacaagttggatggttcccttcaaactatgtaactgaagaaggtgacagtcctttgggtgaccatgtgggttctctgtcagagaaattagcagcagtcgtcaataacctaaatactgggcaagtgttgcatgtggtacaggctctttacccattcagctcatctaatgatgaagaacttaatttcgagaaaggagatgtaatggatgttattgaaaaacctgaaaatgacccagagtggtggaaatgcaggaagatcaatggtatggttggtctagtaccaaaaaactatgttaccgttatgcagaataatccattaacttcaggtttggaaccatcacctccacagtgtgattacattaggccttcactcactggaaagtttgctggcaatccttggtattatggcaaagtcaccaggcatcaagcagaaatggcattaaatgaaagaggacatgaaggggatttcctcattcgtgatagtgaatcttcgccaaatgatttctcagtatcactaaaagcacaagggaaaaacaagcattttaaagtccaactaaaagagactgtctactgcattgggcagcgtaaattcagcaccatggaagaacttgtagaacattacaaaaaggcaccaatttttacaagtgaacaaggagaaaaattatatcttgtcaagcatttatcatgatactgctgaccagaagtgactgctgtgtagctgtaatttgtcatgtaattgaagactgagaaaatgttgggtccagtcgtgcttgattggaaattgttgtttctaaatctatatgagaattgacaataagtatttttattataactcagcccatacatatatactatgtatgcagtgcatctgcatagaacagttccttatccttggccttctgttttattgtttttttctttgctgttttccctttgcttctaatattacagttttgtattttgtaaacaaaaatcaaataatgcatatcagaatctttatatggaagaaatcctttattgcctttcctttgtttccttgtaaaggcaccctgttctgttatggtttttcattatataaaattattatatctatatatgacatatgctaaaatttcttggagagtgttaatcttttctgtgactaaatagcaataataagtggaaaattagaaattatttccaggtattatatttgtcacaggccattgtaaataccaagtatattgtgtctgccataatttttaaaaatacattcattgtcttcagtcatacagcaagacacatgagacatagattagaaaacatgttgtacaattttaatttacaactgttggaaataaaaatcacttaatttttttcc

SEQ ID NO: 1114 - protein, 375 aa, Homo sapiens
MAEEVVVVAKFDYVAQQEQELDIKKNERLWLLDDSKSWWRVRNSMNKTGFVPSNYVERKNSARKASIVKNLKDTLGIGKVKRKPSVPDSDADDSFVDPGERLYDLNMPAYVKFNYMAEREDELSLIKGTKVIVMEKCSDGWWRGSYNGQVGWFPSNYVTEEGDSPLGDHVGSLSEKLAAVVNNLNTGQVLHVVQALYPFSSSNDEELNFEKGDVMDVIEKPENDPEWWKCRKINGMVGLVPKNYVTVMQNNPLTSGLEPSPPQCDYIRPSLTGKFAGNPWYYGKVTRHQAEMALNERGHEGDFLIRDSESSPNDFSVSLKAQGKNKHFKVQLKETVYCIGQRKFSTMEELVEHYKKAPIFTSEQGEKLYLVKHLS

SEQ ID NO: 1115 - DNA, 1869 bp, Homo sapiens
caggcttcgctgcgactcagacctcagctccaacatatgcattctgaagaaagatggctgagatggacagaatgctttattttggaaagaaacaatgttctaggtcaaactgagtctaccaaatgcagactttcacaatggttctagaagaaatctggacaagtcttttcatgtggtttttctacgcattgattccatccttgatcctagatgaagtggccattctgcctgcccctcagaacctctctgtactctcaaccaacatgaagcatctcttgatgtggagcccagtgatcgcgcctggagaaacagtgtactattctgtcgaataccagggggagtacgagagcctgtacacgagccacatctggatccccagcagctggtgctcactcactgaaggtcctgagtgtgatgtcactgatgacatcacggccactgtgccatacaaccttcgtgtcagggccacattgggctcacagacctcagcctggagcatcctgaagcatccctttaatagaaactcaaccatccttacccgacctgggatggagatcaccaaagatggcttccacctggttattgagctggaggacctggggccccagtttgagttccttgtggcctactggaggagggagcctggtgccgaggaacatgtcaaaatggtgaggagtgggggtattccagtgcacctagaaaccatggagccaggggctgcatactgtgtgaaggcccagacattcgtgaaggccattgggaggtacagcgccttcagccagacagaatgtgtggaggtgcaaggccattcccctggtactggccctgtttgcctttgttggcttcatgctgatccttgtggtcgtgccactgttcgtctggaaaatgggccggctgctccaaaaataaccaattcaccccagaagttaatcagctgcagaagggaggaggtggatgcctgtgccacggctgtgatgtctcctgaggaactcctcagggcctggatctcataggtttgcggaagggcccaggtgaagccgagaacctggtctgcatgacatggaaaccatgaggggacaagttgtgtttctgttttccgccacggacaagggatgagagaagtaggaagagcctgttgtctacaagtctagaagcaaccatcagaggcagggtggtttgtctaacagaacactgactgaggcttaggggatgtgacctctagactgggggctgccacttgctggctgagcaaccctgggaaaagtgacttcatcccttcggtcctaagttttctcatctgtaatgggggaattacctacacacctgctaaacacacacacacagagtctctctctatatatacacacgtacacataaatacacccagcacttgcaaggctagagggaaactggtgacactctacagtctgactgattcagtgtttctggagagcaggacataaatgtatgatgagaatgatcaaggactctacacactgggtggcttggagagcccactttcccagaataatccttgagagaaaaggaatcatgggagcaatggtgttgagttcacttcaagcccaatgccggtgcagaggggaatggcttagcgagctctacagtaggtgacctggaggaaggtcacagccacactgaaaatgggatgtgcatgaacacggaggatccatgaactactgtaaagtgttgacagtgtgtgcacactgcagacagcaggtgaaatgtatgtgtgcaatgcgacgagaatgcagaagtcagtaacatgtgcatgtttgttgtgctccttttttctgttggtaaagtacagaattcagcaaataaaaagggccaccctggccaaaagcggtc

SEQ ID NO: 1116 - protein, 294 aa, Homo sapiens
MQTFTMVLEEIWTSLFMWFFYALIPSLILDEVAILPAPQNLSVLSTNMKHLLMWSPVIAPGETVYYSVEYQGEYESLYTSHIWIPSSWCSLTEGPECDVTDDITATVPYNLRVRATLGSQTSAWSILKHPFNRNSTILWGMEITKDGFHLVIELEDLGPQFEFLVAYWRREPGAEEHVKMVRSGGIPVHLETMEPGAAYCVKAQTFVKAIGRYSAFSQTECVEVQGHSPGTGPVCLCWLHADPCGRATVRLENGPAAPKITNSPQKLISCRREEVDACATAVMSPEELLRAWIS

SEQ ID NO: 1117 - DNA, 1759 bp, Homo sapiens
gcagaaatggcattaaatgaaagaggacatgaaggggatttcctcattcgtgatagtgaatcttcggccactccctgctgatgcaacatctgggtttgggcagaaaggagggtgcttcggagcccgccctttctgagcttcctgggccggctctagaacaattcaggcttcgctgcgactcagacctcagctccaacatatgcattctgaagaaagatggctgagatggacagaatgctttattttggaaagaaacaatgttctaggtcaaactgagtctaccaaatgcagactttcacaatggttctagaagaaatctggacaagtcttttcatgtggtttttctacgcattgattccatgtttgctcacagccatccttacccgacctgggatggagatcaccaaagatggcttccacctggttattgagctggaggacctggggccccagtttgagttccttgtggcctactggaggagggagcctggtgccgaggaacatgtcaaaatggtgaggagtgggggtattccagtgcacctagaaaccatggagccaggggctgcatactgtgtgaaggcccagacattcgtgaaggccattgggaggtacagcgccttcagccagacagaatgtgtggaggtgcaaggagaggccattcccctggtactggccctgtttgcctttgttggcttcatgctgatccttgtggtcgtgccactgttcgtctggaaaatgggccggctgctccagtactcctgttgccccgtggtggtcctcccagacaccttgaaaataaccaattcaccccagaagttaatcagctgcagaagggaggaggtggatgcctgtgccacggctgtgatgtctcctgaggaactcctcagggcctggatctcataggtttgcggaagggcccaggtgaagccgagaacctggtctgcatgacatggaaaccatgaggggacaagttgtgtttctgttttccgccacggacaagggatgagagaagtaggaagagcctgttgtctacaagtctagaagcaaccatcagaggcagggtggtttgtctaacagaacactgactgaggcttaggggatgtgacctctagactgggggctgccacttgctggctgagcaaccctgggaaaagtgacttcatcccttcggtcctaagttttctcatctgtaatgggggaattacctacacacctgctaaacacacacacacagagtctctctctatatatacacacgtacacataaatacacccagcacttgcaaggctagagggaaactggtgacactctacagtctgactgattcagtgtttctggagagcaggacataaatgtatgatgagaatgatcaaggactctacacactgggtggcttggagagcccactttcccagaataatccttgagagaaaaggaatcatgggagcaatggtgttgagttcacttcaagcccaatgccggtgcagaggggaatggcttagcgagctctacagtaggtgacctggaggaaggtcacagccacactgaaaatgggatgtgcatgaacacggaggatccatgaactactgtaaagtgttgacagtgtgtgcacactgcagacagcaggtgaaatgtatgtgtgcaatgcgacgagaatgcagaagtcagtaacatgtgcatgtttgttgtgctccttttttctgttggtaaagtacagaattcagcaaataaaaagggccaccctggccaaaagcggtc

SEQ ID NO: 1118 - protein, 203 aa, Homo sapiens
MQTFTMVLEEIWTSLFMWFFYALIPCLLTAILWGMEITKDGFHLVIELEDLGPQFEFLVAYWRREPGAEEHVKMVRSGGIPVHLETMEPGAAYCVKAQTFVKAIGRYSAFSQTECVEVQGEAIPLVLALFAFVGFMLILVVVPLFVWKMGRLLQYSCCPVVVLPDTLKITNSPQKLISCRREEVDACATAVMSPEELLRAWIS

SEQ ID NO: 1119 - DNA, 33916 bp, Mus musculus
  misc_feature (1)...(33916): n = A,T,C or G
ctcctgtgggtggggtgatttacccctccctggaatagctctgttcagagccctgggctaacggaaagcgaaccgatgtgttctgtggaaatagctcctgtcccgactctttcgcaagtacacatggacttgagtaagcagctagttctctcctgaacctcagtggtcttcatgtacagggagatgcccagatcctctctccccagcatttgggaggctgaagcaggaagatctaggccagcctgtgtctatataatagccacataggccctgtctggaaacaaacaaacaaatatacactgggctgctcacagaccttgagtgttcttaataatgatgataacagtgctattaataaggcgatgtgtacagtgtgtatgtgtgcatgcatgcgtgcaagcatgcatgtgtgtgtgtgtgtgcatgtgataccgtgtgcatgtgtgtgtgtgtgtgtgtgtgtgtgtgtgtgtgtgtgtatgtgataccgtgtgatatggaggattaagcataggacctcacattgttaggcaatcaccctaccactcactggatgtccccagtcctatgttcctttgagagatcagatctctccaagttgtccagcctaactttaaactcaccctgtagaccaggctcctacctcagcctcccgagtaactagaagtataaggattcactatattcactatagtcagtactgaaacttttctgtcttgttttcttgagacagggtctcattttatggctgagaataacctggaactccaggccctcctatttgtacctcccaggtgttataaatgtgtgatgcaatgcttagactgctgttcttgagacttgaaaagtgtgtgtgtgtgtgtgtgtgtgtgtgtgtgtgttctcagggcacaattgtaggagttagttctctccttccaccaagctggttccagaggttggctcaggtcgttaaccttggtgtcaagttactagctgagcccatctcagtgaccttgtattgagactttttaacattcaaaacaaaaccatctgacttgatttgagaaaaagacaggcaatggcgctcgcctttaatcccagcactcgggaggcagaggcaggtggatctctgagttcgaggccagcctggtctacagagtgagttccaggacagccagggctatacagagaaaccctgtctcgaaaaaccaaaaaaaaaaaaaaaaaaaaaaaaaaaaagacaggcaatagttagtctttggtcaggaaaaaaaaaaatctccgagagccaggcaggctgagaggttcccggagagggcttgcttgtgagtccaggttgatcctagagccgaaatgtaataaatgaaaggtgaacaccctcttcccactgcaggatacagtttgcattgtggaaaggctcttctgcaagcagctaactgtgtgtctgtctgtccgttgggaaggtttaggaagtattgtgcaaatagtatatgtatgtctttgagagagagagagagagagagagagagagagagagaccaacccaataacaacaacaaaaacctagcaaatatctaacctttagacaataaggatactggtgtgctcacaccaccaaagagccactggtgccgctgtaacggcacatgcttcggtgccgctgtaacggcacatgcttcggtgccactgtaacggcacatgcttcagtcagctccactctgggtttctctgctcacgacagacagtttggtttggttttgctcagttggtgttttgctttgagagggtctcactttgtagtcctggctggcactgaactcacagagatccacttgcctctgccttcctaaaagtgctgggattcaaggtgtggttcactgtgctaggtacatgtttggatttccactatcagggcagaggtgagacagacttgctggaaaaatagagctgataaagaaaatgcctccctcctacaaaagagagccgatgcaagggccataaacgaggccctatgagtctgggaggtcagacttcaaatcccagttgtatttagacctctttttgactcagtttccctgtctgcatcataggcatgaaaatgatgcctgagggttgtagatgtagtttaattggaagagcatgcaggaagctctagattccatcttcagctctgcatagacctcgtgtgttcgtacacacccgtagtctcccaacccttgagaggtggaggcagggagatcaggagctcaagtgagctagaggccagcctgggctacatgagactctgtttcaaaaacctttaatcaaacaaacctaccaagatattattttaatatatgatcaaataagtagtatttatgagattttatactctgccttccttcctatgttgaaatccagcgtgcacacacacacacacacacacacacacacacacatgtaatcctgagttggacttgtcccgtttcatgcccttgacagtcataaatggccaccatgttgaagacttcggtcctaaacaacagaacggctcttcgcagtgggcctgggtgggctgctcagcagcacacagaccccaatcacaccatggtcaccaggaaggcctctgagatgagtctgcttggttgtatgaagtatgaagggtctaatggtaaactctatggttccaaggttgaggtttcacacaaaactatgctgcgaaactatgctgagcaaactcatattggtgtttccttccttggcattaaaaccagccctttaccttgacctgtcttggctatttatttatttacttttatagacatgtctcattgtgtagttctggctggcccggaactcagtatgtagcccagggtggcctcaaactcagagagatctgcctctctgcctctgcctctgcccctctgcccctctgcccctctgcccctctgcccctctgcccctctgcccctctgcccctctgcccctctgcccctctgcccctctgcccctctgcctctgcttcccccatgacaggatcaaagctgtgcaccactaggcctcgcatgagcttatttttgttttttgagacagggtctcattctaagcagggtggtcttgaactcataactctcctcccacctcacattccaagtgccgggattacagatgggacccatcccactcaactcttgttgaggattaaattttaaaatgaccactgtgggtcatgctgttaatgattctcattgtctattaagatgcaaacactggactagagtttcagttggagagaccttggttgagatctgctgtcatgacaatgcgtgctttgtgatgtatggagttgtatcccattgacccgtcacaaacgaactacccatcactccccaggccactttagagtctccctcacctccacatctgcttacaggctccctgtgagtcccagtcacccactgcaggagaacagagggtcacatagcttgtcttcggaaagaacaaattcagaattcagggtacagctcctacggactgcgttccacgcttatggcaccatagagttgaaaggtcaggagtgaagtcattgtcacaaggggatcagttcgagtcaaatgtaacgtgctgggtgtgacagctcatgcctgtaatctcagcacctggaagtctgaggcaggagaattgctgcaagttcaagtctggcctgtgttaaagaccttatttcaaaaaccaaggaaaagaaggtttgttggtttgtttgtttgttttttaagaaaatgaatggatttttaagtgttctcacttcaaaggtgtgcataacatagtgctatggcacacatacctgcatgtgctctaacacacacacacacacacacacacacacacttgcgtgcgtgtgatgcaaattatgggattctgccttcatcgactgacagcagagatcaaggtagtgacacagggattataatggataggaagaatatttggggctcctgtggaagctgaaaaggctagcattggacagggaagctgtcagaggaggttcctcagggtctgagccttcactgagccctgtgaactcacaaggcttaactaacagtgacctccttagccaaaggtagccactgagtgggaaaatcacgtgccagcattctggacacactcagtacacgttattccggctgagtgactctatatttgggaactgtaatacatgggcatacttagaaattccacagacctgttctgctcgcccatcctcacctgtccaaaaggagagtgagttcactctctctttagagagctgccctttgagccaacgcaaacgcatccctccttggtcttctctgaaggtaggatgtacccgagggaagcctggcttggttgaggtcggggcctccccctccatctccccatctgtctttttaagacctatttgcgtatctttcttgccatcccctatgagtttgttgaagtaggtctcattttcctatcttcaagttcttggcaaaaaaaaaagttgaagtggaaggcaccccactttcacccctgtgagtgaatgtgactatttccatggatgctccaaaatcagaggacacttcgcttgtgacacagcgggactgtgtggcccccaaatgttctttctcttcagctaccctgaccacagtgagtcccagctccaccgccctgaggtaaataatagcaacagtagttactatcattacttatgctaaggatctcaggttgactggacacatgatctgtcactgagctgtgtccgcagccctaagaacatttctttttataggtgtgttttaaggactggtctctggcctgatttttttagtctcattgaactccaagagaggctagccaatgcttgctctctattaaatttaatcaatcaatcaatcaatcaatcaattacttttttgagacaggatttctctgtgtagccctggctgtcctggaattcactctgtagaccaggctggccttgaactcagagatatgcctgcctctgtctccctagtgctaagatgaaagacttgtgtcactgtgctcagcttttaaaaatatttttagttaacttatttcctgtatctggcccacatgcatgtatgggcgccctgtgtgtacctggtgtctgcagaagccagaggtgggcatcagatctcctggaagtggagttacagatagttgtgagtcactatataggtgctgggaatcaaactcaggccctctggaagaggagccagtgttattaactgctgagtcatctctctagcctctaaaataactgttgttgttgttttttttaagttaattttggggggggtaaactatcaaaatgatttttggggaaggggatgggggatacggggtcaatttccagaatccacatgttggctgacaactctgtaactataggtccaagggatctgatgacgccttcttctggtcaccttgggcactaggcacacacagtgcacatacatacgtacaatatacatgtaggcacacattcatacacacaaaaaaaatctttgggaaaaaataaacagttttctagggtctcaggatagctcagtggttgaagcccttgcccagcaagatcaaggacaagagtttttgtgcactcctttaatcccactgaggcagacagatctctgctagttcgaagccagtctggcccactgtactgcaagttcaaaaatctaccctggctgccatctaagagatagggagatagggagatgatagggagactgtctcctagatttttggtgtacgagttgctgaggaatgaacccaagatccttgtgctaagcagacactctgtccttatcagggctaccattagccaggagccattaaacttctaagtagcagctcactgagtctgttccttttggggggcttgcgatgaagacaaaggaggtaagaagaaggaggaggcagcggcggcggcagaggaggaggaggaggaggaggaggaggagaaacttagagtctagcataaaataagaaccaaccaaagtgtagcaatttaattggtcaatgtggtcagcccctagagacagcaatgaaaaggccgttgaactgcttagtgttctgtggttacacattaaggagagagaacttccttcttcctccatgactggcaactctaatataatgccaggtacttcgaacttaattttgggttcttttgtgcatagaaggaaacaggagtgaggttggattatgaagtctaaacagggttgtgctgtgttatggcacacatggacggtacacacctataatcccagcaccagagaacctgaagcaggaggaccatgagttcagggtcaacttcagatatatgctgagttcaaggctagcctgagctaccagagagcctgcctcaaagaaaataaatgactgactgtggtggcccatgcctttactcccagtgctcaggagaccagggaaagaggacctctctgaatctggctagcctggtctatgtaatgagtcccaggctaatcactgagtggagaacttgaacttgggtagagcgcatatcccagaannnnnnnnnnnnnnnnnnnnnnnnnnnnnnnnnnnnnnnnnnnnnnnnnnnnnnnnnnnnnnnnnnnnnnnnnnnnnnnnnnnnnnnnnnnnnnnnnnnnnnnnnnnnnnnnnnnnnnnnnnnnnnnnnnnnnnnnnnnnnnnnnnnnnnnnnnnnnnnnnnnnnnnnnnnnnnnnnnnnnnnnnnnnnnnnnnnnnnnnnnnnnnnnnnnnnnnnnnnnnnnnnnnnnnnnnnnnnnnnnnnnnnnnnnnnnnnnnnnnnnnnnnnnnnnnnnnnnnnnnnnnnnnnnnnnnnnnnnnnnnnnnnnnnnnnnnnnnnnnnnnnnnnnnnnnnnnnnnnnnnnnnnnnnnnnnnnnnnnnnnnnnnnnnnnnnnnnnnnnnnnnnnnnnnnnnnnnnnnnnnnnnnnnnnnnnnnnnnnnnnnnnnnnnnnnnnnnnnnnnnnnnnnnnnnnnnnnnnnnnnnnnnnnnnnnnnnnnnnnnnnnnnnnnnnnnnnnnnnnnnnnnnnnnnnnnnnnnnnnnnnnnnnnnnnnnnnnnnnnnnnnnnnnnnnnnnnncttctcttctcttctcttctcttctcttttcctttcctttcttttgtctttcttttttcttttttctcttcttcttcttcttcttcttcttcttcttcttcttcttcttcttcttcttcttcttcttcttcttcttcttcttcttttgaacacagggtctctctctctttatatatagttctggctgtcctggagtttgctgtgtagatcagatcaggctgttcttgaactcatagagtgactcttgcttcttctgtctcctgagagctgggggtcaaaggtatgcaccgctcgacaagtggctagactcaaactcttgactctactgcctctgtttccaaatgctggagttataggcataagctattatgctaggctaaggccaatttcatatgtgtgtgtgtgtgtgtgtgtggtatgtatatatacataaatatgtatgtatatataatttatcttacgtgcattgtaattttgcctggatgcatgttttgtgagggggtcagagcctggagttacagacagctgtgagctgctatgtgggtgctgggaattgaacttgggtcctctggaagagtagccagtcctcttaacacctgagccatttctccatcctcccaaggccagtttttaaacacttcttttcagagtcagtttccctgaagcttcaaaagtctgatacttcccctaagagatttatttccaatatttttgatgactgtgaaattattcctgagagacagcaaggatccaacgagtgccctccccagctgcggactgtaaagccaatctgcctgagagcgtttggcagatacgcctactcaataattactagaagacttccctttcacacaccagtctgattttcttctcatcgctcatctgtctctggagtatggtttagagcacctgagttctagaacaggtctggccactcaccccagagtgtgagaagagaggactagagagagactcgggagcccagggtcatctttggcctacacaacaggttcaaagccagctggggatacgtgaaaccctgcctcaataaataaaaatatataaggaagtaaataaaaaaaaatccccatgactcagcagcagcaaaaaaaaaaaaaaaaagtccccgagtgagaaaaatctcccagtgatcactttcaggtactagttttggttgtttgggttttgtttctgtcactgtgataaactaccctacaaaaggcagcttagggaagaaagggctcagggtcacattttagctcacgcttccaggttacgagaacagtgcatcattgcaaggaagtcaaggcggcttgaacttgaagcagctgattgcacaatccaaagcagagaggaacaaatgattgctggttttctctcagcttgctgccatccggatccctaaaccagggagggcatcacgctgcctactatgggctggatcttcccacaccaaataaccaagacaatcccccttaggcctgtccatagccatcctgatccgggctatctccgtccctgagactcccttcccacgtgattgtaggttgtgtgaaggtgactaaattatccatctctacttctaattgccttgaaggtgtcgtgagaaacttcctgaagctgttaacatgatctttcgttttgttatcagggctttaattgaagcttatcatgaaaagggaccaaaggcagaggagagaaatcccaacagatactaaaactccacacggtgtgcgctgggtctctgtgcgcctcggttgctacagttgagggtttccaggctctgagggggcttctgaggagaagtttctaaggagggcttcattttctctatcagggctcctgagctatgagattctaaagtctgtccttatcaggaaaccttaaggaatcagcaggaagcccagaacaaggggaaggaaactcctcccacccatcaaaggatggccaaggggcaggcatctgagcagccgaggaacggacaccctgaagtggagaatggttgagccctcagagcaaaggcagagaaagctgtctcgctacagatacagcgtaaaaccacccttactgtgaggctagcacagagtggccattcccgcacccgcacccccaaagccccgcaatcttcgaggccagggaacggctagtcctttatgaacggcagcatctgtgtctctgttttcacattccacggccctctgagggggggacctgccctccttgttcctgatttttgccttactcaagaccagaaagaaaaattttttttcgaagtaaacaaacaaacaaacaaaaaaaaacaggaaaaaaagatgcaaacatgcatggtctcaatccctggggagcagctgattttatatatatatatattcctcacctgtttgtgagctagagggaaagccaggaattctagcagactctggacgttaacggagaccgctcatcctgggggctgagaacccagctcggctcggaatgttccctgcttgtgcctgactctgtgcgcgcccagcttctctttgatgtgcgctgtggatgagccgagctcagttctggaacagctgagtcctcctgtctgtttagattgttacctgaaggaagggagggggaagaaagtgctgattcgactttttgatggggaaaactttttttttaaacatgcaaatgacagatggcagagctttttggaaaaagaaaaaataataaccacacagcaaacgcctagggggagtccggtggagtttcatcatgggtatgaacagttgttgtttttttcaactttcttcttctttctgggtgttgatgtggatctctttctatttgttcaggaaactgtgacgtgtgttcttgggcagggtctgaggttttggaacctctttctaaaagggacagaaagagcaccctgctacatttgctaatccagaggctgagtggagccgagctggtcaggatgcaggttcccgtcggcagcaggcttgtcctggctctcgccttcgtcctggtttggggatcttcagtgcaaggtaagagacccaggatctttaattctctgctctgaaggcatcagcatatgcacaagtaattgtcttcatctgaaggtgcagggtgtcctattgtgggaggggaggtaaggaaggatttcaggtgcctcaacaacctcgtgtgagtttacttgagtttggtctaaaaaataataataattaattaaactctaaggtaagtggtggccttaaaacctgtcaggatgactgaaaagtgttcttatttttttgggtaaagatgtgtggtttattcatttaaagcattcaagaaataaatggaaaattacccaactgatctactgagatggtggcatcatggaattttctagaatagcatcctatcactgagttgtctgcatgaactccattttgatataaggtctcatgtagcgtaagatggtcttcaacttgctatacagctgaagaggacctggaacttctacttcccgagtgctgggataacaggtgtatgtctccatgctgggttccaaagaacggaatctgatggcgctgttattttaacaatgaaagaggcttttgtgtgtgtgtgattttctgagacagggtttctctgtgtagccctggctgtcctggaactcactctgtagaccaggctggcctcgaactccgaaatccacctgcctctgtttcccaagtgctgggattaaaggtgtgcgccaccactgcccggctttttttttttttttttttttaattggggtaaatgtagctatttttactttcttcttaagctcggctcttaccaaacattcaattttggctaggcaaaatgctaactctaaaacaatattttagaaacagcctgaggagtgttagcatttgtgctctcgtccagaaaacaggttttcgtttgaaaacctgtctgtaaatttgactgtcttttacagctgttcagtcatgctgactcaacctcaaactttttctaagaagatggaatgtttgtagaacaaacaaacaaacaacaactacaaagaagcacactttattcgccttaatatttagggaactatgtctaaatgaggcagaaggtcatggcctgataaataagttgccgagtttatggttgaaaaacataaaggaaatgttgagtcacagcgacatacgtgtcctggagtttcttcgaagtgactcctagctgtagcgttcttacttccggtcgaaatgacatctcacaggttacttcagaaattccttgcatagtggaagtttagaaacttattttcatggggctatgctaacgtcgtcatcggaaaacaggaagtgaccttgctaaggctcacttctatttatgtagctttgtgatattggcgcctacacccagggcctcatgcatgtccggggctctgctacacagctagagccacacttttccctttgactcagaattcaagttcatgcggatctttcagggaaaaacctttggcttcatgaaatagtccccggtagccacgtgctctggcaagatggacagctgtgaattccgcatttgtgacacctggctctgggtgtctctctaccagaggcgtgcatgtaagcctttcagttgcaaaagttcccagaaacatcaaactagactaaaaacaaaaccttgtctatttcatcacgagccagaaattaggaaggagtcgggctgggtggcttctaaggcactcaaggtgcagaggcaggagggactgtgagtttaaggccagcccagtcttcgagagttccaggatagcctgtgctactagtgagatcttatctcaaaaaaaaaaaaaaaaaaaaaaaaaaaaaaaaaaaaagcatgggggggggagaggtaggggaggaaaggctgtcttttatcttttatgtcatggttgacttagctcttagttgggaacagaagcaaagaaaggagacaatgaatgagccaaaaatctagggtgtttccaaggggttcttggcttaacgactttgctcatctctgaacatgaatgtgggtgtttggccacgagttagtgattaagcggctacagcaatgacactatgtgtcttaccacttgtgtcctgccacgagtgattagataccataccctctctgtcaaatcgcttaccccaggatagccttgagctcattttttaaaaattatttatgtatgagtgttctgtgtgcatatacatggtacatgacaagagagagcatcggatctcattacagatgtttgtgagtcacccagagattgctgggaattgagctctggaagagcaagtcggtgcccagccccttgaattcattatgagctgagggtggctttgaacttaagtatgtgtgctaccatgcccactttgtggagtgctgggaaccaatcctaggttttggttgcatgctacaccagtttaccaactcaaccacaagcccagctctcgccttatctttacaaagatgtttaaggactggtgtgtctgtagttttcctgtctaagtgatgagatgcaccgggattttagcctgtgatcttaggttactgcatttacgttctgagattgccgtaacaaaacaccatagaccaggtacttaaacaacagaaatatagccaggtagtggtagcacatgcctttaagcccagcactcaggatgcagaggctggaggatctctgagttcgaggctagcctgagctacagagttagttccagaaaaaccaagactacacacaaagaaaccttgtctcaaaaaaaccaaccaccaaacagtagtttattttccacacgcacattgtaccagagtttaaaacccaatccaagatgcctggcccccgtgtgttggcaatgttggcttcactctgacacctttctcatctatggtgcctgtgtcttttcacacagccccccttctctattccccattattctctccttagaaggacactgtcctgttggacataggccaccctaatggtcccattttgacctcttcagtgaccatgtttccaatgttgtcacattggaggcacttgtaggttagttcacgtgggaaaaaaaatctttcttatgtataaataattcccgtaacatactttatttctacaaatccagctaaaaccacgatgtaaaatggtatccagtacaaggaaacatgtgcaatctgcgagtgggtgataacagtgatggctaatctacttaatagaggctcccgggggactgtcacctaggcgaggcccttggctcctactttgcattaccttttttacttatccttcttaatgctcataaaacacttgggaggtggggctcccaaggtgagaggatcagaagtgaaaggccatccccagacaaatagtgagccttggactatctgagaccctgtctcaaacaaagcaacatgttcacaaagagacaagatgaaaaaatgcatgagcaggtgtagtcaaggagccgaggctaggcgccccccccccccccccgacaggaacaataccaggtccactcatgagcacagctgttggtaaagtgattttgtaatcactgcccaataacgaccctctctctggccctgaggaggaatttatgacgagaactgaccggaactgacaaccactgtctcacaggctccttacatcagccccttgctaaatatgggtgtggtttgctctaggcctgtgggagtgagctaataagtcattcagtttggaggtcagaaataagtttctagactgctcaagggtcattcaggttctattattattatattattattttattttatttatgtgcaaagggattttgcctgtatatatgtctgtgtacaaggtgccgagggaggccaaaagagtgtgtcagagccctaagaactggagttacagatggttgtgagctgccaagtaagtgctgggaattgaacccaggtcttctgcaagagtagccagtgctcttaaccacagagcccctgtctccagcccctttttaatttaaaacaaacagacagacaaatnnnnnnnnnnnnnnnnnnnntctgcagcctttgctatgtttcctgtagaggtgagaataaaccgaaagtaaatttggagttttttatagcctgtcagaccatgccccaggggggaagcttgcccatcctgtggcattgataggccaaaaggaagtagctccaatatagataacagccgttgcctgaacgttactgttttgtttttttaaaaaatactttttttatttcatgtatatgagtacactatcactgtcttcagacacaccagaagagagcatcggatctccttatagatggttgtgagccaccatgtggttgctgggaattcaactcaggacctctggaagagcaatcaatgctcttatccagagagccatctccgcccccccccacctccccctttttttagaaaagtaaatcagattagtctcttggggggggcatttttttaaacttcccctttgacagtttctacttaagtttttctgcatccatagcaagattcccagggaggccagaagattaggatattagtaaatttccacctggtaggaggtgtggaaagccaaatattgagatagaaggcctgtttgggagagttgctctgcttgtcttcttgtgaggcagagctagtgagtgtgtgagtgtgtgcagagggtatggggtggccggagtgcggtggaggtgggagcgcacatacctttagtttctgcatttggtgggcagaggaaagtagatacttatgatttttgaagccagcctggcctacatagtgagttccatacagagaggcagagagagagagagagagagagagagagagagagagagaggagagatgaagttggtggggaagaagctgaggagaaacatgatcaaaatacattgtaagaaaacgataaaaaagagttaagaacaatattttttaaaatggctggcaaggcagcccagtgagtaaagaccatggccaccatgtctgatgacctgattttgatccctgggacatggacacacacatatcagtataataaaaacagaacaaaacaaaccaaacaaacaatagcggtaattattagaggtttatagcacttcaagcaagagaaagtccagatagtctcagagcttcaagggtcagaatttcagtcttttcacagccttcccacgcccaagcacagctatgtcaggaattcgctatctgtaactgtgttctttattttaatgtgccattaatttaattagtgtaaaaactgggtgggtttcagaatgggacaacttttcctttcgattgctttctttcttgttttattatttgttatcttatgaccttgggtgtgtgcatatgtgggtgagcatgcacacccacagggaggccacatgaccgctttcgggacatcctcagggacactgtccatctcctttgagacaggtctgtcatttgcctggaactcacaggttaggttagactggctggccagagagcccaggcacttccctgtttccaccctccccgttgctggggttaaaagtggatacaaccagccctcccgtttgtagggtcttggataaaagtcaagtgcttgtgcatggacagcaagccctttagtaactgagtcctgtccttttacgtatttgtttgtttcttgagacggagccacagcgtgtatccctggctaactttgaaccttctatgtagactggcctggccttgaatatgtggccactccactccaccttgccgatcttctcaagtgctgggatcacagacatttgcaagcagcagctttgatttctttctttctttctttcttccttcctttctttctttctttctttctttctttctttctttctttctcaagatttatttatttattttatacatatgagtacactgtagctgtcttcagacactccagaagaaggcatcggatcccattatggatggttgtgagccactatgagattgctgggaattgaactcaggacctctggaagacagtcagtgatcttgaccgctgagccatctctccagctacctgctgatttcttattgttagacagggtctcacgatgctcatgatgaccttgaacttggtgtatagatgagaatggccttgaccttttgatcctcttgcctttgtttccggtgtatgacaccatatctgctttgtgcagagctgggggcagggggaagcctaggatttagtgcatatcagaactttaccaactgagctgcctcccctgcctttcactagctgtgaagccattctactaagagtcagtttctaagctatacagctcactctccaactcacagggctgggttttcctatggtcacagattgtgtaaccatcagcgttggctttggagaaaaactttcccacctcccaaatatgttgagttttggagggggtgggggggagtcctttctatttcagaaatatatttgcttaatctgccagagttacagttttcgtttcgttttcactagtgggaagatgcggtcgttgactggggtgcccccttgtatcgtgggcccgggatgcccctcagtggtagtgcccttgcagaggatgcctgatgctctgggtttgatcttgaccctgaaggggaaataacaacattcagttagctctttggagaactttccatccaagcacacatttttctcagggcatcagccacttgcagagggcagtgccctatcctgtccagtagccagcagccacatgtgactactgggcacttaaaatattgattgagtcaggtggtggctcatgtcttgaatccccaacacttgagaggcagaggtaggcagatttctgtcagggctccacagagaaaccctgtcttgagaaaccaaacaaaaaacaaaatcaaaaacaaaaactaagaaatacgatgagtcgagactgacatgtgagttcaaaataagcacactttggaagagttgggttaaaacagtataaaatatctcacttgtaactttaatgttaattgtgtattaaatgatgatgttttaatatgttcaagtacaatgcacttattctttttacttttttttaacttaaaaaaatacggctgctaaagaaaaaaaaaaaaaaaaaaaaaaaaaaaaggaggaaggaaacacaatgctgcagaaacaggcaaccgtagatcgagaagactatgattttattggacgaagtttctctcgacagctgatgtgggaacataccgccctctgctggacaacaggctgctctacacccctctaattctcaccacaatagactcaaaagtcaaagctagatgtcttagaatatcaagtggggacagtgcggggaggggggcggctttaaaatgcattgaacatgggctgtgtgcaaagtcttgtgttgacgggctttcatcccccttgaatcaagaactcgttgccatagcgttattgaccataaccagagaaccagagcggtcctaagaggtgacccagtctctctccaagaggtttactctcagaaaaagggcagcgttgtcctccttaacagggagaccagcatttggaaagctgtggccaccattccgagaacctagctttttcttttttaacatgattttatcctttttaaaatttaattaattaattaattaatttttgattttttgagacaggtttctctgtaaagccccggctgtcctggaactcactttgtagaccaggctggcctcaaactcagaaatccacctgcctctgcctcccaagtgcttgggattaaaggtgcgccaccacacccagctaattttattttatttttttaatttttattttttaatgggtatggtactttagtctgtgcatgcctggtgcctgcagagaccacaggagggaatcagatccccagtggtatcctaagtttgtcacaaaaattaaatatgaaaaagaaaagaaaaaattttaaataagataaagatatataaagagcctcctcccttgtactggggaaagggggggaagctcttttccccattcaaggttaacctgggctacatagcaaaaccccatctcataacagcaacaaggagagtgtgggggatgagttgtctctattaaaaaaaagaagaaaaggcaggctttggggctcaggtatttcaatcctgactcctccatgagcctgtgtgtaatgtggagataaagatacaaatgtgacaatggttctgggcatggaagggcacacttgtgataccaacactgacaataatgaggcaggaggatcaggaactccacgactgtggtggcacaggcctttaagcccagcacttgggaggcagatctctgagttccaagtcagcctgatatacagagtaagtaacagtaacagggacagccggggctacatagtgagaccctgtctcaaaaaagaaaaagaaaaaaaaaattaagatctaagagggcctagaatatggcccaagtctgtgtacaaaaagttaataaattaaagagttactacaatgccttgacattattttaaggttttatatgaatcttcttatttaaattttttctttttttttgtatttaatttttgtgacaaacttaggataccactggcctttaaagtgcaagttcagaggtcaaggttccagaaccttcgggggcgggggggggggggggaggccagagctgagcctcctctctcagccgctcactcccaaagttattctattttaaccctttcctttttatttttattttttgtttgttttatttctggtgtgtgtgtgtgtgtgtgtgtgtgggtgcctgtatttagtgtggtgtgcgtatgtgtgagtgtgcccaaatgcacgagcatgggtgtgtacgtgtgcctaagtcggaggacaatttgtgggacaacttgttagttctcccctcccctcatgtggatcctgggatttgaactcggatcttcgggctcagcagcaaacacctctacccgctgaaccacctcactggccctattgtacagagccaggtgctattgtgaagaagaaccatgagaatgacagtgtctgtcacaggcattgttggacataaaacctgtgaccctgggctggcgagatggttcagtgggtaagagcactcactgctcttccgaagatcctgagttcaaatcccagcaaccacaaggtggctcacaaccatctgtaatgaaatctgacgacttcttctggtgcgtctaagacagctacaatgtacttgcttaaaataataaataatatttgggcctgggcgagcagggccgaccagagcgagctgggttgaccgggaagagcagaggtcctaaatcaatacccaacaaccacatgatggctcacaaccatctgtacagctacagtgtacccatatacataaaataaattaatcaaaaaaaaacctgccgtggtggcgcacacctttaatcccagcactcaggacgtagaggcaggcggatttctgagttcaaagccatcttggtctacaaagtgagttccaggacagccagggctacacagagaaaccctgtctcgaaaaaccacaaaaaaacccaaaaaccaaaaaaaccaaccaaacaacaacaacaaaacccctgcgacctgccaaatgtacaatccatgtaattaccttgttagagacagtgtaaccaattctaaggaagccgactgaaagatgtttatcacccacgtgggttccttgttcgcacaggttatcctgctcggagagccaggtaccagtgggtccgctgcaaaccgaatggcttttttgcgaactgcatcgaggagaagggaccacagtttgacctaatagatgaatccaataacatcggccctcccatgaataatcctgttttgtaagtagactttcattcgatctcacaggagcgcctgagtgtttcatttcaggttcttgctgtggtaaaaactactccacagagagcaaaagtgggccatgtgtgctgaagcaagagatgtgccaatgaacatggactcatccatgtttttataagggtttcttgtgggcagcagcgataagccttggaaagtatttgccccaacatatgttggaaaggattgaatataattttctttaggcaaataaagtgtttatatattaaaattgagttgagttagatttttttattttttattttattatttatttatttgtttttgagaaaggatttttactatggttttttactatactaggctatgctagcctagaacttgctatgtagaccaggctagacttgaactcacagagatcagcttacctctgggattaaaggtgtgtgctaccacagcaccacagctgtttcttgtggggtttttttggagggtttttttttttttttgtgcttcattggaacacatttattaaatactgaaatggaccctttgactttgcttcatctgttctatttgtcattactgtttactggttttactttgtgaacaacttgccactcaatgtgttctggaaaagcagtgtgtcttacttagggtttcactgctgagaacagacaccatgaccaaggcaactcttttattttaattttttaaaaagatttatttattattatatctaagtatactgtagatacactgtagctgtcttcagagacaccaaaagagggcatcagatctcattacaatggttgtgagccatcatgtggttgctgggatttgaactcacgaccttcggaagagcagtcagtgctcttaactgctgagccatctctccagccccaaccaaggcaactcttatagggacaacatttaattgggtctggcttacaggttcggaggttcagtccattatcatcaaggtgggagcatggcagcatccaggcaggcatggtgcaggaggagctgagagttctacatctacatctgaaggctgctagcagtctgacatctttaggcagctagctctctaagcccatccccacagtgacacccttgttcaacaaggccacacctcttgatagtgccactccttgggccaagcatatacaaccaccacacaatgatatacaaacagatactgttaggacccaaagtcagctaggcatggtgacacactcctctaaatggagaaaccaaggcggttgggagttcaagtccaggctcggctacatagcttgcctcaagtcaccttgtactatccaaaagaagcaaactttggtttctcacttgggcaagcatattcacgcgcatgaacacatctcagggtatgtgtggaggttggaggaccgctcacgggaataagttgttgcctgggggcttgaacttaagtcaaggcttggcagcaggcacgtttgtgatgagccgtcttgttggctagtgagggaagatgcctgttggtcctctttgctatctcttgttgatttcacttctctactatgccatgtttaagaagtttccttgtgttaaattgttcagttttcccgtaccctgtacccacccccttgtctcagacttcctttctccaggtccctctctgggtctggcatctcccatcagtatgcagatatattctacagcttcttgacatggaagagactccctccctcgactctgaacacctatagctatttctccactctgctctttattgaatcagattgattttttgtttgtttgtttgagaacagagtctcatctcactatatagccctcctggttgtcctggccttgaactcagagatctacctgcctcggcctcttaaatgctgggagtaaaggcatgtgccaccatacttggcactttagcacctcatagaagggatgcttatggttgttttagccccacttccaacccccaaccccaagcctcagcctccaaccccccaccccccgctcatcaacacacacagttggatttctgctccagccttcaatcctgagtgtgtctgcctggtgatcgacacatctattgattgaatctctatttttaggcttcttgacccctttcctgcctttcaaaatgactgacccaccgcttcctttgaaacagttccttctgtggcttcctgccatccatccaccttacccaggttgtttccatagctgctttcccttttgatccgtgtagatgctgagtcccaaacccagctcccctgtgagagtagcaatggctctgaaccccagagttgtctcttcagtcctgcctctttgttttgaagtgctgaagcagattttagctcttcgaatttgaacaactgggtgcctgaatttatttccatgttgccccccactcnnnnnnnnnnnnnnnnnnnnnnnnnnnnnnnnnnnnnnnnnnnnnnnnnnnnnnnnnnnnnnnnnnnnnnnnnnnnnnnnnnnnnnnnnnnnnnnnnnnnnnnnnnnnnnnnnnnnnnnnnnnnnnnnnnnnnnnnnnnnnnnnnnnnnnnnnnnnnnnnnnnnnnnnnnnnnnnnnnnnnnnnnnnnnnnnnnnnnnnnnnnnnnnnnnnnnnnnnnnnnnnnnnnnnnnnnnnnnnnnnnnnnnnnnnnnnnnnnnnnnnnnnnnnnnnnnnnnnnnnnnnnnnnnnnnnnnnnnnnnnnnnnnnnnnnnnnnnnnnnnnnnnnnnnnnnnnnnnnnnnnnnnnnnnnnnnnnnnnnnnnnnnnnnnnnnnnnnnnnnnnnnnnnnnnnnnnnnnnnnnnnnnnnnnnnnnnnnnnnnnnnnnnnnnnnnnnnnnnnnnnnnnnnnnnnnnnnnnnnnnnnnnnnnnnnnnnnnnnnnnnnnnnnnnnnnnnnnnnnnnnnnnnnnnnnnnnnnnnnnnnnnnnnnnnnnnnnnnnnnnnnnnnnnnnnnnnnnnnnnnnnnnnnnnnnnnnnnnnnnnnnnnnnnnnnnnnnnnnnnnnnnnnnnnnnnnnnnnnnnnnnnnnnnnnccccccaccccaccccacctccgccactttttgttttcttttttgagaaagggctcagtagcccgtgctggctgcagttcactatggatccaagtatgactctaagttcttaccctaccaccactactacccaaaagctgcaatactttgtgtgtactccacacctagtgtatttctttatattaaaatattgaaattacattataagtagaactttataatttttttctttgtattttaggatggaaggaccctcaaaagatttcatctccaattatgatgactatgggtcaggttcgggctccggctctggctccggctctggctcgggttccggctccggaagtggcttcctaggtgacatggaatgggaataccagccaacagatgaaagcaatattgtctatttcaactataagccttttgacaggattctcactgagcaaaaccaagaccaaccagaagacgattttattatatgaatgtgacggtctctgtctccccacctccatgtggaacaatgtattcagtatacttagtgtaccacgtttaaatgaccagtctcaggataaagagttttacagaaaatttaaaatgcctggaaaagactcttgaatcctgttacccctttcctcattaactcgtaaggaattatgctttaatgctgttacctatcttgttgttctggaaaatgcctgcatttatgtgtattgaatcaacatttaagaaattaacacacacccccattattatacaataactttcaaagccatactggttttgaaaattttaatttgatagcaagttgatgaacaatctttcatacctaaagtgttcaggaacccaactcgcattgtgaattacaaatatattcctttatgtgattaaaaagaaaataaagtgaaacacagtggcctcctaccgtggctatgtgacatggtttacatggtgaggggtagatattgagctgtggccattggatgtgacagggaagaccaaatgttatcgaaaaatgttgtgggttttttgtttgtttgtttgtttgttttttgttgttgtttttgagacagggtttccaggacaggttgtcctgtaactcactctgtagaccaggatggctagattcagaaatcctcatgcttctgcctcccaagtgctgggattaaaggcatgcgccaccccccaccccacccccggggttgttgtgggttttaaagttagaaacttaacgcctcaaataacatggagttgtggtctcaacggctcataatgctttacctttgtctagatgcctgttcagggtcaaatgttactccattaaagtgaacatataaccaaaggggggagatgtcatctggaacttcctgttctaatccagggaatagttactttgaaaaaataatcaatcatattatacatattaatatataataattttataatacagtatataatattggtgtaggtgatatttaatataaataatataataaaaagtgtatgtaattgataacatacaatatgatataaaatgtgtatataaatacatgatattgtaggctggagagatggctcagtggttaggaacactggctgtttttgtaggctggagagattgctcagtggttaggaacactggctgtttttgtaggctggagagattgctcagtggttaggaacactggctgtttttgtaggctggagagatggctcagtggttaggaacactggctgtttttgtaagctggagagattgctcagtggttaggaacactggctgttttgtagagaatccaggtttactttttggaactcacatggcagcttgcagcaggagatctgctgtccctttctagctatgggacatagcagacatgcatatgatgcacacatagaggcaaagacacacatacatagaggcaaagacatttgtacacataaaataatacatttaaaaatctttgtaaaaagcacatggaaaatacctcccaaactaaagcaagagccatctctgattctgtgccccccttcttttttttacaaaaacacgaaagtttattataatcatacctttcagaaataattgttgtttacagtttctgagttctttcagtgccttatttttcccctcttcccttctccctcttgctccagcccttgctcactctccggcccagctcactcctcgctccatcccacaggtttttctatcggatctattacgggtggttgtgagccaccatgtggttgctgggatttgaacttcccggaagagcagtcgggtgctcttacccactgagccatctcaccagccctatttttttttttaaaagaaagctgacctgtgagaaagctggcagtcagaaagccttcatttatactttctacttcagactcctgccaggagttcctgctctgacttctctcagtgatggactgtgtcttagttagggttttactgctgtgaacagacaccatgaccaaggcaagtcttataaaaaaacaacatttaattggggctggcttacaggttcagaggttcagtccattatcatcaaggtgggagcatagcagcatccaggcaggcatggtgcaggaggagctgagagttctatgtcttcatccaaaggctgctagtggaagactgacttccaggcaactagggtgaggatcttatacccacacccacagtgatacacccattccaaccaggccacacctattccaacaaggccacaacttcagatggtgccactccctgatccaagaatgtacaaaccatcacagactgtggcccagaatggtgactacttccttccctcttcgaagttgcttcagccagaatattttattacagcaacagaaaggaaggtagaaccaatgttacggctcaatggggagctatttccactagggtccattgtgagagttccactgaactttaggcgtggcattttaagccatttatgccaagggatgagagcccaaaataggactcaccttgaagtaatgacgttaatcacgagacggggctgctgcacagctgagagaaaggacatgtgacacttgggaggcctatggaggttcctcttaatagttttactatgtttagccaaggatcaaaacaggaatactatttatgaccattcactatttagcggtgcaaacacaaataactataatacatttttattatgtgtttttccccaaagctgtgagttgccattctctcagtgcattgtcttagtatttcagtcactgtttatcaatataggggttggagaaatggctcagtggttaagggcactgactgctcttccagagatcctgagttcagatcccatcaaccacatggtggctcacaaccatctgtaacttcaagatctgatgctctcacacagacatacatgcaggcaaaacaccaatgcacataaaataaaggtagataaatttaaaaggtatccacatagctctatcttttgctaatctgccttctcccctcgttagcgttgctgtgtagaactgatggttccttagggcccaatggctcatcagtgacagtgctgcctataactctgttacctattgcatgagtcataaatggtttacagaagctgcagtgtaccgagtaccacagggagaacctaaggtcctttgaaactggagttacagacagttctgagacaccacgtggatagtggaaccaaagttgggtcctttgtgagagaagcaagtgctcttaactgttgagccatccctttagcctctgatatgaaattttttatgggggaaattgcctcagtgattgatgtaaaatgcatccttttgttttttgttttttgtttttttttttttttgctatttggatatttgtgattactcggtgttttgttttcacaaggacagaatactaattaagaataagagctcttgagaattgaaaatgttagcatacattctttacttattgggttttttttgggggggggaggaggaggtgttggtttcaagacagggtttctctgtgttacaagccctggctatcctggacttgctttgtacaccaggctgacctcaaactcagagatccacctgccttagcttcttgagcactgtgattaaaggcatgtgccaccatgtccagccttattatttattgctacataattaatcaccttaaaactctatggcttatctgtatctttaatcccaagatttgtcaggtgaatctgtgaattcaagattaacacattgcaggacagccaaggctagatagtgagataaccccctccaaaaacaaaacaaaacaaaacccagaaccaaacaaaaaaaagccaaacaaacccaaaaccttggtggcttaaagcaatagatttttagaatttttatagtttatgcaggtcagaaattaagtagactatctggaaattctatttagaaagtctttttgtttgtttgtttgttttgttttgtttttttgagacatcgtttttctgtgtagccctggctgtcctgtcctggaactcactctgtagaccaggctggccttgaactcagaaatctgcctgcctctgcctcccgagtgctgaaattaaaggcatggctcacaactgtttgtaactccaattccaggagatctggcatccttacccagacacacgttatggcaaaacactaacacacataaaaataaaattttaaaagtacagttaggatattcaccagagctagagtcatctgaagacttggtcaaggatgaaaaagaaagtttccacattggtattcgaaaatagttggaaagttggtactcccatctgttttcagaagagaggggagatgtcctctccatggggctttacaccatgggagtggatgttgttagaagggaatggtccaggagaaaccaagtcaggagcagcttgaggcagccacaccacgctattctgttggtcacacaaaccgactttgatagaattcaaggatagattacacaggagtttgaacactaaaagagaaagctcgaggctggtgagatggctcagtggttaagagcactgactgctcttctgaaggtcatgagttcaaatctcagcaatcacatggaggctcacaaccatccataacgagatctgatgccctcttatggagtgtttgaagacagctacttatgtataataataagtaaatctttaaaaaaagagagagagaaagctcacggagagctatgccaaacaatacacacacacacacacacacacacacacacacacacacacacacaaactcatcatcatcatcatgagaactggaacatgagcaaacatggtggctcatgatataatttttgcattcagggactgaggcaggagaatcaagagtctaacgtcagcctgagatatgtactaagaccatttctgggacaaaaagaaaaacaaggacaggtgagatggctcatcagataaatgtgtttgctgacaggcctgaggacctgggctcaattcccagaagtgacatgtacaaattctgctctccatgcacaccatgtaatatacacctcccagaataaagaaacatgaaaaggaaaaaggaaaacaacaagagacagatggaagacaggaaagaaagtgaaaatccatttaggatgctcaatctaggatttcaagaaattccaggaagacagccgaggatgtggcttagtggtaggctggttgattgggatccatgaggctctggttcagtcctcagctccacaaaggaaaaaagaaacccaggttaaaaaaggtgtgtgtgtgtgtgtgtgtgtgtatgtgtgagcctagagcaaatcatcaaagaaatttaggaagactgcagggtacacagtcaatacaggaaagttacacacatcacaacgaagaactgaaaaatgaaaaacttagttttatttacaatagtgttaaaaaatacaggcacttagagataaatttaataaaaatgtataacactggaaattagaaacactggtgaagaacactaaaaaaaggtaaaaattagaaaaatgcacagtgctcatgaatggaagacccagtattgtttttattttacctccttgagtctttctttgggtgcatggaggttttgcagaccttctgtacaaaacctgcatatgtgatgctcatggagaccagaagagggcatcagatccccctggtaaggagccactatttggatgctgggaatcaaatctcatgcttctgaaggggtagccagcaagtgctcttgacttagctcagccatctctctagccccaatcgatagatttttgacaagcataccacaccacagcagtttacaggggaaagtattttgagcaaatggtgctagaaccaacaaacacagttaacctttcagatcttagactatgcgcaattgtttctctcttttgtttccttgtaacaaggtctcacactgtagcccaggtcattcaggggactaactgtgtaatctccaggggtcttttaattcatggcgattcttctacttcttctgtctccggagagctgggattacagctatgaacctctatacctgacttatccttctttatagagtgggtgatgctccttcatccaagccatctgcatcacagggttttaatcaatagtattttgagatctaaactcccttctctgtccccatactattttacccgtctgtaaatatgacaggtaatctccaatattgggaaggctgaaggaggacagatgtgtttcttgacagcctgggctacatagcatattccagaggagcctgggacacctagtgagaccctgtctcaacaataaatatacacacaaacatccattcgttccaaagctccctggcatagcaatctttaagatttgttttcagataatatcattttaggcagatttctcctgcatgcatgaaggaagtgcagtgttccatctgcagcaatgcataaaaccaccagtgactcctgcaattacagcattgggaaggcactttggaggtgctcactctccacttgaggctagcctagtctacatgagtacatgagaacccctgtcttacaaacaaaagactcatttccagtatttgaattctgtcgcgattggagaccgaagcctcattttaacctttaaatattttagacttacaacttgacactctactccccaagttgagtttcgttatgatagggctgatgacacccctccgcccataaatctgaatgaaaggttcagttcctaagccttcgtagtatttcatctatcctcaggttttctgggcctccactacaatgactgactggatcagagtgttggagagctgcgttttgcacgcttgcgaaacttttaggaagggctgttgccggggagggggggtaaggagggcggaaccgatttgagagtactgcctctccggcttggaaggctgcgtcacgagctatccgtggactgcaaaggatgtgctttaaagattagcttttctccctaaccgtctcttcggaggccaacaattctcggggctgaggcgggaaacagatcaggcgcaaaggtcggaactgcagcaagcccgcaaagacacgcctcccgcacaaaccctcgagtcccccaagtttccctagggaaaaggaaatgggcgtgccggagggaggagtttgacagcgcacggctcgtcacgtgacaactagctctagggttgctggactgagaagacagatctttgactcctcccaccagacgtcacccacccagaccacgccctcaaccgaaaggcggggcggaggagccccgcctcgaaacggccttccnnnnnnnnnnnnnnnnnnnnnnnnnnnnnnnnnnnnnnnnnnnnnnnnnnnnnnnnnnnnnnnnnnnnnnnnnnctctagcagggcggggcctctagcggggcggggtgggggggggagggagaagaggaaaaggagtggtcacgtgcggctgatggcctacggtcacgtgacgggcggcggggcgcaggcacccaggctgggagttcttctgagggaaagccgagtggagtgggcgacccggcggcggtgacaatggtgagtgcgcggcggcctgcctgcgaggtcgtctcccgcggggccgtggggcgcgcggcgggactcccaacggcgggcgcggcgccgagcctgcagggaaggggcgcggagcggtgaggcctgacggctgcccgctcccggccaggcctgagcacctgcggccggcggcactgtcccggccatgtcggagcctctgcccgccttcctcgaccggctgtggggaccctggctgggcacccgcagcccgcccagccggagctcggcagcctcgccttccaaggtagccgaggacagtcagtgccctctctcccagttccggactctggcgagacctgctcaccttcctcgtcccgagctcgatagagtccgcttattttctttaagctggttgtggagacattctgcgatttcttgattcgggtggaggcttttggcacttgtagaataggaggggaagggaggggagacaagagggtgtcggagccgagacccctcatttatatctccagacgccgatttaagcacttggtttcacttccttccctaagcgatttctataacttagcactttgggatgttgcagtgtcttgggagcccaggcagggatgaaaatcagagcacttaaccacacttaatggaaagcaccgttgggcgcgctagtgtttaactacgcgcccgcggtctatagattagagctcctttggctcgtgttatttagcatatactccatgagagcccactgtgcgctccccttatactacccgctcttcccaagctcgccacttttaataaactgcttgaaacttctcgtctcaagccagccagccaggtctatttttaaaacgttgctttgattaaataactttgagtcagaaattatttgctttctctagggtttggggggtgggggagaagttcattcagggagcgttttcttaaacagtattttgggtgagtccagggacagataaacaaggcaaactgcttgcttccttgcagcttacagactctggagagttaagcatttgtttagataaattagtttaaggtggaaattacaactgctgtaaataactaagaaggaattagtaggctgttagggagtcctcctttcactgtttataatttgaaaagaaagcttaaattgctctcttcttggttacttagttgaattagtccttctagttaagtttttttttttttttttttttttttggtttttcgagacagggtttctctgtatagccctggctgtcctggagctcactttgtagaccaggctggcctcgaactcagaaatacgcctgcctctgcctcccgagtgctgggattaaaggcgtgcgccaccacgcccggcccttctagttaagtttaagagcaatttttttttttatttttaaggtatttgtcaaacgaaattgtaaagctttaaagcctttgtatgggcacacatgtatgtatgagaatttgctgtttcattgtgtgtgggctcaagtgaatacattgtggaagctttggttcctctgagctctgttcagtttttttcttactgaaatttttttcctatatattttgattatgtttttcctttccttcaagttctgtttctttacatcaagcagacttaataaatttccttaaatggtgcccacagagtttgttacatttttatgtatccacgtgtagttttgctagatggtaatgctaaacaatgtatgtcttggcaccttgtgcttgttggagggcctcaagaaagcctcagcactcctggtactgtagttaaagtcagttgtgagctgctatttggatgctgggaatctgaacctgggtcctctggaagagcagccagtgctcctaaccattgagccagccctgttattgaaaaatattgcagaactgtgttttcttgtgtgttttggcagctttagtggcaatttaattttgttaaaatagtatttgtgactttaaatgttaaatttcaaattggaaaagacctttcggtgtgttacatagagaatatatgtagaaaaaagttgccatatatcattttacatgtaaaacatctttcatagctgggcgtggtggcacacgcctttgatcccagcacttgggagacagaggccagcggatttctgagttcgaggccagcctggtctacagagtgagttccaggacagccagggctatacagagaaacacagtctcaaaaaaaaacccacaaaaacaaaaaaaataccattgcagaaagaaaattgctgttggtgactttggagcatgttaaatgtactagtttctagttagttgtttgaatttgtcccttttgtgggggctggagagatggctcagcagtaagagcactggctgctctccttgagagaacctggattcagttcccagcactcacacaatggctcacagaatctgagctcacaggatctgttgcaaaaatctgatatcctcttttgacccctacagggacctgctacacacatagcaaacaaatatacactcaggtaaaacattaatacaataaaagatacacataaataaaaaaaggatttatgcaggctgatgagatgggggttcagcggttaagaatattgactgttcttcccaaggtcctgaattcaattctcggcacccatgtgatcacaaccatctataaagggacctgatgccctcttctggcatgcagacagagaacacatacattaaaaagaaatgcataaattttaaaaagatttacacacacacacaaaagaaactatctcctttgttaatataggaatactgaaaacaatttggtcattgtgtcacctgtgacctacataaccttaggaagctcct

SEQ ID NO: 1120 - DNA, 938 bp, Mus musculus
atttgctaatccagaggctgagtggagccgagctggtcaggatgcaggttcccgtcggcagcaggcttgtcctggctctcgccttcgtcctggtttggggatcttcagtgcaaggttatcctgctcggagagccaggtaccagtgggtccgctgcaaaccgaatggcttttttgcgaactgcatcgaggagaagggaccacagtttgacctaatagatgaatccaataacatcggccctcccatgaataatcctgttttgatggaaggaccctcaaaagatttcatctccaattatgatgactatgggtcaggttcgggctccggctctggctccggctctggctcgggttccggctccggaagtggcttcctaggtgacatggaatgggaataccagccaacagatgaaagcaatattgtctatttcaactataagccttttgacaggattctcactgagcaaaaccaagaccaaccagaagacgattttattatatgaatgtgacggtctctgtctccccacctccatgtggaacaatgtattcagtatacttagtgtaccacgtttaaatgaccagtctcaggataaagagttttacagaaaatttaaaatgcctggaaaagactcttgaatcctgttacccctttcctcattaactcgtaaggaattatgctttaatgctgttacctatcttgttgttctggaaaatgcctgcatttatgtgtattgaatcaacatttaagaaattaacacacacccccattattatacaataactttcaaagccatactggttttgaaaattttaatttgatagcaagttgatgaacaatctttcatacctaaagtgttcaggaacccaactcgcattgtgaattacaaatatattcctttatgtgattaaaaagaaaataaagtgaaacacagtggcctcct

SEQ ID NO: 1121 - protein, 163 aa, Mus musculus
LLIQRLSGAELVRMQVPVGSRLVLAFVLVWGSSVQGYPARRARYQWVRCKPNGFFANCIEEKGPQFDLIDESNNIGPPMNNPVLMEGPSKDFISNYDDYGSGSGSGSGSGSGSGSGSGSGFLGDMEWEYQPTDESNIVYFNYKPFDRILTEQNQDQPEDDFII

SEQ ID NO: 1122 - DNA, 36724 bp, Homo sapiens
caggctggtctcgaattcctgagctcaagcgatccgccgccctcggcctcccaaagtgctgggattacaggtgtgagccaccatgcccggccagaaatactgttttttgagacaaggtctcgctctgtcacccaggctggagtaaggtggcgtgatcatggctcactgcagcctagacttccctggctcaggtgatcctcccacctcagcctcctgtgtagctgggactacaggaacacaccaccatgcctggctaatttatgtattttttttaaagttggtggtatgtttcaccatgttgtccaggctggtctcaaactcctggactcaagcaatcttcccaccttgacctcccaaactgctgggttacagacataagccactgcacctggtgtggaaataatcgtttgtggtgacacttggattatctacttaacccacaaatgttcttgccattcaaccttcatgattactgtattactctcatccaacttgtaatattcctaactatattgtcttgagttttcaggcagtcccgagtgctaatcttcaacccaatttctttagactcattgtactccaaaggaggttatctaaagtatatcctcctttaacagatttttaaagttaaacttttgtttgttttttgagaaggagtcttcctctgttgcccaggctggagtgcagtggcacaatctaggctcactgcaacctccgcctcccaggttcaagtgattctcctgcctcagcctcccaagtagctgggattacaggcttgcaccaccatgcctggcttttttttttttttttttttttttttttttttttttgtattttcagtagagacaaggtttcaccatgttggtcaggctgatcttgaactcctgacctcaggtgatccacccaccttggcctcccaaagtgctgggataataggcatgagccatcacacctggcctaaagtaaaacttttgtaaacaaccaaaatatttttattgagcctttttcttgattattaatatacataatttttttctacaaaatttagagtagtctggaaaagatgaagaagaaacatttgtgatcctactgtccagaaaacaccactgttaattttttggtcaatgggtagctgaaccgattaagttctagagcagcggccgggagtggtggctcacgcctgtaatcccagcactttgggacgctgagggggtcagatcacgaggtcaggagatcgagaccatcctggctaacacggtgaaatcctgtctctgctaaaaatacaaaaaattagccaggtgtggtggcgggcgcctataggcccagctactcgtgaggctgaggcaggagaatggcgtgaacctgggaggcggagcttgcagtgagccgagatcgcatctctgcactccatctgtctgggcgataaagcgggactccatctcaaaaaaaaaaaaaaaaaaaatacatctctagtataatcttggtgtgaagccaagacaagaacatgcaaaaaaaaaaaaaaaaaaaaaaaaaaaagatggagtatggagtattcaatacatatttattcatctattcattcattcagtgccttgagcggaggtgcagaagcatgtcaagctaatcgggaagtttagtccagttgaggatataatcaactaaaggtcatcaaggtgtagagcatttcactgaagttggaagaggagcaacctatttcagtagtagatactatttttttggatggagggtggctgtatcctttcattctttagtgagaattaaaagttaaaatttagctgggtgcggtggcttacacctgtaatcccagcactttgggaagccaaggccggcagatcacttgaggtcaggtgtttgagaccagcctggacaatacagcgaaaccctgtctctacaaaaaatacaaaaattagctggatgtggtggtgagtgcctgtaatcccagctacttggtagggcgagataggagaattgcttgagcccaggaggttgaggctgcagtgagctgtgatccagccactgcactccaacctgggtgacagagccagacctcgtctcaaaaaaaaaaaaaaaaaagttaaaattcatcatgggaaaaaatttttaccatctcaatgaagctgctaaatcgcatttcactaagtgatgctgtttatattttaaatttttaaccaaagcaaaaaaaaaaaaaaaaaaaaaaagcctagagtctggcaaaaaataagaaccaactaaagtgtagtaacttaattggtaaatgtggtcagcctctgggaactgaaatgaagaggccgttgaagatccggttgatgttctgtgattacagattaaggggcaagaacttccttcttccttagtgacccataaccttaagtataattgcaggtatggagtataacggtgtgtgtctggaggagaaggaagtaggggtgaggtaggaaacattgtcactgaatttgggaatttggataggttgcttatctttggagggagctcagcatcttatggtggtagaatggatggatgggttataggattggcaggaatgaaccaggtgagttctggggacattggtggggctatgtactgctgcaggatagggtataaaataagagcaatgaaggaagctgagggggatccagtgtaccagcgagtggtgtgtgctactttgagttgcacactcaagtcatcatgatggaagacatgatagtcataatctctgtgtggtaggtgacaaaggatttgtcctttcattttttaatttttttgagacagagtcttgctctgttgcccaggctggagtgcaatggcacaatctcagctcactgcagcctccgcctcctgggtttaagtgattctcctgcctcagcctcctgagtagctggaattacaggcgcctgccaccacacccagctaatttttgtatttttagtagagatagggtttcaccatgttggccagactggtcatgaactcctgatctcgtgatctgcccacctctgccttccaaagtgtcaggatcacaggcgtgagccactgagcccggacttgtcctttcttttaagtccctccttgcaattcttcacctgctgacttttccatagtaagcattaattaattagttaattatttttgagacagggtctcactgtgatgtccaggctggagtgcagtgtcacaatcgtggctcactgcagacttgaattccttgactaaagtggtcctcccaccttggcatcagccactgtgcctggcctattaattgttttgttgtcgttgttgtttttgagagtctcattctgtcgcccaggctgtagtgcagtggcacaatctcggttcactgcaacctccgtctcccgggttcaagtgattctcctgcttcagactcctgagtagctgggactgcaggtgcgcaccaccacacccggctttttttttgtatttttagtagagacagggtttcaccatgttgatcagcctggttttgaactcctgacctcgtgatctgcccgcctcagcctccccaagtgctgggattacaggtgtgaaccaccgcgaccagccctaattttttaattagaaaagatagctaactaaagatagacaaaaataattttagaatagcatcgatagatagtgtgtcttgggagaaaggtaagacttaagaagtcaaataaagacctcttttcttgattcatattcaaagggtcctgctctctctaacccacatatccactcctgtgccctttctgaaatttcccgagagatgtgtttccactatttgtaatatcctatagttttttgtaagtcctatagttttggaattgaaattctgtgtcctattagactcagggtagcattttgagaagttattcaatgcctttctttttttaaaataggattttttggctggacaaagtggcctacacctgtaatcccagcactttgagaggccaagacccaagttcaagaccagtctgggcaacatagtgagaccccgtctctacaaaacaattaaaaattagctgggtgtggtggtgcatgcctgtagtttcagctactcaggaggctgaggagggaggattacttgagcccaggaggtcaaggctgcagtgagccatgactgtattgctgcattccagcctgacaacaaagttgagacggagtcttgctctgtcgcccaggctggggctggagtgcagtggtgcgatctcagctcactgcaagctccgcctcccgggttcacgtcattctcctgcctcggcctcccaaagtgctgggattacaggcgtgagccaccgcgcccggcctaaaaaaaaaaacaacttttttaaagaacagttttaggatgggcacagtggctcacgcctgtaatcccagcactttgggaggctgaggcagggagatcacttgaggccaggagttcaagaccagcctggccaacatggcgaaaccctgtctctactaaaaatagaaaaattagctgggcatggtggcacatgactataatcccagctactcaggaggctgaggcaggaggatcacttgaacctggaaggtggaggttgcagtgagccactgcactccagcctgggtgacagagcgagactctgtctccaaaacaaaacaagcagacaaaaaaacaaaaccaagccaataaccccaagttcctcaacttttaggtacctagggaggtttctggactaggactctggagacaaaattttaagaaggggagcaatcatgctcttgggaaaatacatatatatgtatttttagacagagtctccctctgtcgcccaggctggagtacagcggcacagtctcggctcactgcaacctccacctggcgggttcaaggggttctcctgcctcagcctcccaagtagctgggattacaggtgcatgccaccacacctgtctaattttttatatttttggtagagaaggggtttcaccatgttggccagtctggtctcaaactcctgaccgcaagtcatctgtctgcttcagcttcccaaagtgctgggattacaggcatgagccaccgcacgctgccatgggaaactaatattaatagatgtgtggctatggtgatgagaagggaggagctggagaaggagctacacggccctgccagggatgcccttgaaactatgccctcttccagggcatccctacgttgttcctcggtaaggagaccaaggacacaatgagagctgctcccttgggatcagaagcatcaagataatttcctgaccaggtgcgtggcatgtgcctgtagtcccagctacctgggaggctgaggcaggagaattgcttgagcctcggcatttgagtccagcctgagcaacatagcaagactttgtcgtaagaaaaacaaaaggtgatttttttgtcttggccacagtctccctgtccactaaatgattgagggtgggaatggaagtagaaccaaaataataggaaactcaaagttgtctgagatccgtgaaaaaataagccactttttaaaaaaacatgcctttttttttctgtaacaccttttttaaatcagatgttttctcatttatatggactctaaataaaatgaagatctctttttaaaaggataattttttagaagttttatggaaaaaaattttttttttagacaggtctggctctgtcactcaggatgcagtgcagtggcatgatctggctcactgcgacctccacctctctggctcaagctagcctcccaactcagcctcccaagtggctgggactacaggcatgagccaccatgcccagctgattttggtatttttcacagagtcggggtcttgccatgttgcccaggctggtttcaaactcctgagctcaagtgatccgcaaaccttggcctcccaaagtgctgggattacgagtgtgggccactgtgctggcttattatgtaaattctcaaaaatatattaaagtagggaggatagtataatgaaccttcttttactcattgctcaacttcagcagttgtcaaaccaccagtataccctccccatctaccctcaaaccagattatttagaagcaaatcctagtcattttatcatgctaaacagaaatgcttagcatgtacctctacaagaaaataacaaaaaggacttctgattatttacaaatcttaatcttgcttccccttcattcctcatctatcccagggcatggattaggaagcgtgagttctaaccctggtttgccccttgctaaccgtgtgagcagaggcaaatcatttaacctttctggacttgcatttttctcacctgagtgagggaactagatgatttctaagatcccttctagttctagaaatcaaaaattcatgcaagggccgtccttcaagcctctagagacatacagatttggtgcagtatctatttactggtttttgtttgtttgtttgtttgttttgtttttttggtgcagtgcccagttcagagtcaagaccctctcaatgaagagccaagcaaaagtcctagaggctgctggtggcggaatctttaacctggagctttaggaaagaaataggccttggagcttcccctttgtgcagtttcatgctgccctctgtatctcttctcataacctcaatttatcattttttttttctttttttgagatggagtcttgctctgtcacccaagctggagtgcaatggcatgatctctgctcactgcaacctctgcctcccaggttcaagcaattctcctgcctcagcctcctgagtagctggtattagaggtgcccgccatcatgtccagataatttttttgtatttttagtagagacagggtttcaccatgttatccaggctagtctcaaactcctgaccttaggtgagtgatccgcccaccttggcctcccaaagtgctggtgtgagccaccctgccctgccggcgacccgtcactttattaaacaacaggaactgatttctgtcatgttccaggtgactgttaaggaataagaatactcattttatgggcaaataaactgaatgtgaagtaaagtaggtgcatctcaggttgcctggtgaaagaaggattaagtctggtatagggtttgtcttttaaaattgtggaaaacatgcatatcgtagattgacttttagggaaagatgtgggtcctattgggttaatggcggaatcttttggtaagatcatgcccagccctgaggaccgttgccaatgcctccctcaccacgtgtgccatgtgctcttgaggacatcctgtcattggcttcccacaccatcattacatctggaacaagggacgcataaaaagtgagtggcccagcgtggctcagctggtaagtgaagggcatgggcttggacccaggacttccagctgctgcagcatgtgtcctgctcccctacagcttgaagagggctaaatgagactggaggacttcttagaaaaagagacttgattatcagcgtagtgggagaagagcaaatgcttatgaatactgcacctgtgctttaaaagtcaccatgagctgggcgttgtggcttacgtctgtaatcccagcactttgggaggccgagacaggtggatcacttgaggtcaggagttcgagggcagcttggccaacatgacaaaaaccccatctgtactaaaaaaaagaaaagaaaagaaaagaaaagaaagaaagaaaaaaaattagtcaaatgcgtttgcttgaacccaggaggtggaggtacaccctgggcgacagagagagagaggtaaaaaacaacaacaacaccatgacccagagaaagaaagaaaaaaaatgaagttcccaaatggaaaaagcccctaaaattaccattttaaaacacagccctaatcagctctggggatttgcaggaaactcatcgaagctattgataggaactattgttttggtgccagggttttcaattgggagttagatttaaaaggaccaaagatgacatctgatatttcaaacagaaaccgacatttctcagtggaaaactttccgggccagtgcattttggggttggttactgtgcttggagacgcccctgagttggaggacacacttctggctgatgtgaggggcttctgaggagggccaaaatgtacactctttgtgttcttgcaccacggctattagactgtgagactctgtccttagcaggaaatggtaaaggaatcagcaggaagcctaaaacaagggaagggaaactcctccctcctatcaaaggccaggcaagggcgaggatgagaatggaaagtggggcacgtgcattaagccgtctgggggagcggtagggatagacatgttgaaatggagagtggttgaatcttgaaaggaagtaaggaaaatgtatatgccacaagggcaaggatgtatgataggcttgtatttattgtataactttattttattttattttattatttttagttttttgaaatagagtctctctctgtcacccaggctggagtgcaatggcacgatcttggctcactgcaacctctgcctcccgggttcaagcgattctcctaccccagcctcccgagtagctgggactacaggcactcgccaccacgcccggctaattttttgtatttttagtggagacggggtttcacggtgttagccaggatggtctcgatctcctgaccttgtgatccacccacctcagcctcccaaagtgctgggattacaggtgtggaccacagcacctggcctttattgtataactttaatatggagccttagtcctccagaaatctgcaccatgcccagggaaaatgctgttcctttatttacatgaggcagaggtttgtgttgtttgctgaggtccagcagctcactgtgaggacaacctctccctcgttcctgatttctggcttattcaaggccagaggacccaaaactcgagttgaaaattttgactaggagaacagataaaaatagaaatggaatccatcttaagaaatgctcaatgtgaaggagaggggaatgcaaaatagtttttctgttttaccacagtctttgtaactgaaaatcctatgttcttgagatagagagagagccaatgatccaatgcaagaaactgagtttaagaagaaactgtttgctgggcacggtggctcacgcctgtaatcccagcactttgggaggctgaggcaggcggatggcctgaggttgggagtttgaggccagcctggccaacatggtgacacgtcgtctctactaaaaatacaaaattagtccagcgcagtggtgtacgcctgtaatcccagctactcaggaggctgaggcaggagaattgcttgaaccctggagatggaggttgcagtgagctgagatcgcgccactgctctccagcctgggtgacagagtgagactccatctcaaaaaaaaaaaaaaaaaaaaaaaaaagaagaaagaagaagaagaagaaactgttcatctgaaatccgacaactcattcttgaaggttagagctcagctttgaagtttcacttcacgagcttggctcagtgaggtatgttactccccggtgaaaaagaaaatgaagagaatgttttatgttgaaagtgcttggtgacgaaaaggcagcacctagatcccttatctcataaaaaatgcagcagattcttaatattagcaatctagtgtttagattgttacctgaagaaaggaaaaacaaactgtcccaaatgctgattctactgtttcggtgggaaaaaaaaatgtcttgcaggcaagtggcaaacaacaaaacttttgaaaaagcaggcctggggggagtccagtacagtttcataatgggtatgaatagttattttactgtgttccccccaccccctttctttctgggttttgatgtggatgtctttctatttgttcaggaaattgtgacgtgtgttctgggcagggtttgaggttttggaacattttctaaaagggacagagagcaccctgctacatttcctaatcaagaagttggcgtgcagctgggagagctagactaagttggtcatgatgcagaagctactcaaatgcagtcggcttgtcctggctcttgccctcatcctggttctggaatcctcagttcaaggtaagactcaggagtcttgttccccagccatcttctctgtaagccctgtggtccatgcaagtcattatattcattttaaggcatagaatgtataatattgtgagaaaggaggcaaagaagaaggatttggggtcgctgaaccctttaatatgagttctgttaagtttggtaccaagaaaaattaaactctgtggcgtgtgcagtcttgtaaactcttacaatgattgaaatgtgctattttgggatgaaaatgtgaggtttataaattttaaaagctcaaaaaaggaatctagaaaatgactcctgtgcctgttgcatggaggagatggcacctttgactgttggggggtgtctgcctacccctaagtgtctacatcagccccaagttttagtgcgctgtgacggtgtcattgttattttaacactgggagacgttatattccaattggggtgaatctgactgtgtgtattttcttttcttttttttttttttaaagataaacttggttcttactgaaaactcaattatggttagacatagttcatgtaaaacctctcagattttaaagagaaggccaaataatttggtatttgtgctcttgctcagagaagcatcatattcggaaatatcttcctaggtttatctaccatttagtgttgtttagtcagactgaaacaacttaaaacctgtaatgactaagacaatgaaaatgataggcttgtaagaaaaatacaatttgttattctttggcaaataaggaatcatgtctaaataagacggaggtcatggcttgatagagagatggctgaacctatagtagaaaaacactaggttccgccaaatggtaagggaaatgttgagtcacaatgacacacatgtcctagatttgtttcgtcaaagcgacttttggttgtcatgatcttacttccggtggagatgaaatcttacagatgatcgcagagacattcattttatgttggaaatttataaaatcattttcttctagttatgctaatgctgaaaaaagagcaagtaatgtttctggaacgttattaatttatgtatttttaaaatataaaacattgtcaattgtagggaacaggcttcactgggatcttttagggaatatcttcagcttgatgaaataattcccgaatagccaagtggtctgacaagatcgagagtaatgaggcccatactttagtacagtcttgaatggccagatggtgctgggcataccccaaccagagatatgtaagtctttatgttgtcaaaatttcccagaaacatgaatttcccactaagattcattaaggaaaactagaatgaaaacaaaaacgttccttgtataatattcattagaaagaaatgaagaaggccgggcatggtggctcacgcctgtaatcccagcactttgagaggccaaggtaggcagatcatgaggtcaggagtttgagaccagcctggccaacatagtgaaatcccgtctctaccaaaaatacaaaaaaattagccgggcatggtggcacacacctgtcatcccagctactcaggaggctgaggcaggagaattgcttgaacctgggaggtggaggttgcagtgagctgagattgcaccactgtactacagcctaggtgacagtgcaagactctgtcagaaagaaagaaagagagagagagagaaagaaaggaaagaaagaaagagaaggaaagaaaataattcatcatgaaattgtatagaatactagcatttatgtcatgacctcgtaggtttagctctttgttagaaaaggaaaccatagaaagagacaagggagaaactgacaaactagggtgtttccgaaaaaaggctctcagtatcgggctcaagggcttgtgcccacatctgagcatgcagggaaatagatgtcccccactggctgcacatgtgagtgactgcggcacaaggctgtgatgtgaagagtcatgacaccatttcctcacacctccacgcaatgccagatatgattcgacaacattcttcctgtcttataaaaagtgtttatctagcccgttggtttggcagatgaaatcaactaggcttttggcttgcttttactgagcatattcaaaaccatttcaggtcactatagtggtttgctcgggttgccataacaaagtaccacggactgagtggcttaaataacagaaatgtatttcctcacagttctggagatgggagtccaagatcaaggtgctggcagggtcgatcgcattctgaggcctctctccttggcttatagatggcgccttctcccttgtctgcacatggcctttcctccatgcatccgtgtcttaataccatcttcttagagggtcaccaggcattggatcagggccaccctaatggcctcatcttaactacctatatctgcaatgaccctatttctgaacaatttcacattgtgagattctgtgggttagaactggaacatatgaatttggtggtggtatatttttattataagtcaaacccaagtaaagatgtggggtaagattgtgtttaccaagcacaaagaaatggaaatttggggatgtgtaactctggagagcacagatgactaatctatttaatgtagggctccaggggatttgatgaggcctgtgaatcttccacttttattgcctctcttttccaatgacacccataaagaaaaaaaatggaatatccatgaacaggtgcagccaaggaggccaggcccgccatgtgtccactgtatactgtctcctagctcacaggaatgatactgatccactccttgtgctgctctttgtaaagtgatttcacatccattctctggtaatcatcatcacattccctgtgatgaggaattagcaccaattatagaggagaaaactggatctgacatttctcatctcatttgctctatacattaacctcttgcaaaaaatttgtgagtcttgcccaagacccattacaactaattaacggctgaactggtcgtctgatttcaaggccagaattaactttctactgcagctcatggatcagaggttttctttatttaaacaaacaaacaaaaaatcctttgaccgtagcccttgctataacgtttcccactgagttgagggagaaattgaaagtaaacttaggagctttttatagcttgtcaaaccatgcaagagtgggggaagcttatccatcttgtggaattgatagaccaggaggaagtaactccggcttagataatgctaccattttgaataaatcaaatggtcttcttttccccttcatggtagttgctgcttaagtttctctaacatgcctgcagtaagtttccattaagaataggaaattaggctcggtacagtggctcacgtctgtagtcttagcactttgggagaccgaggagtgtggatcacttgaggtcaggagttcaagaccagcctggccaacatggtgaaacccccatctctactaaaaatacaaaaattagccaggcatagtggcatgcacctgtaatcccagctactcgagaggctgaggcaggagaatcacttgaaccagggagatggaggttgcagtgagccaagatcatgccactgcactccagcctgggcgatagactgagactctgtctcaaaaaaaaaaaaaaaaaaaaaaaaaaaaagaaaaagaaaagaaaagaaaaaaaaaagaaattagtatattgtgattatgttgagggaaaagttagtaccataatataaaaaggtatggactattggagaaagttgtttgctttggtaacatttactcatagaaagtattttggtaaagcaggactcagggtggtgggggaggtgggcagtgagggataggattcaaataaaaaccattctttcccttggaatccactacacaattaaccaacaaatcccataagtggaccttttaggaagataacatttctatccatgagcatagccactataatcacaagacatttatctcaagcaagatagagtcaagatactctcacaacctcaggggctggaactgtaaattttcacatcctgccaacacccttgaatagctatgtcaagaatttagtgtctgtaacttgttctttattttaaagtacatttaacatcatcggccccaaattagataggcttttggagtgggatcccttctacttttgatttctttataaaattttaaaatagctttgttgagatagtgttcacataccatacagttcacccattaaaagtgttcaattcagtgattaggccaggtgtggtggctcatgcctgtaatcccagcattttgggaggccaaggcaagtggatcacttgaggtcaagagtttgagactagcctggccaacatggtgagaacttgtctctactaaaaatacaaaaattaactgggcatggtggtgtgcacctgtaattccagctacttgggaggctgaggcaggagaatcacttgaacctgggaggtggaggttgcagtgagctgagattgcaccactgcactccagcctggatgacggagcaagactctgtctccaaaaaaaaaaaaaaaaaaagtgttcaatgttttttagtatattcacagagtcatgcaaccatcactataattgcttctagaacattttcatcatcccccaaaagaaagccttcgttacgaattttaattagctgagattctgaactctgggggaattttgtattctagaaatattttttactaatatgctacagttgtatttgtcatgctggtgaaaagatgtggtctttcacctggatgctttctcattaagcattatttttctgtttagcttcctgtgtgagcaaacattttctcagcttgatactcagtgcatcagcggcttgcagaagagactgcctaggcctgctctgtccagtacggtagccacaagtcacttgtggctactgaacacttgaaatgtggcaaggccaaattgggacaggctgtgaatgcaaaatatacaagatttggaacccttagtatgaagaaaagaatgcaaaatatcccagtaataacttttacattgatgatatgttaaaggacaatatttgaatatgttaggttaaataaaattaatttcacctgtttctttttacttttaaaaatatggccgctggaacatttaaaactccctatgtggtttgctttgtgtttctattggacaaagttggtctagacagtacaaggtgtgaagacaccgccctctgctggagaagatgctggatttttatttcacctacaggaagagacgtctaagtagcaattagatgctaaactaatgctgcctcaggaaagaatcaaaagagaaagagtgaaaccaggccgggcgcggtggctcacgcctataatctcagcactttgggaggccaaggcgaggggatcacgaggtcaggagatcgagaccttcctggctaaccccgtctctattaaaactacaaaaaattagccgggcatggtggcacgtgcctgtaattccagctagtcgggaggctgaggcaggagaatagcttaaacccaggtggcggagggtgcagtgagctgagatgtgccacagcactccagcctgggcaacagagccagactctatctcaaaataaggaaaaataaaaaagaaaagaaagaaagtccataaattgagactcctagagatactaaatggtagaatgggaatttgaatttaaatttataagatgttcactctcggagatcataggtcattgttgtcctcctccttttcatgacaggaactagcaatgaagagctctgactatgtgctaggtactactctgagaacctaacatttgtatctccttattaactctattactgccccatcctacagatgagaaaattgaggcacaggaagtttaagttggccaagatcacacagccagtaaggggcagacattgaaaggtcattttgcctgccttatccccagcctccaggcagtggcagagttagctcattttggacaaacagctctcccagaccagacattgtaagctatactcaggaatcataggaaagattatgatagaataatatatagttacaaagaaaagaaagaaaatccaatgggagaatatttactgttttctatattaaagtgtttaatgtttatgtttttagaggaatattgtttattatagcaatttagaaaacaaaatgagaaaaaaaatcaccaaagattctacctccagttatttttgtgtatttccttccatttttccccccatgtctgtttatataattgaaactattattcatgcaaagaggtattctgattttctcagttatttttatttatttttaattttgtaaataaacttttttcttctgagacagtctcgctgtgtcacccaggctgaagtgcagccgtgcaatcttggctcactgtgacctcccagtctcaagcaatcttcctgcctcagcctcctaagtagctgggactgcagatgtgtgctaccacatccagctaatttttaaaatcttttttctcttttttggtagaaatgggagtctctctatgttgcccagcctgtattgaactcctgggctcaagtgatcctcccacctcagtctcccaaagtgctgggatttcaggcatgagctaccacacccaacctaatttttatttttattttattaaaaaaaaaagtttttgcctacccgcctctcaccctctcactcatttttaagtataggtttttctacaatgccacattgtcttttccataaaaagtactttcggccgggtgtggtggctcacacctgtaatcccagcactttgggagactgaggcgggtggatcacctgaggtcaggagttcgagaccagcctggccaacatggtgaaaccccatccctactaaaaatacaaaaattagctggatatgattgtgggcacctgtcatcccagctactcgggaggctgaggcaggagaatcgcttgaacctgggaggcagaggttgcagtgagccgagattgtgccactgcatcccagccagggcaacagagcgagacttcatctcaaaaaaaaaaaaaaaaaagtacttttcttcatttggttagtattctcttatgagttgatgccttgtaatttatctgaatgttttccattattttgtggtgagctttaaaactacccttcctgactttcaagaatcctagacatgctccttcttgctaggtaattattagttgcactcattagaataaagtatatgcttggagtggggaggagatgaactttttgaagggcggtgaagtatttctcaccaccaggcctttgtctttgctaaactgaggaaggaagattttatttcattagctaacaaagaacctcctatataggccgggcatggtggctcacgcctgtaatcctcacattttcagaggccaaggtgggtggattgcctgagctcaggagtttgagaccagcttgggcaacatggcaaaaccccatctctactaaaaatactaaaaattagctgggcgtggtggtgagtgcctgtaatcccagttactccagagggtgaggcagaaaaattgcttgaacccgggaggtggaggttgccatgagccgagatcgtgacagtgcactccagcctgggcgacacagcaagactctctctcaataaaataaaataaaataaatacataaataaatctcctatataacctcataatatcagatttggagccttttccatagaaatgaaattcagaagaagctgagactcagatattccaagctgcctggtgctctgtgaatagaggagacttgttcttgtgaaatctgagtgcaaagacacaggacaaattgttatctacttttcattcctaaggatactgtatggccctaaaacacaagaactagaattctgtgataccacgggtactccacagtgtgttccttcccctttctgaacctgatttgactcatctctatgaaaagatgtgggctttggggtcagatgtgggttggaatcctagcgcctgtgtggctgcaattttcttttgtgtaaaattgagataatagtacaaaagtaacaacagttaatattatcaagtgcttactgtgtgcctggcactgtgttaaattctctaagtgtattttctcatttaatttttgtgataggcttatgacactattagtatcttcatattacagtgagggttcagagaagttaaggttccataactagtcagcagacctgggacttcactccaggcagctgattccaaagcctattctaactttaaactgctactttttggagtgttgtaagaaggacaatttatataaaatgttggcacatagtgggtgctgctgttatatgaatgggcacaaaatctgtctacattttgccttttaccaaatttagaatctatttagttaaaaccttcttagggcgggtggagtgcagttgctcattcctgtaatctcagcacactgggaggccaaggcaggaggattgcttgagcccaggtgtttgagaccagcctgggcacatagtgagacccccatctctccaaaaaacaaacaaacaaacaaaaacaaaacaaaactagctgggcgttgtggtgcccctgtattcccagctactcaagaggctggggtgggagaatggcttgagcccaggagttcaaggttgcagtgagctatgatcacagtactgcactccagcttgggcagccgactgagaccctgtctcgaaaaaaaaataaaaataaaaacttcttaggacagagtgattagaagctgtgtagtagatacttagtaacaatgtgggttcctcgggcaggttatcctacgcagagagccaggtaccaatgggtgcgctgcaatccagacagtaattctgcaaactgccttgaagaaaaaggaccaatgttcgaactacttccaggtgaatccaacaagatcccccgtctgaggactgacctttttccgtaagtggacttttctctaattaattaattaattacttatttatttgagacggagtttcacttttcttgcccaggctggagtgcaatggcgcaatcttagctcactgcaacctccgcctcctgggttcaagcgattctcctgcttcagcctctggagcagctgggatttcaggcgcctgccaccatgcccagctaattttttttttttttttttttttgagacggagtctcactctgttgctcaggctggagtgcagtggcgcaatctcggctcactgcaagctccacctcctggattcacgccattctcccgcctcagcctcccgagtagctgggactacaggcacccgccaccacgcccggctaatttttttgtatttttagtagagacggggtttcaccttattagccaggatggtctcgatctcctgacctagtgatccgcccgccttgacctcccaaaatgctgggattacaggcgtgagccactgcgcctggcctaattttttgtattattagtagagacgggctttcatcatcttggccaggctggtctcaaactcctgacctcaggtgatccacccaccttggcctcccaaagtgttgggattacaagcatgagccactgtacccggccttttctctaattttaaagtgtctgtaatttcacaacctcttggcacagatgtgggagtgtttttcttcaagctgtccagagtgttttgcttcgagctcttgctttggtagtttggctcttactctgcagtacatggtaaaagtgtactgtatatactggcatatgacatgtgcgagtatacatgattcacctatgtttttgaaattttttttgtggatggtagagaggagcattgaggacttttcatcaacaggtattgaaaatgattgaacattgttttatttgtgtaaacagaacacactatatataaaaatccaataattaactgaatggataagcaaaatgtggtataagcatacaaaggaatattattgggtcataaaaagaatgaagtactgatacatgctacaacatagataaaccttggaaacattatgcagagcgaaggaaggccagacaccaaaagccacatattgtatgattccatttagatgaaatgtccagaataggcaaatccctagaggcagaaagtagattagtgggttacaggggctggggaaagggaggaataaggagtgactgctaatgggtatgagggttttttttggaggaggtgattaaaatgttcttctgccaggtgtggtggctcatgcctgtaatcccagcactttgggaggccgaggcgggaggattgtttgagcccaggagtttgaggccagcctgggcaacatagtgagaccctatctctatttcaaatacattttttatattaaaaaaatgttcttcaagtagttggtaattatttttaaaaatggccaggtgcagaggctcatgcctgtaatcccagcaccttgggaggctgaggtgggaggatcccttgagcccaggaggtttgggaccagcctgggccatacagcaagaccctgtctctacaaaaaatacaaaaattagctaggcatagtgatgtgcacctgtggtcccagctactcgggaggctgaggtaggagaatctcttgagcctatgttgagcctgcagtgaaccctatttatgccattgcactccagcctaggcaacagagtaagactctgtctcaaaaaaagaaaaaaaaaattagggaaaggaagaataattagccaagacttgtaaaacaaaaatcaaatctcttcttttgatcacataaaacttgctttaaacttgcaaaaaagacctgatataaattcataagtaacaaaaaattgaattatattagaaaccattaattcaatgaatactaaagctatgtaggatgtagcaaaatatacatattaagaaaaggattatcataaaagttttaatctccaggctcaaacctagaaaatcactctcctcaaagccagggttaatcatcatgctccaaaccaggtacatttcacatcactttgggatcctggcaactttctcttttgttttttttttttttttgagacagggtctcctctgtcacccaggatggagtgcagtggtgtgatcatagctcactgcagcctcgaactcctcaagtgatcttcctgcctcagcctcccaagtagcgggaccacaggcacacagcaccatgcccatctaattaaaaaaatttttttttgtagagacaggggtctctgtacatttcccaggctggtcatgtactcctaagctcaagcagtcctcccacctcagcctcccaaagtgccggaattacagtcatgagccaccattcccagcgctggtgactttctccatcactggtgactttctccatcactggtattcactgcattagtgatgacatcattacaatcttcaatatgcaactttgtagtcctactcttgcattcttactttaaagcctcagcattaagtttgaatgtaatattacagcatccttcattactttaaatcattggtttcaatagtaattcatttaaatctaaaatgttaggctgcagtggctcatgcctgtaatccccccagtttgggagactgaggtgggagaatcacttgaggccaagaatttgagaccagcctgggcaacacggcaagaccccatctctaaaaattagtggcccggcgctgtgcctcacgcctgtaatcccaacactttgggaggccgaggcggatagcttgaggtcaggagttcaagatcagcctggccaacatggcggaaacccatttctactaaaaatacaaaaattagctgggcatggtggcacgcctgtaatcccagctattgagaggccgaggcaggcagactgggaggccaaggcaggcagattgctttgagacctgcctgggtaacatggagaaatcctgtctctacagaaaaatacaaaaattagccaagcatggagaaacctcgtctctatagaaagacacaaaaactagccatgcatgcctgtggtccagctactcgaaaggctgaggtgggaggattgcttgatcctgagaggtcaaggctgaagtgagccatggtgtggcactgcactccagccagggtgacagactaaaaccttgtctcaaaataaataaacacatttaaaataaataaatacaattaaaactaaaattaaaaaataaaataaaatgttaagagaatagctcaaattctccaaaagaactcttgcacaccattcctcctcttctcaaatctctattttccttccccaaagccagtaactgcttctcaccctgaccctgtgctttctttcccgtcattgcgaaagaatggtccttgcttctgtgctgatcccaaacccttttgccctcagatcctcctgtccttccctggccctgctctgtattggctgtggggtgggggtggcggtggaactgacccctggggtctgcatttctcaggctcccagggctgtggctgactttggccaatgggaggcaaggacgggagactgagagcttgggaggaagggagagaggtatgtttcttctccttactccctgcctggggtggcaccttgggcaggactctgttttgcccatggcctcagctcccaccagatgcctctagtccctgggctcaggaaatagacaacctccttccactatcgctgtagcccaaggagggaagtattttttttctttctttctttctttttttttttttttttacagagtctcactcttgttgcccaggctggagtgcagtggtgcgatctcagctcactgccacctctgcctcccgggttcaagtgattctcctgcctcagcctccagggtgtgccactatgcccagctaatttttgtatttttggtagagacggggttttgccatgttgaccaggctggtcttgaacttctgaccccaaatgatctgcctgcctcgtcctcccaaagtgctgggattacaggcatgagccactgtgcctggccgaaggaaatattttcttgctattgctaatctctgggttacctcgctatcccccatttagcttcacttctcctccatcacctgtatgaggaattccctctgtgttaaatatctggagaagtttcctgattggaccctggctgttgcagcttccaaggccacctctctttgtggctggtatccttttcccatgcatcttctccaggacttccattctgcagttatctctctgaactcagtgtcttcttcccatcagtataggggtggactttagtatctcctatgtttaggcaacatctctcctttgactctgcgtcttctccagtggttgcccttctctgctcctcttcacaataacacctcctgaaagggccacccatgcctgccccctcctttcctcaccccctctgtggctggacttctgttcctacactccaccctggttgacaaagtcactgattacttctctattttcagcttacttgatccttaattgccttcaaaaacagctaactgggccatgcatgtaatcccagcacttcgggaggccaaggcaggaggatcacttgagcccaggagttcaggaccagcctgcctgggcaacatagtgagaccctatctacaaaaaatagaaaaattagccgggcgttgtgactcatgcttgtggtcccagctacaaaggaagctgaggtgggaggatggcttgagtccgggagggtgaggctgcagtgagccatgatcacgccactgcactccagcctgcacaacagaaggaggccctttctgtaaaaaaaaaaatggttgaccactccttccttgaaatgcttttttcttgaggcttccatgccctgccttatcctgtttcttcctacttctctggttgtgctttttcctctgctcagtatttaacatgttggtgtgaccctggctctggcctgggcccccttctctatctacatgctttctctcgacgacctccatcggttgcatgggtttaactaccaaatctgtgattctagctccgacaccccaggctaaagtagccacctggtcactccctattacattggtcaatttcatttctctgtgccacctatgattttcctgatttatttattcacttttcattgtctgtcttccccactaaaataaaaacttcttgagaaggggcttcatcgatctgcctctgttctatcccaggccctcaaaacaaggaccagatattcaacaaatatttattgaatgcgtacatgaattaaaactctaattggttgtatgctggtggtttattattttcatggaggaaatgacttgtaggctgtgacactcagcttttgtctctgatgctttgttgccctgttctgtcaccgagggctgtcgtcattgctctggccattttgtgctctttgaatttctaatcatcacactcaacccagaaggcagccttacctttcagcactcttcagctgaatgagtgcaagttggaggcagggtcattttttgataggaaattgaatgtttatatgctggtaaatataaagcttagctttttacaaagaatttctcaaaagtgagctttgttgaagccctgtaaattgttagaacttttatggaaattttaatttaggaaaaaatgtcatctgtttgggctgacttagttgttagttgtttgtcctttcttttttttggtggagggtatggagttttgctcttgtaacccaggctggagtgcagtggcgcgatctcggctcactgcaacctccgcctcctgggttcaagcgattctctcacctcagccttccgagtagctgggattacaggcatgcaccaccacacttggctaatttttgtattttaagtagagaccgggtttcactatgttggtcaggctggtttcgaactcctgacctcaagtgatcacccaccttggcctcccaaagtgcttggattacagacatgagccaccacacccggccaagaggacttcttttaaaaatgatttcttgggccgggtgcagtggctcacacctgtaatcccagcactttgggaggctgaggtgggtggttcacaaggtcaggagtttgagatcagcctggccaatatggtgaaactccatctctactaaaaatacaaaaattagccaggcatggtggcgcacccctgttgtcccagctactcgggaggctgaggcaggagaatcacttgaacctgggaggtggaggttgcagtgagccgagatggcaccactgcactccagcctgggcaacagagcaagactctgcctccaaaaataaaaattaaaatgatttcttaagtaaatttcaaatatagaatgtatatgctagtgataacaaaattaacactgtttatgcaagtctgcaataggtagatgtgaagttgataggtgcaataagtataggcaaacacataggaacatttgacctgtttttttgttgattttaaaacattgaataattgggaagcttttaaatctcttaatttgagcaactagatggctgtatttatctccttatattaaaaaaactattataattatctttcccacatatcaaactccactggtttttttcccatttttctttcatacttcagaaagacgagaatccaggacttgaatcgtatcttcccactttctgaggactactctggatcaggcttcggctccggctccggctctggatcaggatctgggagtggcttcctaacggaaatggaacaggattaccaactagtagacgaaagtgatgctttccatgacaaccttaggtctcttgacaggaatctgccctcagacagccaggacttgggtcaacatggattagaagaggattttatgttataaaagaggattttcccaccttgacaccaggcaatgtagttagcatattttatgtaccatggttatatgattaatcttgggacaaagaattttatagaaatttttaaacatctgaaaaagaagcttaagttttatcatccttttttttctcatgaattcttaaaggattatgctttaatgctgttatctatcttattgttcttgaaaatacctgcattttttggtatcatgttcaaccaacatcattatgaaattaattagattcccatggccataaaatggctttaaagaatatatatatatttttaaagtagcttgagaagcaaattggcaggtaatatttcatacctaaattaagactctgacttggattgtgaattataatgatatgccccttttcttataaaaacaaaaaaaaaaataatgaaacacagtgaatttgtagagtgggggtatttgacatattttacagggtggagtgtactatatactattacctttgaatgtgtttgcagagctagtggatgtgtttgtctacaagtatgattgctgttacataacaccccaaattaactcccaaattaaaacacagttgtgctgtcaatacctcatactgctttacctttttttcctggatatctgtgtattttcaaatgttactatatattaaagcagaaatataaccaaaggttaagctgtctcggatctgttgttctaaacccaggaaacagttatttttggccagacgtttctccagaagtcttatcaacaaaacaactttaaacgtattctacagtaaacacaagttttgtaaccagaatcaaatcatactaactagcaaatgaagaaagcaatgatgccttagcaagagggttatatatctcaaagcacttcctcacctgaaagatagttccatctctgttccccttagttctgaaaagcccccttacatcaccatcctggattctgttctgtactgtccagatcccagctccagaactgagtacttactcaaattaatctcctcaggagagagccaccttgcccaaggtcatgctgctttgcagggcagcctgcatccagtgactggctgatgtgggcatatcaaggcctgaactcagaatagtcatacagattcaaaactccccacaggatcagctccagttttgctgggactactttgtagctcagtttcttctttactcaattttacttccttccattccgctcataggtttctatcctgagagtgctcccttagaaattttctgctagtttccatctcagaatttgcttctaggagaacacaacttgtgacaggttgtgccaggagggataagaaatggatgctaagatgggattttggagctagattgcctgctgtctggctggcaatgaggactccatccttggccatagatgagcacaggcacaagatagcagtgcaattgttaaaactttcactggtgatgaaccaagatggtataccagtggaagggagtgcactagggtgtgatgtactaggcatctgagaaatgttggcaagtagtaataataaagacaatggtattggttggctattgctggacttaattaatgcttttgaaaaagacaatgaaaggctaaggacaattaattaaaagctaaatgtgaaaaccattgggcctccttggcagcatattaagaaactctcttctgtaatagaaggaattaaaaagctgaggaccaggcccaggacttatgagaatagcagatggctgggtgtggtggctcacgcctgcaatcccaacgctttggggggctgaggcaggtggatcacctgaggtcaggagtttgagatcagcctggccaacatggcgaaacactgtctctactaaaaatacaaaaattagccaggtgtggtgacaggcatctataatcccagctactccggaggctgaagcaggagaattgcttgaacctaggaggttcaaacctgggaggttgcagtgagctgagatcatgtcactgcaatccagcctgggtgacagagggagactctatctcaaaaaaaaaaaaaaaaaaatagcagagttccaagaatattaaattgtcagcttagcccagtctgttatgcaagctcagagtccttactggggaaaaataggaccctgagagatggaaacatctgggctgatacattcaagttttaaatcctcagattcctttgaacctctgaatctacagaagagtcccatgctttaaggaccgatgctggccaggtgtggtggctcatgcttgtaatcccagtactttgggaggctgaggcgggcagatcacttgaggtcaggagttcaagaccagcctggccaacacagtgaaaccctgtctctactaaaaatacaaaaattagctggttgtggtggcgagcacctgtaatcctactcggcaggctgaggtatgagaatcacttgaacctgggaggtggagtttgcaatgagccgagatcacgccactgcactccagcctgggtgacagagcgagactctgtctcaaaaaaaaaaaaaaaaaaaaaaaaaaaaaaaacagcaatcaaaaaacaaaaaaactagtgctttcctgttgaagacaatcaagaggcctctacccttaaagacaacactcactctccttcaagatctgtccccacctcccttcctagacagcagataaatatcaaagttaagtcagtataaaccaacaggggagttttgggcttgctcaggaggaaaggtaaaatactctgaaagttctgtagaacttagctaacgtggaccttaaaagctaagagggtgtctgtaagacttaactctggaagtccttgatccagggacggagatagaacacaaacttggataagggagtgtttagcaatgtgagtgtaccctcctgggatacaggttttaatgccctggcaagaaccctgggagaaggtgttgagactctgctaaaatgactcttagacacttggagaaagtgacagcccacacttaagtgaagtggaaatactagaattgtcatgccaggcagtggaaaaaggggtcaataggattaaggaaatgcacatgatagaatgaatggactatataagccttgcaaacccaccagatgactgtcttgcaggaaggccaaagcaataaagaatagcctggtgagagcaatcagcacctctgagccatctgcagtggctctcctctgaaaggcagggctgatgttgttacataactgggcttattaatagcagtgggaataaagggtaccaaaataatagagaccaggtggtagtgctcaaccatcagaagccaagaggtgcagttaccttttttttttttttttggaaatggagtctcactctgttgcccaggctggagtgcaatggcgagatctcagctcactgcaacctccgcctcctgggttcaagcaattctcctgcctcagcctcctgagtagctgggactacaggcacacgctgccacacctggctaatttttttttttttttttgtattttagtagagatcaccgtgttgcccaggctggtctcgaactcccgagctcaggcaatttgcctgccttggactcccaaagtgctaggattacaggcatgagccaccgcgtccagccaagaagccaagaggtgcagttatcttaatgagcagcaaggtcagagatgtatccaggggagcctcatgggcactgagataggagatggcatctctagaggcaatgtagttgcacagccagcaaaagtattgctcaatctattgtattaagcagggtttgccagagagacagaaccactaggacatatacttagatatatgagaggaggtttattagggcaattggctcatgtgatggtggaggccatctgcaagctggagaaccaaggaagctggtagcatagctcagtccaagtccaaaggccttggaccagggatccagggatatggcagatcttccgcacctggtctaccaactcacactctaatctcctgacgaaataacttcacagatacacccagaaataatgctttacctcctatctaggtatcccttaatccagtgaagttgacatctaaaattaaccaccacattattcaaccagaaagatcaagatggtcaggaggcatagggcaattgcctcaataaaaaaacactatggtggctgggcgtggtggctcatgcctatagtcccagcactttgggaggccaagatgggcggatcacgagatcaggagttggagaccagcctgaccaacatggtgaaaccccatgtttactaaaaatacaaaaattagccgggtatggtggtacgcgccgggtgtggtggctcacacctgtaatctcagcactttgggagactgaggcaggtggattacaaggtcaggagttcaagaccagcctggccaagatggtgaaaccccgtctctactaaaaatacacaaattagctgggcgtggcggcagggtcctgtaatcccagctactcaggacgctgaggcaagagaatcgcttgaacccgggggacggaggttgcagtgagccgagatcgagccactgcactccagcctgggcgacagagtgagactctgtctcaaaaaaacaaaaacaaaaacaaaacaaaacaaaaaacaaagaacgcaggaatgctggtccccaatgcacctccatttaattcaccagtctgggcctcacaaaaagcaaatggagagtgctagtggactattacaaattcaaccgagtacagagggtccccaacttacaatgatttgacttaatgattctttgactttatgatagtgtgaaagtgacacacattcagtagaaactaaatttcaatttttgaattttgacattttcccaggttagtgatatgtgatgtgatgctctctggcggtgttgggcagcactagcgagcatggtttttcgctttcagtattcaatacattacatgagacattaaaactctttattacaaaataggctttctattagattattttccccaactgtaagctaatgtaagtgttctgagcatacttaaagtaggctaggctaaataaactatgatgtttgatacgttaggtgtatttaatgtgtttttgacttaagatatttttggctgggtgtggtggctcacgcctgtaatctcagcactttgggaggccgaggtaggcggatcacctgaggtcaggagttcgagaccagcctggccaatatgaaaccttgtctctactaaaaatagaaaaactagctgggtgcggtggtgcacacctgtaatcccagctactccggaggctgagataggagaattgcttgaacctgggaggcggaggttgcagtgagcgaagactgcgccactgcactctagcctgggagacagagtgagactcagactcaaaaataaataaataaataaataaataaatattttcaatttatgatgggtttattgggatgtaaccccactgtaagttgaggtgcatctgtagtagctctattgaagcagcatccccaggtggaacacttttgctagagcagagttacatagctttagatacctaatagtcatttatttgacaaatgctttcttttatatccctatcaaaaaaagaggataaggctgggcacagtggctcatgcctataatcccagcactttaggaggctgaggtgggagaatcacttgaacccaggagttcgagaccagcctgggaaatatagcgagacctcatctctccattttttaaaagaggatcagaggccaggcgcagtggctcatgcctgtaatcctagcattgggaggccaaggtggatggatggcttgagctcaagagttcaagaccaacctgggcaacatggtgaaactctgtctctacaaaaaatacaaaaattagccagttgtagtggcatgcgcctgtagtcccagctactcaggcagatgaggtggaaggttggcttgagcctgggaggtagaggttgcagtgacctgagattgcgccactgcactccagcctgggcaacagagccagaccctgtcaaaaaaaaaaagaaaagaaaagaaaaaagaggatcagaaagagtttacgtactcttggaacagacggcagtatatttacagtctattcccaggactattttaactctcccactctttgtcatagtaccatctaaagagacctgaactggctggacatctcacagaaaatcacagtggtcactgaccagacccccatgtcattgccactgatgcaccagcatttcttcctgggctcacatctatgactgtatgagggcttcctaatgaccaactgccaggataggaataaactccagcttggttcacacatggattggtctggtatatgggagcaagccaaaagtggatgtcagctacactacaatgccattcaggagtggacttgaaaagcagctttgaggggaaatcctcccagtgagcaggagcactgggtggtgctcctggccatccactctgtgtagagagagaagtagcctgaggttggaagatactcatttgcatggactgtggtgactgttttgcccagttgataaggggtctaaaacagaaagattggaagattgggcacgaagcagctcagggtaaaggcatgtggatggaccaatgagagaagacaaagtgtgaagatgtacgtatcaaatgtgaatgcccaccagaaaacatccatcacagaagaggcactaaacaaccaggtagacaaaatgacttggacagatgtcagtcagcctctgtcatgggccaccctaaaactggcacaatgagcttaggaaggagtggccacagtggcagtgatggaggccacacatgggctcccgctgaccaagattgatccagctactgatgttgccaaatgtccagtatgctagcaacagagctcattgctgagccactgatatggcactatccctgaaggagactttggtggctagttgactacattaggtcccttccatcatggaagggccagagatttgtttgaacagtgatagagatgtatttcaggtatgtgtttgcctttcctgctcaggggatgtctaacactaaaatctaaggacttacagagtatgtttgatttatcaacagggttttgcatataacatcacatcacagcataacagcaggagatgcagcagtgggcacacgaccatgggctccactggttttatcacccaccacatcacctcagtgccctcaacatgacagaatgttggaagggcctgttgagggcacagctgaggcaatgcttggctatgatacactgaggttggcgtcacaaccttcgggatgcagtttacatgctagatcagtaacctttatatggtgctgtgtccttaataggtagaatacatgggtccaggaaccaaggagtggaagtacaaaaggactcaacatcgaaactacgtggggtgtttagctggacacaatggctcaggtctgcaatcccagttacttgggaggctggggtgggaggattgcttgaggccaggagttcaagagcagcctggacaacataaaagaccctgtccccttatctaacaaataaaacaaaacaccacttgtggaatttattcttcctattaccgcaaccctgagttttgcatatttagatgttatgattccctgtgggaaatgtttccaccgggggacatggtaagtgtcgtattgaactttaagctatggcatcttaagctctttttggcaagggatgaatggtcaagaagtcaccatcttggcgggggctatgaacctgattatcaagaggcagggctgctgctacacagtggggacagggaggcctacgcttgacacccaagtgatccactgaggcttctctgagtatttcgaagaagtactaatggtttaatggtaaatggataaatacagcagccaggcctgagaagaacctgccaactaggggctcagatcctcatggctgaaggtctgggtcaatcctccaactatgctatctagactagcagaggtgttagccaagggtgagagaaatctagaattgatagtagaggaggcatttaatgagtatccattgtagtcttgataccagctgcagtggcagtggctgcaattcattccactgacctttctccaggaaaagagccctgcagtatcctgaaagagctgttcccagaatttatatgaagcaaaaagatctaagtggcacaaggggtaaactgttacgaatgctgtgctgtgttaccgagattccccctttgggactggaagatctattccctcggccacaggaaaggttggctgacggctgcaagttcttagatgcagagagccagttcatccaaggtcatgctcccttctcatggacagctcacagtcaaagactcatctatgtgggggtatagagtctcagagctcatgctccacttggaacaactcagaagaaacaccccaacttcagaactctctatttggtcagctgatgccttgtgattatactgcagctcaatttattcctctctaatcctgtttccttctcgttctgcacaggtgtttatcctaaggcaactccatcattaacttcctccatgctattcatcctctcagagtttgcttctcatagaacacaactcataggaatatgtttatagcattttacttttggtgacagttgtaaattataccctgatctttctgttaataaatctgagattatttaacaggaacttagttagttttatgcccaatggggtattactgtcaagaggcctatttttggcttccacatgatacagcagagaaaacaaggcacgttttagaaaatacacctgttgctttgtatcactagttaagtgctaggttttacacctttaaaggagaggtaggtagtctaggttttaaaacatgacattcttttttttttttgagacagagtctcgctctgtcgcccaggctggagtgcagtggcgccatctcggctcagtgcaagctccgcctcccgggttcacgccactctcctgcctcagcctcccgagtagctgggactacaggcgcccgccaccacatccggctaatttttttgtacttttagtacagacggggtttcaccgtgttagccaggatggtctcgatctcctgacctagtgatccacccgccttggcctcccaaagtgctgggattacaggcttgagccactgcgcccggccaatgacattcttgttaaaaaagatcttaaacttgccacaaagaaactgtagaatatttctgttttgtagaaagagtttgagttttagcattgcaaagtcctggcttaaataccagttttactctttattagctgtgtaagtttagacaactagcctaatttagctaagcttgtctagggagagcagtatagtaaggggttaattgtgtggactccagagccagatcatctggattgaaagttctgttggccggccgcagtggctcatgcctgtaatcccagcactttgggaggccgaggaggggcggatcacgaggtcaggagatcgaaaccaacctggccaacatagtgaaaccccatctctactaaaaatacaaaaattagccgggtgtggtggcacgtgcctgtaatcccagttacttgggaggctgaggcaggagaatcgcttgaaccagggagttggaggttgcagtgaaccgagatcatgccactgcactccagcatggtgacagagcgagactccgtcacacatacaaaaaaaagttctgtcacttaccaactagataagcttagatgagttacctaacctctctatacctcagtttcctcctttttaaggtgaggataatgatagtacctactttgtaggtttgttaaaaagattaaacaaattaatacatgtaaagtgctagagacaatgccattgagcaactgatcaataaacatgagctattatcactacttgtactataggttaacaatacttgcccaaggggttgtggtgaagattaaatgaggcaatgtatacaatatagttagctcagtgtttggcaaatagtaagcccctaaaaaattgtaatcatgaaaatgtgtgttgattgacagatagagcccaaaacgtaaaagagtaagaatttaaaaacctacacaacttaaaaaaatttaagagtaagaattttaaaaactacacaaaactacacatgctatttcataagattatctatgtgctaggtgatgggaatacagagggaaacaagtacacatcagatggcatttgtccttgagcttagtctaacagggtttgaatgagagtgaatgtaacatgttagtcttgcctggcactaaggaaggtattatgtgagtgcaatagtaattgcggtttttgcattgttggaatttgctgtttgatattggaatgcattcttaaataaatatggttatgttatacatcattttaatgggcacttcttgttttatgtttttgtgctagtgacttattacttgctgtttattttatgtttattttagactacggaaataatgttaagacaaaagcaaattcaagctattttcttattcgagttcaaaacaggtcttaaagcagcagagacaactcgcaacatcaacaacccatttggcgcaggaattgctaacaaacgtacagtgcagtggtggtcaaa

SEQ ID NO: 1123 - DNA, 720 bp, Homo sapiens
tacatttcctaatcaagaagttggcgtgcagctgggagagctagactaagttggtcatgatgcagaagctactcaaatgcagtcggcttgtcctggctcttgccctcatcctggttctggaatcctcagttcaaggttatcctacgcagagagccaggtaccaatgggtgcgctgcaatccagacagtaattctgcaaactgccttgaagaaaaaggaccaatgttcgaactacttccaggtgaatccaacaagatcccccgtctgaggactgacctttttccaaagacgagaatccaggacttgaatcgtatcttcccactttctgaggactactctggatcaggcttcggctccggctccggctctggatcaggatctgggagtggcttcctaacggaaatggaacaggattaccaactagtagacgaaagtgatgctttccatgacaaccttaggtctcttgacaggaatctgccctcagacagccaggacttgggtcaacatggattagaagaggattttatgttataaaagaggattttcccaccttgacaccaggcaatgtagttagcatattttatgtaccatggttatatgattaatcttgggacaaagaattttatagaaatttttaaacatctgattatgctttaatgctgttatctatcttattgttcttgaaaatacctgcattttttggtatcatgttcaaccaaca

SEQ ID NO: 1124 - protein, 156 aa, Homo sapiens
MMQKLLKCSRLVLALILVLESSVQGYPTQRARYQWVRCNPDSNSANCLEEKGPMFELLPGESNKIPRLRTDLFPKTRIQDLNRIFPLSEDYSGSGFGSGSGSGSGSGSGFLTEMEQDYQLVDESDAFHDNLRSLDRNLPSDSQDLGQHGLEEDFML

SEQ ID NO: 1125 - DNA, 1224 bp, Homo sapiens
tacatttcctaatcaagaagttggcgtgcagctgggagagctagactaagttggtcatgatgcagaagctactcaaatgcagtcggcttgtcctggctcttgccctcatcctggttctggaatcctcagttcaaggttatcctacgcagagagccaggtaccaatgggtgcgctgcaatccagacagtaattctgcaaactgccttgaagaaaaaggaccaatgttcgaactacttccaggtgaatccaacaagatcccccgtctgaggactgacctttttccaaagacgagaatccaggacttgaatcgtatcttcccactttctgaggactactctggatcaggcttcggctccggctccggctctggatcaggatctgggagtggcttcctaacggaaatggaacaggattaccaactagtagacgaaagtgatgctttccatgacaaccttaggtctcttgacaggaatctgccctcagacagccaggacttgggtcaacatggattagaagaggattttatgttataaaagaggattttcccaccttgacaccaggcaatgtagttagcatattttatgtaccatggttatatgattaatcttgggacaaagaattttatagaaatttttaaacatctgaaaaagaagcttaagttttatcatccttttttttctcatgaattcttaaaggattatgctttaatgctgttatctatcttattgttcttgaaaatacctgcattttttggtatcatgttcaaccaacatcattatgaaattaattagattcccatggccataaaatggctttaaagaatatatatatatttttaaagtagcttgagaagcaaattggcaggtaatatttcatacctaaattaagactctgacttggattgtgaattataatgatatgccccttttcttataaaaacaaaaaaaaaaataatgaaacacagtgaatttgtagagtgggggtatttgacatattttacagggtggagtgtactatatactattacctttgaatgtgtttgcagagctagtggatgtgtttgtctacaagtatgattgctgttacataacaccccaaattaactcccaaattaaaacacagttgtgctgtcaatacctcatactgctttacctttttttcctggatatctgtgtattttcaaatgttactatatattaaagcagaaatataaccaaaggttaa

SEQ ID NO: 1126 - protein, 156 aa, Homo sapiens; identical to SEQ ID NO: 1124

SEQ ID NO: 1127 - DNA, 78025 bp, Mus musculus
  misc_feature (1)...(78025): n = A,T,C or G
ggacgtgcaggcgcactaaaggcttatgggggactgcctgtagtaacatttttcatccatgaagcagggagaataagctcacatgactcatatagctgtgaggattaactggagaagcacagactaaaatcctgcaaaggagaacacttcaaacaagctagcagtaccaggcatgaaagtgagtaagaagaggaaggccatgtgttgctgctagccagagcgcaacagatcaggcactttttaatgttggtgaattgctgtaggggagagatattagcacactccgagaagcagataattaccaagattttactctgtaagtcactgctcaaatacctttgtgtgtgttcttttatttagtagccctgtgcagagttggccatgcagctcagtgagtgtcctgggttcaatcctgaaaaaaaaaaaaaaaaaaaaatccaaaccaaaacagcagttttccctatgtcacagattaaaaaactaagacattcaaaggagattatagtccccaaaattaaacaataattaatgcaggatttagccagtcgtgtggtactnnnnnnnnnnnnnnnnnnnnatagagaaaccctgtctctaaaaaccaaaaaaggaaaaaaggaaaaaagaaatcaggatttaaagtttatctctacaaagagtttagactttaagtatttgatgttgaatgttagcaaaaaggttacaagtatatgtgtgtgtctgtgtgtgtgtgtgtgtgtgtgtgtgtgtgtgtgtgtgtgtgtgtgtatgtggagggtgcttttttcttcaatgtgtcccctgaagatctagtttggccactggacagcctaggtaaacgttgcctcctcctatagtctaggtcagtgtgtccctgacataggttagtaatggtcacataaaattcccacctctgctacccagatcagcaaatgggaaacagacctaaggtttgctaccattttgttaaatatgggacatggtagctagttttatgtcaacttgacataaaccagggtcatttggggaaggggcctcttatttgagaaagtattttcataggatcggcctctaggaaagtttgtagagcacctttctgattaataattgatgtgatggcttaccttgtactttcccgctaaggcatagcctaagaaactcactcgggagcagctgagccaagaaaactcagctttgatttgttagttgtctccttagggtttccattgcggtgaagagacaccatgaccaagacaatgcttataaaggcaagcacttaattggggctggcttatactttcagagggtcaggctatcagcatcatagtagaaagcatggcagcctgcaggcagacacagtgctggagaaggagctgagagttctatgtctggatcagaagacgactaggaaagactgtcttccaggcagctagaaagaggggctcaaagcccacccccacagtggcatacttcctccaacaaggccacacctatttcaacagggacacacctcctcataaggttgccccttgtgggtcaaaacgaacctatggggcccaaacaactacattagtcaatactgatttgtacactgttttgttttgttttttgagacagggtttctctgtgtagccctgtctgtcctggaactcactctgtagaccaggctgggctcaaatgcagaaatccaactgcctctgcctcccaagtgttaagattaaaggtgtgcaccaccactgcctggctgatttgtacattttataagtgtaaaaatgttaatttatttgtccagtagagatataactaagctgcaccccatcaatgaagatggtttctgttctgtaaaagatacagcaccaggggttgtggtgatttttcctaaggacattaatcagtttatcaactaattaaattaaattgtatatcaattgttaagaatagttttaatatcatctttttattataattcccttttatattagaagtaatgctgtgtgttgtgtgcactcagtgggagcacacaaatgtcacggtgcacatgaggaggtccgagacagacccctttccaggtatcatgtctcctctgtcatcttgtttgaggggagctttcttttgtgcctgcagctgcttgtactccaggccaggctggccacacaggcttcccaggagttctctttgcctagtctgtctggaggagcagagcttacagatgtccacactgcatctggcttttgacttgagttccagagatgcaacatgggtcatcaggcttatgcaatgagagcttttacctggtgagccatttccctggtccgttatgccctcatatccttacgccttatatccacaccctgtctaatccttataccttttatccacaccttgctatcccacactctcttatatcctcacaccttatatctatgccttggaagtgtcttcggtaaccaatcaaaataaaagtttagccctgtgcttcctctgtgcttgtatgagaagtattaacagttctattttttaaagctttcttttaggcatgcgtttgctctgtgtctctgtctgtgcaggtgtatacagaggccagaagtgggcatcaaatcccttggagctctgccgcagactatcccctttttaggtctcctatctgcgtggaacgggtctctggttgcaggtggacaaggagtcggcgggaattgacagacagacttaatgcaagggagtgtggatctgaatgtaatttgtcaaatcgaacatcaaactttttatacagaaggaaatagggaagttgggtgacacaccggcaaggtacaaagaggttactggacttacacaaaacagaggaacgcaaacatggaaggacttgcaggaaccaactggatttaaaattcaatgataacaactgggatcaaaacagctccacctaaggtccacttaatcttagaagccaggggcaagtgcttcgtgcccttgccatagttcctactctagtctattgtatagtccaccttctccctagaccattgtaaatacttgtatatggatgtaactcagctatctattgttctaagtgtctactctggttcccccttaggtcacaaacttccttcttcctagataatggtaaatttctgtgtagggcaatgatttagctatccatgcccaaggtcggatcaaggactgcctagaatctaacttagctatatgtcaaaatatcaatccttaggagcacttgtaataaagcaatattaagggaaagcacacagatccgtttaccaactaaagcaaggacattgaagcattcgttatacaggatgtcacgattccaggagactaagtttccgtgaacttttcgcctcgggacagcgcccaggcttttcagcccgtcaggctggtcactactggagtggatgtagcagagctggagacaggcatttgtaagccacccagtgtgggtgctgggacccaggctctgatagagtagtgagccctctctctctctagccccggcctttcactgtttgaaaatgagttgctattttaaaggaataaaatttgtctcaaatattttacatctttaaaatgtatgtactcctttatctaaaaattccatattaaggaaattaatgatgtgctccaagaacaccaagtgctattctgtgtgtggtaatgaaattctagctgaagtgtcctccttgatccctgattactatctacatgtattcacaatggttgcctcagagcaagggaacacttcagaagcatccctatttgtttttagctatattttcttgtgacacttttgagaaaactgtaaaagatcaccagtgaggcaaaggagcttgtcaccaaacccaatgacctgagttcagtccccagaaactacttgattaatggaataactgaaactgactcctgcaattgtcctctgaactctgcatgtgtaaacctggaactcactctgtagaccaggctggcctcaaannnnnnnnnnnnnnnnnnnnnnnnnnnnnnnnnnnnnnnnnnnnnnnnnnnnnnnnnnnnnnnnnnnnnnnnnnnnnnnnnnnnnnnnnnnnnnnnnnnnnnnnnnnnnnnnnnnnnnnnnnnnnnnnnnnnnnnnnnnnnnnnnnnnnnnnnnnnnnnnnnnnnnnnnnnnnnnnnnnnnnnnnnnnnnnnnnnnnnnnnnnnnnnnnnnnnnnnnnnnnnnnnnnnnnnnnnnnnnnnnnnnnnnnnnnnnnnnnnnnnnnnnnnnnnnnnnnnnnnnnnnnnnnnnnnnnnnnnnnnnnnnnnnnnnnnnnnnnnnnnnnnnnnnnnnnnnnnnnnnnnnnnnnnnnnnnnnnnnnnnnnnnnnnnnnnnnnnnnnnnnnnnnnnnnnnnnnnnnnnnnnnnnnnnnnnnnnnnnnnnnnnnnnnnnnnnnnnnnnnnnnnnnnnnnnnnnnnnnnnnnnnnnnnnnnnnnnnnnnnnnnnnnnnnnnnnnnnnnnnnnnnnnnnnnnnnnnnnnnnnnnnnnnnnnnnnnnnnnnnnnnnnnnnnnnnnnnnnnnnnnnnnnnnnnnnnnnnnnnnnnnnnnnnnnnnnnnnnnnnnnnnnnnnnnnnnnnnnnnnnnnnnnnnnnnnnnnnnnnnnnnnnnnnnnnnnnnnnnnnnnnnnnnnnntctgctccaattcctgctgctatttccggggcctcaatgtcctcaacatgaactctccaacaccttagtttttcagttccttactctcccacttttccagtgaccttttacttcctctccagtcctgtgactcacgccagtgacatttagatgtcatcttcattcagatctgttcatctccagagcttctgtactttctgctttgattccatggagaaaaaaaatcccttcttttcattaaaaaaagtaacattttgttgagaaaaatagttgttcagaaaatatatctttctttttttttttaaatggccaatgaggtggctcagtagatagaggggcttgcagcaaagcacaacaaagacagacacagcaacccaagggctacaattcggcttgcttgaaaaccattcagcatttgctaggactggtttattatctgttgtacctcctaagttcctaccttgttctacttttatcatttgccttttcccactgaatgctctgccttcccaagttagtaagtcaaaactatatcctcattattatgcccaaaaaataacttgcagagtggtgatattcttcacctgacttaggatgcttcaaccctagtacgattggcatttccagctggatggttctttgctgaggctggcaatgctgtttaccatagagcagctcttctcaacctttgggccacaacccctttgggggtgtcgagcaatccttacacagggctcatctaagactgaccgttgggatacacaggtatttacattgcaattaatgacagcaacaaaatgacagttatgaagtagcaacaaaataattttatggttggggtcaccccaacacgaggaactgcattaaagggtcaaaacatcaggaaggttgaagcactgctagagagtctttagcagcaacccctccatgcccacggcctcagggttagatgccaggaacacttaccccaaatcataagcatcaaaaatggctccaggtactgtgaaggaaataatgcccctgagagtcgctgatgctgcttgtgttaaacggttaggtattattcactgtttcctgactcgaaaacaacactgatttggaaactctaaggttcacagtaaatccgacacattttaaaattccctttagagtagaagtggctcactggagactttgttgtcttttctctgggcagccccctcccccacacctacccaccnnnnnnnnnnnnnnnnnnnnnnnnnnnnnnnnnnnnnnnnnnnnnnnnnnnnnnnnnnnnnnnnnnnnnnnnnnctgtttactgaaagaacatacacaccctgtctccaggtcctatccatttgctggcaattgccaatctttttaaaatcctgcccactgattggcagaacaaagcattacctttccctttaaatatgtaactctttgctagcctcattggtaacattcactctgtttactggctgtttgcattgctgctttaggacttgcctattaaagtctagttgcccactcttgattttgtaagagctgttagttctgtcttctggtatgtcaacgagcctttgttgctatgagaaaacatctgagaaaaacaacttataggtagaaagatttatttgggttcaaaggttcaaaggtttcagttcatagactctgtggtgaggccgatcaccatgggaacagaacagaacaaagccactcacctctttagaggcaggaggtggagagtgagcagaaaggctagaaacaagatacatcctcgaaagtcatttgcccagtgacctacttcctcctcctctaccaggttatcatcatttccaaatagtgccacaaattattcacaaacaatgggtcggtccattactgaggtcagtcatcatgatcccagcagcgttccaaagccccatctctaaatactgctacacacagaagccttcaacacaggagcctctgcggacattcataagcaaaccgtatcgccttacttgtcttttttttttcttgtaaactttataccagatttactcatacagaatccatatgccaagttgtcaaccattagacttccggtactttaatcgtttcatcataagaaaagttgccttgattggtcttcatgtgggtcccctaacaattggagcaggggtgggggagctgtctatcgctctgttgcctgctactggatccccttcccctaactggactacctggttaggcctcagtgggaaaggatgtgctaagtcctgctactactggatgtctcagagaagggtggtactgaaggtgtgggggaaagggggggcttcccctcctcagaaaagaagagaagagaaggggagggaagggaaggggaggggaggggnnnnnnnnnnnnnnnnnnnnnnnnnnnnnnnnnnnnnnnnnnnnnnnnnnnnnnnnnnnnnnnnnnnnnnnnnnnnnnnnnnnnnnnnnnnnnnnnnnnnnnnnnnnnnnnnnnnnnnnnnnnnnnnnnnnnnnnnnnnnnnnnnnnngggaggggaggggaagggaagggaagggaagagaataggttaagggatttgtaagggtgggactgtgaagagaggagggagggggctacaattgggatgtaaagtgaatagatagatagatagatagatagatagatagatagatagatagatagatagatagatagatagatagatgggggggggagaaaagttgcctctgaaaccataaatctgagttttcccctctatccagcttgtttattattctgcatccttctctctcttcctctcttcctctcttctctcttcctctctcttcttctctcttcctctctccctctctcttcctctctcttcctctttcttcctctcttcctctattcctctcttcctctcttcctctcttcctctcctcctctcttcctcttttcctcttttcctccccagcagtgcatctcacacccgaatgtaggacggatctctggaactctattaaggcttgcaatgggatgagagaaccagaatttttgcatgctccaggtgacatcactgtccttagatcacacttaaggtcactagtgctaaaccttcaggaccccagccctctgattccctactcagtccttcttgccacatgtcaacctccagggcagcaagtgcaactttttctcaccccttcgttttctcggaataccgaatacagtgggcaatccatctcagcactgacaaagccaccatctcccagtctccagccacagagccactcactacactagtggccctcaaccttctcaatgctgtgaccccttgatacagttcctcacattgtggtgactcccacccataaaactatttcgttgctacctcctaactgtaattttgctaccattgtgaaatgtaatctgataggagacccctgcgaaagggttgttcatggccaacaggttaagatgtgctgctgtgctccaggaagtgacaccccttccgtttacttctgcagcagtctgtgatctctagtgagacaattcttcatttcgctcatctccttcctgtcccacataataactgcataaactccgtggctgccccccaagccacacccctctcctttcctttcagctctttcaacccatgatcagtgaaaggagaagctctcccaagcccatggtggcagtacatttagcacagcaacagctatgtccgaaaatgtaagcgctgtgttaaggtttcccaatcgtcagaaaattctccttaaagacgtattcattaagctgggtgtatttaataaacacgtcatggctctaacgatgtgcctaccaaccttattcaaggcgttagattgactgccattttacatagttcttagtacgcctagcacagtgaattcacatagtcctggggtcagaggaaggacttactgcctgaaatcacaggagaccttgaagatccctcagacctcataaccttacaccatctgtatttgtaagagagggcaggcagtccttcaccccaggttctccactgtgtccctccccacttaaacctctaaaacagtggctctcaaccttcctaatgctgcaaccctttaatacatttccctattttgtgctgaccccccgcctaaccataaaaccatttcgttgtgacttcattgtaattttgttactcttatgaaacgcaaagtaaatatctgttattcaggaaatccctgtgaaagtccctatgtcctcagggggtctccacccacaggctgagaacctctgctttaaaacattaattcttttattagtcgtatgtaaggggcgggcgggggggggggcgcggtgcagcaaggatcacgttgtgcctgttgccgtcagagaacaactcagtggagtcggtctctccttctacctttagatggcttctgagactgcaattccgggagccagattcgcagcccaagaatcttaatcctctcagtgatctctcctaccctcaaggacccttttaagaaaaaccctctccttctgtacactgggaagaaaattccatcccctcaatttgggatggtccctgccgtcactatttaaaaagaatctgttcaagatgtgttataacaaatcggtagttttccgagtttgtttgccccagacccttgcaggagccggtgtttctttaacagtgtatgtaaatccatgggacagagagactgtgcgtgtggtgccctttagaacatgatggccccttgtcacgaacccacttctcaccagtcacgatctgtgttctctttaatgcaaacacaggtcaccccctccacccagaaagcagaattttaggcagaagcaccggaactggcctgaggaccacggagcagcgacgacagcagctctgcttttgtcctgcgagttggtcacaaactcaactctgattcagtcaaatgctatctactagacacttttgttggacatggtcctgtaccgcacactcggcacacgtaaggctcacacacatgttctctcttgaaagctccctggctttctcagttgcagcacagggctgaaagcctggcccagcttggactccaggtggcccgcccaccgcccaccgtgggcaccatctgcgcagcgttcccgggaccgcggtggcggagggcaggccccacgtccaacacgggctccgacaggtcatgccccaccgcccaccaggctcgctcgctgtcctcaataccctgcagggcacgttgtcctgggagctagggcggagatcccgccccacggggcgggagcggcgcggagcgggcgtgttggtgggcgtgtcgcccggggcccgcccctctgtccggactataactcccccgagcgcccggcgctcgccggcgggcggagacgcgcgcctggtactggtgaggtttgcggaagggtgctgctgcggggactcgggcgggctgcggggctccggtgggaacaccttcacctggctcctcggaggagggagcgtagagctcaggtgcccccgagggcggagaggactcggggctggcgatgcccgcgcttctccgtggcggacccagctgctcacttctcctccatctctaggacatggaccgcgcgcgcctgtggctggggcttctgctgcccgtggtggccgccctggatttccgatatcaccaccaggaagggatggaggcgttcctaaagagcgtggctcagaactacagttcgatcacgcacttgcacagcatcgggaaatctgtgagaggtaggtggcttcctgcgcacatccctaaccctcaacccgcgttcaaaagtaagttgaacgacagcgtctggtcccctgttggtgaggctctccaaacgcgctccacgcaggtaaagcacaccttgcccagtcaggggtttcctgcttttgtttgttgttgtttgttggttgattttttgtttttatttttgttttgttttttcaattttgttacatcaggagagcggtaagaggaactgtatatatatattgtcgtttctctacagagagtcattgtcgcttagtcctctgttttattgccgttggggatcgggaagtaattatctgagaggtgtatcttcgttccttttcagggtaaacatcttcctcagtttccctttttgttggcttccttgcatactgattgtgactgttaactacggattcctcaggtcattttaaaactagacagtgccatacttttgtcgagttctacacatatgtgattaacccgatagcttaaagttatgagaaaatgtaggtctatgtctaaaggctgtttttgaaggatacacctgcttggtagtaagtcacaacgaatgatctccttagcatttgcaaatgtatcacttagtctgctttacttttgaaactatatattcttagtggagagagtagatggggatccaagaagttaagaattttggtcgagttacctagatggcgattctatccatccatccatctagctagctagctcctggagataaaactcaagacctcatttgtgttccgcattgtatcgttaacctaacctgctagccatagagggtgaagttttagccaggacctgcacctgatcattttgggtggggcaaataaatttagcagctagcatcatctcctaatcttttgttactacgctgattctcacaaaagtggttaccagaaaacttaatgcctggaatgaaagagccctgaagttcatgcagtttggctcagctgtggaagttgtgttcaaaagttctgacctgcagtttagcactgatctcttgactcgactggaagtctcataaccacattactaagcaaccagtcacttctcataactgttaatgtcatggttcagttcttgtattacagagaaatattaaaaatgcaataaaaacagctttgactgtgtaatagaagctttattttgaagcagcattgccagagttggtgtcagaaatcatctaagggctggagagatggctcagcggttaagagcactgattgctcttctgaaggtcctgagttcaaatcccagcaaccacatggtggctcataaccatctgtaatgggatccaacgccctcttctggtgtgtctgaagagagcaatggtgtactcatatacatttaatgaataaatcttaaaaaaaaaaggaaataatctgaaatcctctgatcaccacaaaccccaagtatggaggttagttatatggaaagttatatcttgaatcagcatctagattgagtctcttaaaataatttatccaagggctagagtagagcaaatttaaaggatctaagaagccaggcagtggtggtgcctgcctttaatcccaacacttgggatttctgagttcgaggccagcctgatctacagagtgagttccaggacagccagggctatacagagaaaccctgtctcgaaagaaacaaacagaaaaagaaggtctaagaatactaattaatataaaagaaatgtacatcgcaactaacttgctgttattgttcaatcattttgtaactaccaaggtgatgggatgctgttagtccaagtaccacaggactcgtgtgcttttgtgttttcaaacacaaggttcttaggacagatgtatgagactgtccgcctgcgagccgcctgctcacctgaactcaaacctcgggaagagtgaatggaagccagtagacttacttgatctttatctttaaccttgtatgcgcttcagtggttaaaggatgaagggactgtggtgtaagaaataaagctggcaccagcagccagatacttgtgctgtgtatgcatctctaagtaattacttggattaggggggaaaaaaatcccaaatctaccgttaggttccagggtaggtcaaactgtacacctatgattgacacccggttgccaaggtgtccctgaattttagtgtgatcactgaggtgtggtgattcttgatggcgctctttcccggacatttgccctccggtgtgaggtatgtgtacttagcacatggggtttaccctggttgtctttatttactttttaccgctattaatatgggcagcctcacccggacgaggaaataatggctaattgggcaagcgcaccagtgcaccttgggttttgtgagtctctgtcatgtttccattactgcagttatgaattttacttccttccccactgcacactactttaatatttatttttaggaaatatgatttcagacagctgatgaattctcttggttttagactctgattatgtgtgttttgttagtcattccccatgttgggacgttggaatactttctgattctgttataaatgatgatataaatccatcgatacatatcttacatacatgcattagtgtacatgcatgctttgtctacagaatccaaagagggcatcatatctccctggaactgaggttccaacaatagcagcttccgcgtgggtgctgggaacttgatgtgggtcctctagagaagcagccagtgctcttaaccagtgagctgtctttccagccctgaacttttacttaaaaaaaaaattgaaacctacacatttgagcacaaatttacttttaacctagatttagacatagtagatgagccatatttgactctaggttttgaaggcatccttaaaacttgttgacatggtgtagaaaaatcttaggtgaaaaacgagaaaagcagtaccaagtggaccagggcacaatattcactgtcagtggtgtgtgtgtatgtgtgtgtgtgtgtgtgtgtgtgtgtgtgtgtgtgtgtgtgtgtatgtgtgtgtgtgtatgtatgtgtgtgtatgtgtgtgtgtatgtatgtgtgtgtgtgtatgtgtgtatgtatgtgtgtgtatgtgtgtgtgtatgtatgtgtgtgtgtatgtgtgtgtatgtgtgtgtacgtgtatgcgtgtatatgtgtgtgtgtgtatgtgtgtgtgtatgtgtatatgtgtgtgtatgtgtgtgtatgtgtgtgtgtgtgttcatgaattgcataatttgttgagcaaacagacatatctcatctgtcccttgctatcaggtatcctccttcagatacaaatgtatttattactaatttctcaggcttggccatctgcatctcactaaaccagtttaggactattgcttggtgggttgttttttttttttctttttgtaggagggtgttttgttttggtttggttttggtttcctgaaatagggttttggctctggagtttgttgttttgttttgtttattttccattcgtttttttttttaatgagttatttctttattatacataagtatactgtaactgtcttcagacagtttttcttgctccggccctgcttgctcactgtagctgtcttcagacaccccagaagagggcatcagatctcattacaggtggttgtgagccatcatgtggttgctgggatttgaattcacatccttcgcccttcggaagagcagttggcactcttaaccgctgagccatctttacagccccttgcttgttttgtttgttattttgagacagggtctcactgtctgtcctgggtagcccttgctgtcctggaacagaactcactgtgtcaggctggccttgaactcacagagattctcctgcctctgcctcccaagttctggaattaaaagcatgtgccaccaccaccacacccattttaaaacagggtttttgattgtttgttttgttttgagacagtgtttctctgtagccttgggtgggctagaactcactctgtagaccagactgactttaaactcacagcgatctgcctgcctctgcctcttgtgtgctagctaggattaaagatgtgtaccaccactaccacccagtaaaacagggttttaaaagtaactcaggttggccttgaacttactatagagtatacaggcttgcctaatctcgtggtcctacctcagctgtcacagtgatggagttgtgagtgtagttacaaagctgaggatctagaagtcaaacttgggcaccgtggttccgaagcctgtgctcagacattgctgtcttagctgtgaggatgttcaccacagcactgcacataacagaaaagatttacaaataaactcaataccctctgaccattgccagctgtggcaaaatgcttctctaaagagaagggagggatgtgtttggaagagtagcaaacttgagtttgaatcatgtgtacacacgcgcatgtgtgagtgcatacagaggccagaggtgaacagagtgtcttcctctattgctttccaccttatgtttgagacagagtctttcactgaagttggagctcgccattatttggcaagactacctggcaatgagcccagggaccctcctgtctctgcctacacagacggggttacatttgcaaggcaccgcacacagccttttaaagataatttaaaattgggcccgtgagatggcttgaccagtaactgtgcttactgccaagcctgacccgacagtttgattcctgggactcatgtggtggaaggaaagaaaccacctctataagttgtcttttgatttccacttatgtactgtggcatgcgtggattgtacacaagttttaaaagtaataaaaaaatttgatctattattggcttataatttctcaaaaaatgtatattaaggggagaaactctaaaatactgcttatgatatcatcacagtagcttttcgttgttttgttttgagacagtgtttcgttgtggttgaagcataaggaagaatttatttctcttgtttgtttctccaggaacttaacttccacaggtcggctggagcctgcgtgccttctcaggtgtccagaaatctccccagaattggcttagattcttgctcccacagggcagagagtgagctcacaacactctctcacactctcctgcccttgactgtacaggtttaagctagtggtttctcctggagtgttgggagggaggtgtgagccatgtatgaaagatttgagcgcaactgatgtttttcttcacattctgctcattttccaaacatgcttccaaaaaccaatttgcttgagctcctgtacaaagtgatggaaatatcgacagatccaggaccgaatctcagaacaaaccctgaaaccttggaatttggactctcactgtccatgtgtgtgatttaaaatcagctaaactgagtaggcatttccctttaagaaatctaacaaaaccttgttctgaaactatttgtggaccttgaaaatatgcatttttcaaatgtaagaaaatgtgttatacatcctttggctttttagtataatattttaagtgggaattgggacagaggctacccaaagagtaaagtagcatcttatcttgcttcatttatagccaggatctttttggttttttgagacagggtttctctgtgtagccctggctgtcctggaactcactctgtagaccaggtgactgaccagcacacagtctggggactgccatctttgagtgtgagaccttgagctaaagaggattctcactgaggacagcatcaccccttggaggttgtttggggaaaatgaagggaagatttggatctcagctcaggactgtgggaggcgagtgaactgactggcctcgaactcagaaatccgcctgcctctgcctcccgagtgctgggattaaaggcgcaaatactctagacagaaatacttctgagactttaaaaagtaattatgagagccaacattaaataactttcatgtctacctgccagagtgtgtgtgtgtgtgtgtgtgtgtgtgtgtgtgtgtgtgtgtgtgtgtgtgagacagacagacagacagacagacagagacagaaggagacaggaaaaggcctaatcattctaacaacagcatacaacacttggcatgcaatctccacgttgatttatgtataaagaaatggagctgggaaaatggctttgttgcccttccagaggatcagaccccagttcccagtacctataaggtggttcacaatggcctgtaactccaactctagagggtatgatgccctcttctggcttctgagggtacctacacaacacaacacacacactctctctctctctctctctctctctctctctctctaaatccttttcaaataagaattgggattaaataagttttccatttttgtaacagaggcttgactacaaacaatcaaaccctaccttgggccaaggtctgatgcggcagcctttttgctagtaaggttttcccagctctcctcttctggtcttggccctaccctgctcttccacttgtcccctttacccctgaatcctgtggtttgaagggttgacaagggtataaaacatccttcatgtgtggcatgagccccagtagaattctttggtccctttctggtgtccatggcttcatccacgtaccttgaatcccctcttttggtacagctggctcactctccttgctcactctccttgctcactctccttgctcactctccttgctcactctccttgctcactctccttgctcactctccttgctcactctccttgctcactctccttgctcactctccttgctcactctccttgctcactctccttgctcactctccttgctcactctccttgttcactctccttgctcactctccttgctcactctccttgctcactctccttgctcactctccttgctcactctccttgttcactctccttgctcactctccttgctcactctccttgctcactctccttgctcactctccttgctcactctccttgttcactctccttgctcactctccttgctcactctccttgttcactctccttgctcactctccttgttcactctccttgctcactctccttgctcactctccttgctcactctccttgctcactctccttgttcactctccttgctcactctctttgctcactctccttgctcactctccttgttcactctccttgctcactctccttgctcactctccttgctcactctccttgctcagatgctcacgttcttggattatgaagcaaagggaagagggtgactgtgaccagcacacagtctggggactgccatcttgagcgtgagaccttgagctaaagaggattctcactgaggacagcaccaccccctggaggatgtttggggaaaatgaagggaagatttggatctcagctcaggactgtgggaggcgggtgaagcatggaacagtcacacatggggaaagattgatccattcagttgttaactacttccatagatgagaggcctatcaagtgtctaaacccgaaacaaggtttgatgtacaaaacctcccctcacagttttaacccatactgaacttttcaggaactcggctgtagataaactgacagcaacttacattgttttttgctcttggcttaatcgagagagattttcacatcctcccagtccgtgactgactttctcttcgcctttggcagagtcatctcgagagctttttataatttggcatcatattttatatagtctttatttctccttttagtgcagtttgaatgttagattggttctcttgaaactatgcacaaaaatgtgttatgaaaacatatgtgttatacaccagcatagaaaagaagacgttcaaattacagaactcagcaaaggtgggggtggggggaggacagagccaagggaagaactctgggatgcagagggctgcgagctctctttcctggagacaagcttcgtttcctctagctggcaccagcgtcagccttacctctcccccaacccccttaaccatcattaggttctttacagaaattccaattccttggggttctttgtttcaacagtctgatagccaaagggaggggcccaggtgtcttagaacaccattgctcctgcaggacagtttcagtaatataatttgtggggaactgagtaccatagtcacatcttagctcagaaggccctgaaggaagccaaaggactcttagcatcttttggactgtaaacaatgtaattgaattattcaccagttggtattcagaacaatactagggtggttttgttccctcttttgcccctaattctcccacacacactgaccagaagggcgttaggagaggatgactattttaaaagtccttttcagtgggagacactgacttttgtgagaatgtgggcattgtcgcgtgggatgtacagatacatgtgtgttgtgtggctgtgtcgcagagctttcctgtattccaaaggaagattcatttccaccttgctgataacactgaagacagagtcagatttcacaaagggcttgttcagttgagggcaattcctttctttttcctctcgctcctttggagtcaagtgtaataatgataatttacaggtctgcacagttgcctccaacttgtgagaaacagaaaggaaattaggaaatgcctcattcactccagtcgcatagcaaatcttacttgtaaaggttttcaggcagtggtgagatgtcctagcacaacacagcatttgcagagacttccaggtctcttatgtagaaagtcccgtggccaattgattcttttttttttttgaatttatttattttatgcatatgagtacagcaccattgctctcttcagacacaccagaagaggacacctgaccccattacagatggttgtgagccaccatgtggttgctgggaattgaactcagaacctctggaagagcagtcggtgctcttaattgctgagccatccctccaacccctggccaattgattcttgatggaaagcaagggccagtcctctctgtgcaggcccataataaattaagaatggttggatagagtctgcctggctatctcacacttgctaacagggggaagccaacaaaaaggaacataagggttgctcataaaggttgctcgtcagggctaggaagctctctgtttgtaaagtgattgctgtgaaagtcggaggacttcgtagaacgcaccaaagccaggagtgctcctgtgatctcagcacacccatagtgagatttttttttttccacaacagggtttttctgtatagccctggctgtcctggaactcactctgtagaccaggctggccttgaactcagaaattcgcctgcctctgcctcccgagtgctgggattaaaggtgtgcgccaccacgccgggctttggagatttgttcttgaaacagaaccagtggcatgtgctaccagaaggactggaaatgtgaggaagagagaaaaatgaaagatgaccctggagcaaatgctttaaccctgaggctacgtgctttggcagctcagagcattcatgttatctattaagacagagaaaactagtagagaccagttctggggtgatttcaggagctcagacacaaaggccgggcatggtgacacacgcctttactcccagcagcacttgggaggcagagccaggagcatctctgtgaattcaaagcaggctccatccacatagtgagttccaggccagcctgggctacatggtgagtccctacctcaagcccaaacaaaacaagcctctgatttaaacagcttacttaatcttcaagtcctcagcagatcttcagctgggcttcggagggggtttatgtaaatggcactcaggagaagtttggctgtgaaaatgaactcggtgatcatctactgccgatatcagcagccctgagaagagcgaaactaccctacaagagactgaggaccgagaaaaggctagaacagagctgaaggctagcccaacgcttatagtctggtagagccaggagccagcaaaggaggggaaatgaaatcaggatggagaccgtggggggcggggaggggggaagggaacggaccctaagagtcgtgccacaggacggtggaggcacccaaggtcacgtgactgccaccaccagggatttttaaacaggacgcaggaggtacccagggtcacgggacttccaccggggattttctggaaggactgtgttaagtcaaactaagctcctccccgaggctgagcgtgcagcaagggcccggcgcagaagcagcaggctcaggctatggtggcaagagagtgagcacaggttctgcccccctcagggacttgttcccaaccagctgtaaaccacagagacacgtgaacaatccctccattcagggaagcccaacgaagaagccgcggagttcacagttcagtttgactgtccgcaggagtgtagtaccagctatgcactccatcattgtaaaccacgctcttatcctgacccactgccttggggtgggttcaggacacagaaagaatgaaactagcacacagttcaggactgcagtgttccttttggttcagggtcattgacaggactgcaggtgttcccaaagataagcaagaaccaagaaaggcagacttgacggtgacaaccatttcctctcaaggtcatggttaatattaaatgttgctgggagtcaaaactgagagccataaacttaagtcatataacccaaactgtagttactaaaattccatttttctgtttacagactgggttgcttttagcagttcagtacctaaaattcagagcctagaaatatagaggtaaagacattagacacaacccctgccctgaaaggattggaagaacaggagaaaagcaagacaactagtaaacagatatgattagttctgtgggggcagcagagggtaacgggaaagaaaaggatggtcagccaggagcaacaggaaaggcagggcagaccgtgggcctggggctgaaggagccatcaacctggaggaacaaaagaagctcgctgtggccaaggggagaccggaaggcgtgtggactgagggtcttaaccgtgctgtgtcagccatccttggttcatccaaaggagacacgaccatctgggctttatgcctgaggggaaggtgaccggtgcatttcttcgatcggaaaaacaaatttttagcaattttataatgtaaaaggttattttctagaattaattttatctccccactctatgtgtgctagtcttagtgtggaggtcggggtcagcttttcaggattgcttctttccaccgtgtggatcaaactcaatttgtttgttgaccctttataagaataatatatatgctggacagtggtggcgcacgcctttagtcccagcacttcaggggcagaggcaaacagatttctgagttcgaggacagcctggtctacagagtgagttccaggacagccagggccacacagacaaaccctgtctcaacccctccccaccaaaaaagaatgtgtgtgtgtctatgtgtgtgtggtgtgtgtgtgtgtgtgtgtgtgtgtgtgtgtgtgtgtgtgtgtgtattcattttctaccagattagatcttagttaccaacaggtttggttcattagccaaaatgcattttggcaattcacttatgaacccgtttaatccatagttgttcattgggcccctgctatcttgcagaacctttccaggcggatataaagaacaaaacccgagcttcctttcagaactacagccgagggcgctgaattcctgctgcagtggtaggaaagccttgttgctggactgtgatcccagctctggcccctggggtgctcggtaaaggtcagaaaagcttctcaggcaagcggattcccagagccccagcccctgggcagacctgccgggggagaggatagcagaaccccagcccctaggcagacctgcaggggtagaggaatcccacgtgacgcaggaggaatcccacgtgacggagactggaaacctcgcttgcttacatagctggttggtgccagtgccgagactgaggtctgaccagcaatacaagaggcagttcccaccttgagtgccagagacgaggctgcccttctgtgaactgtccaggaggaggatttagcccagggcatcttagcgtccacagaatcttaatccgctttgactagaaaatacagttagggatgtttttgtcattgtgccctttattttttgaaaaacaaaatgtccaaagaacggcggttaggtacggaaaagacttgactcctcgctaaaattggaggaattcgtggtccccagggaactgcttccgtcggacattccattctttgcccttgggaaatgacgtccgtaggaataaaatggatatgtgatggttagtaatgagactggcctgctttgctaaatgctgagtgtgtacgagaacttaaatcctcactcttgcgaatgagatactgccatgcccattttccagacgagaaactgaggctaagggaaagtgagttagggtaaagataggagtcatgtcgggatttagagccccagatccagttttcaaataggtctttaggacctggaggcttccattgaggtgagctgggctcccttcctaggtgaggagacaggagcccgtagggaccctctcccagagccagattagctcatcttaatctgtctaccttgggtttccacctgagaccttactgagatattggctccactcctgcgctgagtatcttgaaaaaatactacattgacttggcatctttgccatcaggagcaaactggtcctgtactatcctatcaacaagttactgagtgggaacactctggagggtgcccaagtgatatgagtccctgtgcttcgagacgtagcattctagctgagacaagtacctgtgacacttttttttttctttttttttttttttatttttcgagacagggtttctctgtgtagctcttggctgtcactgtcctggaactcactttgtagaccaggctggcctcgaactcagaaatccgcctgcctctgcctcccgagtgttgggattaaaggcgttcgccaccatgcccggtgtacctgtgacacttaacaaggtccggagcccccagacttggtcaaaacaagagggttgaaaatactgaatgtagccttatacctagccaaataacatgacttgagagatcacctgggatcgttaggccaaagatcctgtgctcacccacttaaccccctctctctagctgcctgcgctcaggggcctcttctctcaactgagcttctggtgtagacaagtcacggggagggacaaggtggaatagggaagggagtgagagccaccaggaaccagtggcatccagatactaggaattctggtcccctggggcaaggctggtgctcaagtcaaaagccatctgatagacaggacagaggctacaacaccttcccaatttgggagtcgatactagtgcagtgctggcgtgtaggagcccctctgcatcctggaaagggggtttccgttcacacaagtagctacgttctcatcactgtggggggtggcgttagctggagggagaaagctttgccctgtgtactgaaggtggggacaagagcaggttaagagaaaaatgtaagataacctcttgctgaccaaagactgaggcttagaggggtcaaggacaccacaaggacttggcccacagaatcaactaacaacgttgctcacagagatcaggtatcctgcatgtgtctgaccttggtcctctgttacgtgttatggtagtacagcttggtgttcttgtggggctcctaacaataaccactgtgaagcccgccccttcccctgatgttggtcggcagataaccaatctcattattctaaactgctctgtaattactcagctctgtgatttctatcatgatctatttaactatgccacagtgctgagcattcaggttgtttacagctcttagatatttcagatggatgctgtgatggggacctttggacaagcacgggtgctctttaatgtcccaggtgggcatctctaaatcagaaccccgcgcatgcattgtacactcacatggtagattcttgatgtaaagacatgcgcttgtgctctgagcaccacgtgagatgtacatttgtcccacatcctaactaacacttgaacctttccccattttaggaataaaaatccctccacttctaaatgccgtttttatgactgaaattgagagtgggtgagttttctcattatccagcaacaggacatgcgcagttactacccttgaggccccaaccttcagtctgttgcctgtgtccattttcttgtgatttccctcatttgtgtactaacctgtaggctttcttccgccctctgtaacaaatgcagcagatattttcatctattctgtggcttgtctagtggattttgttttgtactattttttgccctgtgtaggctttctgatttgccgaagttcccgttcagcaggctttttctgtaagctattacattccgtgtatcggtttttaaaaagtcaccttcacccccaggtcataaacatagtccggtgttttttatagcttcgttttactgcctaagtccatcaggaatctcttagcgtggcgtgtcagcagatttcacatcccatagcatatgcttatatgaatgctcacactctcaagtatctgtgactttcatacgcagaaagaaccatgaggagtttgaaaagaaatgcaaggaatggtgtttaggagagagaaaggataaggcatgctgtctgggaggagaagagggggaagggtggggtatgaggctgtggtctaagcagtagattgaggttgtaatggctccaggctttcagtccatcacctggacaaaggtgaacttgagttaataccctattcgaaaaaatatcccagcctgggttaactctgtctgcttccattcgttctgcctggaaaaggcaagacctgtgagagtctttaaacgtgttagctgatattttctttagattctagaaagatcgtgtcctgtagcagaagcatgagtaacaagcagacaggagctgggtgggtgatgctctaaaggtggctgagtccgactctcatttgcccaagccacccttcctttcttcctctgacattggacgctgtgaccctcagtgtctgtgacactgagtttggaggccccggccaagctatacaaccaacacatttgctcagcgctgcgtgtaccaggccctgcgctaagagcctttggaacgttagctctgtcaacctctttttcttaacatgcaagttaaatttattttcttaaaatggacgcttgtatacattaagtaggcaaaaaaatgtaaattttcggatcttggcgtgctacactaattctgcctctcaagccagacgtggtggcgcacgcctttaatcccagcacttgggaggcagaggcaggcggatttctgagttcgaggccagcctggtctacagagtgagttccaggacagccagggctatacaaagaaaccctgtctcaaaccccctccccccaaaaaaaatctgcctctcaaaggtagattagaaatttcgtttctccgggatataatttgaattttcagtttttaaaatttattcctagagaatttcaaacatgaaatacgatcattcccattcgcctcaagtacctccagcataccctcctcccccaccgacttaataaaatcaattaacccacacagctgctgctgactgaaactaccacccagctgcttgccccgactagacacagggccttgtaagcagagaaccctctaagaaagactgaacccacgttacagaatatctgttcatgtatcatttcactcatgatttgaaaggtaattgcacaacagtgcagaagccctacataaaaatgcctgcaagcagatttcttggactcctcttcatgccaacccatgagagatgttttaagacctccccatctttcaaacacaagccaggtctgacaattctctcggattgtgtctctgttagagggaagcacgcgtgtacagctatcacattagtcttcatccacttgcctccctcacattccacgtaagtgcaaaagctttggttgggctgcttcccagtcttccctctgggcctcttcgtggctcttcatgcccacttagatgcatgttggatggatggtggcttgaataataccttatctctgtttttttagagctggtctctttctgcatgatgcttgggtgtgtctccatgtatctcagttagggtttgactgctgtgaacagacaccatgaccaaggcaaatcttataaggacaacatttacttggggctggcttacaggttcagaggttcagtccagtatcatcaaggcgagaacatggcagcatccaggcaggcatagtgcaagaggagctgagagttctacatcttcacctgaaggctgctaggagaatactgacttccaggcagctagaatgagggtcttaaagcccacacccacagtgacacacctactccaacaaggccacacctcctaatagtgctattccctgggccgagcatatacaaaccatcacaccaggcattgctctattaggaatgcagttggggaccactgctagcctggagagccacgagaaaaccttaacccatcctcctgcctgcccctgcccaagaatctgccccatccttgcaggccaccatttggttgaatggtttggtaaggcgacgaagacagcctgattgtgacccaggtccacagatctcttctacttcactgaggccaagagtcactgtgaagggataaaggctggtcaccaaggactgcaagggacagtacaaagttgtgactgaaccaggcatggtggcacagacctgtgattgcaggaggcagagtcagaaaaatcatgagttcaagaccagcctggtctacaccatgagtctgtggctgcatagtgagactttgtaccacaataataaaagttctgattatgccaatgagtttgacataaaccaggactcccttagcccatgattaaagaatctaacatggttaagagtgtgtctggaatcgcttctcagccttttggctaagatcaagtgaagagtgtgtctgaaatggctccttatgatttgggggactcactaccacagtttctttatcatcccagaggcctgacttagaccattgacttagtcaatagtgggccatacgtctggctcgtggcccattctttcttgagcatagcctgccagtgagcagtgtgccgcaggaccaagccgccttctgtccttcgggtgtgaattgttaattaaatgagtacaagctcagatggaaataagatatgcttgagtgggcgggagcgttcagctggctgacagccaccgcctgcctgcatctccctcctgagatggcgtttctcaacacattgtaaggcagaagccgatctgagatacaactaatcacacgatgaagctaccgagatgggcgtggcagattttctgaccttaaaacctctgtgggggtggcccatgccaccttgggtcttcctgccgatggttcaacttggccttagcatgcggccttgctccgttaaacatacagagcaaaagccgcaattgcaggttgacgctggtgtcactgaagttacagtctgatcggtcactaccaaagtaagtttgagttttgtccaggatgcttagggaactttattacagatgtaagcaagatttccaagctcttacagacacaaaagaaactagactcagactctctagaaagcagtggctttgtgttgagcctggtgtcaccggcgcagcagtctttgcttctgtgggacagggaaagtgatgaagttcatactttgtttccaaagactcgagttctttgtcctgagaaaggtgactatctcgggtggtaacacgaagccctgtcacacacgagagtgaaagtatcaaccagagagtaggcagcacttacattttcccctcatcagaagctacatttggagggagatgtgggaggtcatgacagagctggccagcacctatacttagccaactcctttttactgttcctgttgttattatttgtattttgttgtgccttgttttttgaaatagggattgtgttatgttgcccagaccagtctcaagctcctgggatcaacagatcctcccactttagtctccaagaggctgggattgccccattagtgacacggggttctcttaattcttatgttaatcacctggcctttgcgtaattttcttggtgaggtatctacaaaatctttgactcactttttagccatgtgctttattttgagacatagtgtcttagttagggttttactaatgtaaacagacaccatgaccaaggcaactcttaaggacagcacttaactggggctggcttataggttcagaggttcagtccattattatcaaggtgggaagcatggcagcatccaggcaggcatggtgcaggaactgagagttctacatcttcatctgaaggctgctagcaggatactggcttccaggcagctaggacaggggtattaaagcccacacccacagtgacacacctactccaacagggccactccctgggccaagcatattcaaacatattcaaaccatcgcacatggtctcatgcagtccaggatttcaagtttcctgtgtggctgaggagctgtctcaagctcctgatcctcttgtctctgaccccaaagtctgggatttataggaatgtgtcaccacacctgccgagtgattggacttcttcatgtcaagtctccagagttctttctgtgtcctggattatcagacgtggcctaggcacgtatattctcccatcttttctctttcatgattcctcaaaccttttgtttatttttagccctataggaaaaaaggcaaaagtaccaaatgtcacacagacccaccccatgttaatatttttttgtcaaatctactttgtctcttatgagttctattgattttttttcttttcttttctttttgtttttgtttttttgggttttttttgtttgtttgtttttgttttgtttttttgagacagatcttctctgtgtagccctggttgtctggaaactcactttgtaaagcaggaggcctcagactcagagatctgcctctgcctctgcctctgcctctgcctctgcctctgcctctgcctctgcctctgcctctgcctctgcctctgcctctgcctctgcctctgcctctgccatgctgctattaaaggtgggagccaccaccgcttggctgagctttattgattttgctgaattattagaagcagtaaatagtgtgtgcatccccttaaatattttagcacatgtctccttctaaacgtagcttccacctagtcacaatgtatcatctttaaactaagaaacacaatataacagttcaataataacaaacagcatcctgcattattaaggttttgtgtggttctaacagtgcttttgaaactttttctgtcaggattattttttttaattttatgggtatttgcctatatgtatgtctgtgtactcctatgtgcgtgccctgtgaaggccagaagagggtgttggatgctctggaatcggagttcagacagtcttgagtagccatgtgggtcttgggaatggacgtcctctggaaaagcaggcagtgctcttaccccatgagccatctctccagcctcataatctaggacaatccctttgctttgtgtccacgttgaccagttcatattgacccaactttcctaatagttcctaatgagccacctcctatctacaagctctcggcttgggcttcccgcctcattagcattgagatcattaaatctgcaaggtcacctccatcgcttcagaagcaggccaggtgagaaagtgttgtaagatgtttgtgactagtggcccaacacagccagtagggtgacttatcttccggccccgccctcccagtgatgtgtgctcacctcttctaggttgggcatcacgccctggaaattctggatgagtttaaagtgtaaattcagttgaccaagaggtgtgaaatatcttgcaatatttgttttgttaaggcctttggaaaaacacgtttcttaaagaacagccccctctattttccttcttgtgcacttccgtgagtgttggtctattcaaactgaagggcagatttcctttggcatgcgtggttccgctgactgctggccaaggtctccatcatatgattcagacgctgtttatactggataccttaccttaattgctcggaggcactatacaggagagtctacttatttattttatgatatgagtacactgtctccagatgtaccagaaaagggcattgaatcaccttttatagatgatttcaagctaccatgtggttgctgggatttgaactcaggacccctggaagagcagtcagtgctcttaaccgctgagccatctctccagccctgaactttgtcttttaacaagctcgtgcttactgtggttttgctgcgtttgttatagttgctctcccttgtgtggtgctggaactcgaactcacagccttgagcacgctaaggacagcttactcgcagtgtttcaaggatcaggaggattaggtgaagtagcacaactccatgaagtactaattctcttaatcccccaacatcgataaggaaagtgatcaaggagatgaagcatcttgtcacacgtcacatggctaacaagtgacagcaggttcttgaggctggcagtgcaggtttagatccagtgcgcttcattcaggaatgtgccgtgcctaactaactgtgcagtatcaaagggatcaaagatgctgtttggaggcagatggcgtgccaccctgatacaggtttgacgtacttaccaaacaagtgatctacttagatagagatcaagatggaagaagggcacaagtcacgatggtggatgcctataacctcagcactgtggggagaggcacgagggttccggggaccaggccagtctgagctgcacaatgacagtttgttgtctcaaaaacaaacaaggatggagatggagatgtggctcagtgatggagatatgcctcagtgatggggtgtggctcagtgatggggtgtggctcagtgatggagatgtggctcagtgatggggtgtggctcagtgatggagatgtggctcagtgatggggtgtggctcagtgatggagatgtggctcagtgatggggtgtggctcagtgatggagatgtggctcagtgatggggtgtggctcagtgatggggtgtggctcagtgatggggtgtggctcagtgatggggtgcttacctcacatgcacgtgactctggttccttcctaggcactgcaaacacaatccagaaaaacaaaacaaaacaaaaaaaagaagtccatctttcgtaatccatcgagtgttctaagttggtccttaaaggaatcgcattttggcaactttagactccctgcttgttctggaagttcaccagccttcattcaagactctggcttgcctgaccttagagtgaaagactttatggcccaaactcaggaaggaggaacgcaagaatagtcgggttcctcttcagagcagcttccagggaaacttgcaagttaaagttcttctaataaaaataaatatcaacaaggatgggcagaccccaaatacacactttttcaggggaggattagtggcttgaaatgaacctagtcataaattagaacagtttgcacctatagacaccagtctgaaataagaacgccagtgggcagctggtgagatggctcagcaggtaaagggacttgccctgtgagcctagaaaccagagctccacctctgggtcccatgaaaggtggagggagaccacccccacacggttgcccatatcctctgcatgttcatgcactgtggcgtgcaagtctctgtccctcactatagtaatgagagagatgggggagggggagagagaacagagaggaacaccagtcaaactagaaggaccacgacatcactgccatggggagggagatcccccagtttcttctggtctcagcttccacggtagtctctcagttcttgcgatcccccaagagaagaattcaacagaacagaacacaagcagtcgtcaaatcaaatagttgagattgtagtcagaactggcaaggaagcaatgcatcatcaaagacactccactttgcaacagatggagaccgttacagaaaaccacaaccaaccagagtgcagagaacaagggagcctgtggtgcccggccccaatacatctctatggcaactcctgcatgcaaggcttgggaatcattgaagaagagggggcagaaagattgtaagagctggaggaatgagaaacgtgctttgagatgggaaacagtacccatgaaatctcagcaatatggttgcctagataagacctagacaaggatgacaccaagagacactcgaacttgaaaggggggaaccttactgagcaacactgctggacaggaactacagacaacctaagaaggctgagaatgagaaaaatagtcttccctaaggaggagcccctgtcggttatctaataccaagtgatatggtatacatatcaagtgaaacgatacacatataagcatggtagaattttaatattgatcaaagaaaaagaggccatgaatttgagataaaatacggtggggagggcttagaggttctgaagaagcagaagaagaaatgatgtaattgctttaatttaaaaagaagtttgtttgtttttaagcatatactcttttaaaaataagaggtcctgatcggggggctggtgagatggctcagtgggtaagagcacccgactgctcttccgaaggtcctgagttcaaatcccagcaaccacatggtggctcacaaccatccataaggagatctgactccctcttctggagtgtctgaagacagctacagtgtacttacatataataaataaataaataaataaataaataaataaataaataaataaatctaaaaattaaaaaaaaaagaggtcctgatcaaacagtaacgaccctagtcctgtgggtcaggacaggacctggtcctttggagccctgagctgcatagtgaccactgttaactagcttaatatcttgaccaccagtcaatcactaccattatcttaaagctgtttctcgggctgcccactgtccttcatgttgtatctttggaggctggttggttagtacatcctggatccgacctgcctgacatcattgaaacagaatgcttctgctgtataaaagggaactcccaaaggacgatacattgtagcatcttttcaaatgctacatcttttcaaatccaagaggctggcggtgtcaggcatgtgtggtccagcgtgtgcttagcatatgtgaggtcctggattcagccccagcagcaaaaaaattcaaagggacaattaagaaatctctttacatacttgtttgcacttcaagaagttgttccaacttctcattatgactgacctgtcctttaaaaaagacaggcagattatgttatctctcacccaagggaccaatacgggaagctggggctttttatagtataaaacctctagagatttttttttagctttggggatttaaaaacaagtttcctgtctctgtgagaagaaaaaaaaaaggctaggaaaaaaataaaagagaaattatgatggttgatgtgacgattttgtgtctagtttttgaaaacttttttgttgttgttgttttaaagatttagttacttattacatgtaagtacactgtagctgacttcagacacaccagaagagggcattagacctaattacgggtggttgtgagccaccatgtggttgctgggatttgaactcaggatctccagaggagcagtcagtgctcttaaccgctgagccatctctccaacccctaaaaacttgttttacgtgtatacttttccgtttgctgtgtgtaggaggagagcaaagcgggtagggggagaagatcgcaaggtgaagaagacgggatcctgtttgggttgcctctcactgatacactctcctgtgtgctaggagtcttaaccacattgaaatcagaaaaagaagatgcacccaagccaattcatcccctctctttgccttcttcaattaaaaatgtacagtcaggatggaggaatagctcagaggtaggattcttgctactaactaaccacttgtcagtacagcactcacaaagccctggatttgacgtctagttttgttttttttaaaaacaaataaaagtagaaaggccaccgggtgtggtggcgtgtgcctttaatcccagcactcaggaggcagaggcaggtggatttctgagtttgaggccagcctggtctacaaagtgagttccaggacagccagggctatacagagaaaccctgtctcgaaaaaccaaaaaaaaaaaaaaaaaaaaaaaaaaaaaggaaaggcaccaccttatcacctgttcatcaagaaataaaatggagcccagctttgatgttcctctggtctgatacaaaaacattccacccatggggacagagagtgggagcagatgaaaccccatccttcagctggcagagtctaacctgaaaccagatgtgggctttggactttggcactttcttttatggaagtactccaagaaggtccatctactctggaactgatctaggaaattgacttccttccagagcccatcccagtgggcacgttgttggcaggtcacaggggtttccatcatattgggggaaaaaaaaaaccaaaaagagaaaatccaccacctaatttctgagtagggtgtggcctcagctctagtggacctcccctgatttgtttgttaattgagtcgcttgtctgtattcagcaagtatttattgatcctctattacagtgtatgtgccaggactgtactaaggaagaatggttgccccaaattcaatcaatgcagagcaagttctaggccagccagggctccacggagaaagcctgtttcaaaaattaaaatggtgggaagggaggagatgggaaagaaaggaggggagacagcaggaaagaggaggaggttaagtggaaagggagtttttcttgagccttgaatggaagctggccacagtggtcacgctatccatgcattctggctcttcagagtgcaacacgtaacaaagactgtggtttgtggcaccgagtgggatactcaaggcaggaaggagcagaaccttggtagtccagtatgctgttgaaggatggggccctctcctaacgctataggatccatggtagataaagcaagtggcttttatgatccagtctctgtgaccactcccccaagtcacggcgacatcattttattcaatgatgggagcggtgtgtgaaacagacttgagtgtgtttccaaacactgggatcagttagtggctcgcatctgtctcagctgacctgatgccaggctcgcgagagacagctacaaacacttgtgagcgagcaaaggtgaaagtgaagctgtgtgcagggtgattgtttgcacgatgaacattgtgtctgattttatttcgaagttcatatcaggattcacaagtgagttggttcccccagccagcagcttcacagctgcttgcaacttggtctcatatctgtaggttagccaacatctttgctgtccagttcgtgtgtgtgtgtgtgtgtgtgtgtgtgtgtgtgtgtgtgtgtgtgtgtgtgtgtgactgtgtacgtgcacgtgtgtgtaaactctgaggtgcaatatctgtgaagtaattttttggaagaaatttcatagaattcctttttgtggagttatcagtgttggaaaagaggcaatctagtggttgctctactatgccaagaacagcacacatggaactagggtcatccagaccctgcaagcagagccatccctggttccacagcaccagagcacttccctatggaagtcaggaaggttgcctgcaggcccaaagtgagagggagctggggacaccaaagcaaatgccacagagcctgggaaaaagagagaatagaaaccaagaaatatcttgaatccaggtttcatttgcttggtggtaaagagaaagatttggttgttccttccaccatgtgtgccagggattgattaggtcagactcacagagcaatcacttttagtatcttgcctgcctagcttcagatctcttgagcacaccggttattaggtagaactttggagggaataaaagtatttccaattttacagggaaaataacgatcttgcttaaatgagttcttaccttggcaactaaacggttaaaagcaaatgttttgtcttccctttgcttacttggtccaagctagagagccggtgatggtggagagggggggttgaagccctttaagagggccctcgtttccaaaggtgttgtgcattcttcaggagactgcatggtttttggtctccgacttggtgccattggagtcactcaaggtcagcttcttatcttacagttagttcactctgaggtcacccatgctaagggggggattgagtttcccacggtattttattgcttttatgcttgactggtttgtcctctccccccccacccccaaactaagtaatattggggttccatttcaatagaagtctgttgtcatctgccatcctgcatgtgacccgctggcagctgtagacttgaaatcatgaacaacagccgacaaatatgttgttgacaggatgttgattcttctctctttgaccataaggaacaaggctatatatgcgcaatacaaatctgtaattatctggctttgaaaacgtgaataattacgaaaaaggatttcccggaacaaactcaaagaatcatgattagcagcccattaaaaaaaactttgtttcccataacaatgttttaactttgtaggactgaagttccacgtgaccagggttgggggggggggtaactgatttctggtgcagaaatgatgggctggagaatgtccctctccacacagcaaacccagtcatcctatagaatcctgttcctatagaagcctgtttggaagccaccgatgtggagccccacctccttagagtgtgttacagtttcctgcagggagaagttaacccttctttgattccccacaaacaacaggaccctacacacctctctattgttatataggtcacgtaggtgggattgtatttacatattactctcttcactagatcaaaaatgtaggggctgcaggcataactcaataggagaacacaggcttagcatgttggacttaattcccagtaccccccatgacgtagatcatgacttacttgtatactctgagttagggtaggtgactagatagagcggccttcaacaacttgattgagagtaaatggatggatgaatgtgaatgagcaaatgaatggagaattctgaaaacaagaggaaaaaagctgggcatggtggtgcacgtctttaatcccagcacctgggaggcagagatgggcagactcaaaaaaaaaaaaaacaaaacccacgagattgagagaactgtacatagggcgggaactattaattagctactaagtattgtctaaggatccttgcagttttactgagttgaaagcattgccctgtcatgacagagctccctacagtgttattccaattaattatgaataaatgctgaaaacgatgagtccagtgtgtggttcctccccctcggcccctcaggaccttgagtgtcccgtccctctgcccctacctgtccctgactgaacatagggctggaaatctgcagacacccattagcccatttgttgctattaaacttctttcctaggctctgaaactctacacatagcacagttatcacacatatgtgaagtgtgtgtgtgtgtgtgtgtgtgtgtgtgtgtgtgtgtgtgtgtgtatcagtctctgagactgcattaaaagagctaaacaattttaaaatcaaaaggaatttcttaatttgggcttaagagtattaaggcagggtttggctatatgaccttggcttgtctggtacttgcttatgtagctcagactgtccttgaactcatggcaattctgcctcagtctcctgagtgctaagatttcaaccatgcaccactgtgcctggcttgacttcttaactttgtcaccagcttggaaattaagcctcttgaaagacaagtctttttttttttttcttaaaatttatttattttatttatatgaatacattgtagctgtcttcagacacaccagaagagggcatcagatcccattacaggtggttgtgagccaccatgtggttgctgggatttgaactcaggacctttggaagagcagtcagtgctcttaaccgctgagccatcttctccagcccccaagacaagtcttttgttggtaggaggaatagtagaattggagtcaaacaggccacaggattcaactcttcactctgggaatcagatcatagcctcttacttggctgcgtgatcatagaagactgcatactattacctctattgtaaagtttggttggcagtgcatctcagtggctcatgacaagaaaatatttaagattacgtaaagctgagcgcccgatgtaatgtgccccaagcacggtctcggcgatcttgtttctgcccctgcttgcctgacttgcagtctgtggctgaaagggacttgcaggctttccttggcactgttaggttgggctgtggtttctggcacagaactcaatagtatcaaaggcacaaccaatgccaggcatggcaggtctacctgtcaccccgggactttggaggcctcagtagaaggcttgttagttggaggccaggctaggctcaaaacaccaaagagaggggctggagagatgtctcagtagttaagaacactcattgttcttccagaggaccagggttcaattcccagcatgcacatggcagctcacaaccatctgtaactcctgttccaggcgtccaaaaccttcctctgacttcctccggcaccagacagacaagaggtataatacatacatacatacatacatacatacatacatacatacatgcaaacaaacactcatacacataaaattaacaagactttaagaaattgccacaaaaaagggtaagaggagacaggcctcagtggaccccacgacacagcacatccatggctggggcgcagagccttgggctgaactccgcaccactggaaaaacagaacacagaaggtacagccagggtctgtcacatcagcacttgaaaacaagacctacgatttgttacttaaaacataatctccctcctgaactacaagttttgttgttctttctggttttacttaggtttttttttttttttttttaacttacatgacacccttccaggcaaccatcaattgtgatttcgctatataattgtatgttttagcacgactgttcccatgctccgatcccagaacactgtatataaacgctttgaaaatcagtgtaacctagcccgctgatcctttcaattatattctagaataagaaatgtttctatgaggttgagtttctcttcactctgaataacgagtgaaaacgttagtcacaggcacgtaagtcaccgtgaaattgtaaagtctccaggagggagaagcgcccctccctctcttcctattctctcagagttcatttgccattttatgagataatttatttttttctttccttcttccctgtgaaggtagaaacctgtgggttctcgttgtggggcagactccaaaggaacacagagtcgggattccagaattcaaatacgtggcgaatatgcacggagatgaggtaagtaccctgcctgaatgtctgagagaaactttgccagtcaggtctgagtcaacaccaggcgagaaagcctggacgagtatcatgctttgtagtcaagcaacaagggccagagaggaaattgggggagccagctccaacagcatcagatcacgtgactatatgttgggtcccctgagagagtaaccgagctgctttggtgttggggctctctgagctgcctctgctactttctgggttggtttcctgtctcctgtcgccatttaggaaatggggggggggggnnnnnnnnnnnnnnnnnnnnnnnnnnnnnnnnnnnnnnnnnnnnnnnnnnnnnnnnnnnnnnnnnnnnnnnnnnnnnnnnnnnnnnnnnnnnnnnnnnnnnnnnnnnnnnnnnnnnnnnnnnnnnnnnnnnnnnnnnnnnnnnnnnnnnnnnnnnnnnnnnnnnnnnnnnnnnnnnnnnnnnnnnnnnnnnnnnnnnnnnnnnnnnnnnnnnnnnnnnnnnnnnnnnnnnnnnnnnnnnnnnnnnnnnnnnnnnnnnnnnnnnnnnnnnnnnnnnnnnnnnnnnnnnnnnnnnnnnnnnnnnnnnnnnnnnnnnnnnnnnnnnnnnnnnnnnnnnnnnnnnnnnnnnnnnnnnnnnnnnnnnnnnnnnnnnnnnnnnnnnnnnnnnnnnnnnnnnnnnnnnnnnnnnnnnnnnnnnnnnnnnnnnnnnnnnnnnnnnnnnnnnnnnnnnnnnnnnnnnnnnnnnnnnnnnnnnnnnnnnnnnnnnnnnnnnnnnnnnnnnnnnnnnnnnnnnnnnnnnnnnnnnnnnnnnnnnnnnnnnnnnnnnnnnnnnnnnnnnnnnnnnnnnnnnnnnnnnnnnnnnnnnnnnnnnnnnnnnnnnnnnnnnnnnnnnnnnnnnnnnnnnnnnnnnnnnnnnnnnnnnnnnnnnnnnnnnnnnnnnnnnnnnnnnnnnnnnnnnnnnnnnnnnnnnnnnnnnnnnnnnnnnnnnnnnnnnnnnnnnnnnnnnnnnnnnnnnnnnnnnnnnnnnnnnnnnnnnnnnnnnnnnnnnnnnnnnnnnnnnnnnnnnnnnnnnnnnnnnnnnnnnnnnnnnnnnnnnnnnnnnnnnnnnnnnnnnnnnnnnnnnnnnnnnnnnnnnnnnnnnnnnnnnnnnnnnnnnnnnnnnnnnnnnnnnnnnnnnnnnnnnnnnnnnnnnnnnnnnnnnnnnnnnnnnnnnnnnnnnnnnnnnnnnnnnnnnnnnnnnnnnnnnnnnnnnnnnnnnnnnnnnnnnnnnnnnnnnnnnnnnnnnnnnnnnnnnnnnnnnnnnnnnnnnnnnnnnnnnnnnnnnnnnnnnnnnnnnnnnnnnnnnnnnnnnnnnnnnnnnnnnnnnnnnnnnnnnngatgttgaacatttttcaggtgcttctctgccattcagtattcctcaggtgagaattctttgttcagttctgagccccattttttaatggggttatttgattttatggagtccaccttcttgagttctttatatatattggatattagtcccctatccgatttgggataggtaaagatcctttcccaatctgttggtggtcttttgtcttattgacggtgtcttttgccttgcagaagctctgcaattttatgaggtcccatttatcaattctcgatcttacagcacaagccattgctgttctattcaggaacttttcccctgtgcccatatcttcaaggcttttccccattttctcctctataagtttcagtgtctctggttttatgtggagttccttaatccacttagatttgaccttagtacaaggagattaaatggatcaattcgcaatcttctacatgataacagccagttgtgccagcaccatttgttgaaaatgctgtcttttttccactggatggttttagctcccttgtcaaagatcaagttaccataggtgtgtgggttcatctctgggtcttcaattctgttccattggtctacttgtctgtcgctataccagtaccatgcagtttttatcacagttgctctgtagtacagttttaggtccggcatggtgattccaccagaggttcttttatccttgagaagagtttttgctatcctaggttttttgttattccagatgaatctgccgattgccctttctaattcgttgaagaattgagttggaattttgatggggattgcattgaatctgtagattgcttttggcaagatagccatttttactatattgatcctgccaatccatgagcatgggagatctttccatcttctgagatcttctttaaaaaaatatggaacgcttcacgaatttgcgtgtcatccttgcgcaggggccatgctaatcttctctgtatcgttccaattttagtatatgtgctgccgaagcgagcacaggtctcatgctttctagggaagtatttcatatcttggctgttcctccagcccgtggtgtggctgtttgtcagagcagtgctttcaggattcaagtgtggatgcacacagagttctttccaacccatcatgggatcgcgacacttagactccttagtatgagccttttccaaattagaggagatgaaccctgtttttattttgttacgcaaaatacctttttttaaaccaatcttacaaaaaaccagctggtgtcccagttttgctttctctcgtaatgataatgaccatgaccaaaagcaactagttggggaaagaggtttatttcaggtcatttaaggaaagtcagggcaggaactgaagctcacagctcccagtcttcccagcaccacctttctatggttagctccgcccacaatgggctgggccctcccacgccaatcattaatccagaaaatgccctacagccttgcctacaggccagcctaatggaggcacctaactcctctccggttccctcttcccaggtgaccttagctcgtgtcaagttgacagaaccaaccagcaagcccagcagggctggagaggctgccttcctctctttgcttttgctagatacgttcagttttctacatcccagggtgccacacgactgaggaagggttggtagctcccaggagcttcccagagtgaagaaaattgacagggcatgtataaagcaccctatctaaggtgcttttagcttttaggaatttcagtcggtacatatggcaggacgaagaacctgccggttgccaaatgattcgcactttgccatggctgaggtgtgatgcgctagtcaacgcttgacctgatttaacctcttcaagctctggttccataggacctagctccaccctttgtgacacacacagccagcccttgccaagtatgtcgcccaacccgtcctgctgaaaaaatgcttcttgcagccccagttaaaaatgcaaatacgtgctggtaagaaaggaacctgatgtggggtgcgttaaagaattttgttttgtttcctctttaatcattgtggactgtttctttaatagactttgttgctgggagtcttttccaaactgcttttaatgaacagctgtgtcacacacagcagcccagacttccttttccttttggtatctagtctatggatcaagggcccctggaatccatttttaataagagacagtgatgtgtttataaaaagaagtagaatatgttcattgggggtgtggtgaggtatgggcgaagggggtgccccagcgagcccatgccgacgtgaggaaccagccacacaactgtatagtatagaatagtttattaaaggcatggggaggggagttaagaggatagtggaggcagagagagagagagagagagagagagagagagggagaaaggagggcaggaagggagggggagagagagagagagagagagagaggccatgagcgtgtggaggttgtgggggggagtgaaagcaagagcaagagaggagcaagagaacgagcgagggggggggggccaagcagcccctttaatagtgggtcaggcctatcaggctgttgccaggtaactgtggggcggagcctagaatgctaacagacaaggagttacttattnnnnnnnnnnnnnnnnnnnnnnnnnnnnnnnnnnnnnnnnnnnnnnnnnnnnnnnnnnnnnnnnnnnnnnnnnnnnnnnnnnnnnnnnnnnnnnnnnnnnnnnnnnnnnnnnnnnnnnnnnnnnnnnnnnnnnnnnnnnnnnnnnnnnnnnnnnnnnnnnnnnnnnnnnnnnnnnnnnnnnnnnnnnnnnnnnnnnnnnnnnnnnnnnnnnnnnnnnnnnnnnnnnnnnnnnnnnnnnnnnnnnnnnnnnnnnnnnnnnnnnnnnnnnnnnnnnnnnnnnnnnnnnnnnnnnnnnnnnnnnnnnnnnnnnnnnnnnnnnnnnnnnnnnnnnnnnnnnnnnnnnnnnnnnnnnnnnnnnnnnnnnnnnnnnnnnnnnnnnnnnnnnnnnnnntgttccgagttggggatctgacacacggtcaaaaccttttatgtctcacctctggttgtggtctctgagggcctaataaagacaagttagaacctttcttccccaaattgtctttggtgatggagtttatcacaagcgatagaaaataaactaagacagcctggaatatgtgtagaccaatgttcagggtttcacgtttattaaaacaaaaccaaaaactaaaatttgtcctttcaagtgtgggcttcacagattctctctctctctctctctctctctctctctctctctctctctctctctctctctctctctctctcattctctctctctctccctattactgtcctgcattctcatgtaggcaatgtggttttggagagtagattctttggggatttagacagaattaatgattcttccaggtggagtatctgactttaagtacgtgtcagttagactgctcgcctgatcagccttttctccgcctctccgggctaacgtgaccagctatcccagagttcgtgccataggcaggacaatccactctctctctgcaaaacctgttcaacactgaaagtcttttgactaaatttatcacttgtaggtttcccctcagcgcctcaggccctgttgttttttagagtagtcttgatcaagcagaacaataatagcccatgaggaggcagaagaaatccatgtctgcaagttccaggccagcctggcctacaaagtgagttccaggacagtcaaggctacacagagatacactgtctcaaaaaacaaacaagcaacaacaaaagaataattttgatcttgtaatgggtttatcaacagtgatgtattaacaattgtttactggatgtctgatgtgccagaagctagacaagatagaccagaggagggtctgtgggtcaagaggcaaacaggttccctactctggatgaatgggaagggtggttagtgtggggactatagcccatgttagcaacaaggatgtcaagtgtgatagggccacacagaactcagatgtggaggccagaggaagtatgtaagatatttgggccagcactgaacagtaaggactagacaatggacaaatgaattaaacctgtaacaacccaaattgacaagactcgttgccacccagctgccttgctgcatagcattgttttgggttggtttctattttcttcttttctggagaccttgtctcacaatgttgccctgtctggtctagaactgactatgtagatcaggttggccttgaactcacagagaactgcctgcttctgcctcaggagcagcaggggttaaaggtgtgcactgccacacccagtgatcgatttaaaaacagcttccaggggttcagcttgtgtgtgtgtgtgtgtgtgtgtgtgtgtgtgtgtgtgtgtgtgtgtgtgtgtgtgtgtgtttgtgttctgtcactggtacccgtaatggagagtctttgtagactgaggcttgggctcatttgtacctatctggccagttccacttgtctgagttgaactaagctgataagaaatttgtcttctgccttctgagttgagtcagggttggggagtgttgggcccgccatcattcctggggaccctgatgagaggtctgagctggcgaggaagtcagtgtggttacactgaaaggagccttttcactaaatgcttaaagtttgagtatctgaggtttcacgctccaagccttaaatttaagagaaaaaggagggagggggttttatacataaaacatgactgagtagctgagctgtttacgctcaggctgcagagaatacatttgaattatatttgtcataaattacacggacagcaaatgtagcccaatgaagaaaacaacaagaggattttggttaactccctctgagacatgtgtgtgtttgcctcggccttttaaagctaaatgatgcatggttgtttctctatattcatgagattttttttttaaaccatctttagttaagccttgggaaattattttgaaatattaagacggatacttcttgggttacacatttacttcctctgaaaaaaattgttatttccttagtccatgaagacaacatggattctcttcagtttaaaaaaataatactaaaaaaataatcagagggatgccatccagtgactatcaccaaaaacggctgtcattaatattttcggaaatccctctaagcactcaaatattcctgtggaaagagaataagaggaattaaaatatctggtgaggtagggggaaaataacctggggggatggcttagcagtgcagagaactggctgctcttccagaggtcctgagttcaaatcccagcaccaaggtcagcagctcacaactgtctggagccctgttccaggggatccaatgccctcctctgactttaccagacatgtgcacagtgctcaggcatacgtgtaagaaaatcagccatacatataaaataacaatttaaaattaaacaaaaagagtttaaggatctagaataaaatatgtggtattccagcatataaaatccatttaatttagtcgaatttaatgtatcagccagagagtaaaacaagatggagaatttgatattttaagtttctttattatgtgttattatttattgtgtacttgagagagggtgtgtacattgtgtgattgtgtgtgtgtgtgtgtgtgtgtgtgtgtgtgtgtgtgtgtgtgtgtgtttgggcacacgtgtcagagggctcacatgtagaggttagaagacaacctactgggatcacttggttttgctttcattttttttaattattagttttaatttatgtgtgggccttttacctgcacgtctgtctgtgtcccacattagtgcatggtatctgcagaggtcagaagagaacactgagttccctgaaactggagttacaaatggttttgagctgccatgtgggtgctgggaatcaaacctgggtcctctggaagagcagccaatgcttgtaaccactgagccatctctccatccccgaagttctacttttaaagtaaacaaaaaaatgaacatgcttaaagaaaatgtaaataacactgtgtgtataatgcatccatgtggcagaaactggattatacgtggatgatatccaaatgattacaatccgtgatcataagaatgtggaaatcagccgggggtggttttctgagttggaggccagcctggtctacagagtgagttccagtacacagagaaaccctatctagaaaaaaaaaaatctagtttctaacctggtgcttggtttcccgtgcgccatgttcttgtctcttggaaggcaaggaaatgaaaaccaccgtgataggaacttcaaattcttttaagtctacattgttctgggttcactccttcacacacacacacgcgcacacacacacacacacacacacacacacacacacacaccaagagcagatagatgagtgcctgaactgtcaggaaagaacgcccagcggcgggcagtgagctggcacttgcccctgtgggtatacttgaaaaccagttgtctcccaaacaaactttgacctaagatatgaaatgtcgagaccccctacagggggatctgtgctttgcggagtcgttttcttattcctgacgtattaataataataaccgccgcattcctcttttgcacgcagactgtagggcgagaactgctgctccacctgatcgactatctggtgagcagttacaggaaagacccggaaatcacgcatctgattgacagcacccggatccacatcatgccttccatgaaccccgatggattcgaagccgtccagaagcccgactgttactacagcaatggcaggtaaagatgggtgggtctcccagcaggcacccattccgtccagcaagaggactcacctcacctcacagaggagcctcaccccagagcctgtgcctagcacagggccacccaggctgccatcctgtaggatgaaacatggcacctgcctagtccctctgcctctgctgaccactcctccctctgcctgctccagctctctgatcttcctcctggaacccccgagggtgctttctcagctcaggtacggtgtatatccggtgtatatccggtgtatatccggtgtatatccgtttctacccacatatattgctggaagagaatttttttgggggggggactttttttttatttactaacttatttgttttatatatatggatacactgtcactgtcttcagacacaccagaagagagcaccagatcccattatagatggttgtgagccaccatgtggttgctgggaattgaactcaggacctctggaagagcagtcaatgctcttaaccactgagccaccaccccagccccggaagagcattcttatgaaaactccttccctgaccacagatcctatatttagtccctggtgtgcttgctttctgatcttctgcaactttaccttcaacacaatttttaatatatatgtttacttatttatttgtgggacatggtatggggcatgccacagtggggatgtagtgctcagagaataacttcggggtaacgtggattcggggtgggtcttgggagtcaaattttggtcaccaggcatcaggttcctttatctcacgggcccctaatgtctaatttcttacttaatgtctttctctccacccaactgcaagctacttagagtactttatcattttagggtttttgtttgtttgtttgcttgtttgtttgtttgtttttaaatctctgttagttccccattgccctgcagagtggctctcaaccttgctgatgcggtgaccctttaacacagttcttcacgtgtgctgacgcccaaccataaattattttcattgctacttcataactgtgattttgctactgctatgaattgtaatgtaaatctctgatatgcaggctagctggtatgtgacccttgtaagagagtggttcaacttccccttccccctgaaagcggtttcaacgcagaggttgagaaccaccaccagcctagcataatatacagaccctccaaaatcggttgattaatccaagagcctaagacgtctggctgttacagtgtggtccactggtgcattttgttcgaactgcctcagggagtttagagtttctcagtgattaatatacacacatatttgcacagtttataaagttgtggcctttgccaaaaataagtaaaatctcaccactggatttctttcctccttaacttttctagcatggttaggcgcggtcacgccagccttctgtataaggtagcctgtttcagatcttggctgctgtataaggaacagtgctaggcatggtgaccagagccttttcattaactgttggttctgaaatctggcaagtttgagaagggcagagcagggtgggtgtcaatctccgggtctgagacagtcagcctggggatgtgtgtctgggctctcagtgggcctgtcacctgggttctaattgttttatggagcccacacgtggctaccagccggtgcctctgagtctaaaaggcgctgttccaagaacacaaagtcccagaacgcaaacaactgcccagcctttgcatgtgtcacagtagctaatgtctcagcaaagcaagtcacacagtaggggacgggactttagctatgattcctgagaggcctccaaagcaattatccactgaacttgaagtcacatctgggaaacacctggagacctaagcctccagtctgtgccgagcaagaaccaacccccccccccaacacacacacacacacacacaccccaataaaccctactgtgctcagcaaaaccaagcccccacacacccaaacacccacacaataaactctgcaaaatccttttcttttaaagggaaaactacaataattatgacctgaacagaaactttcctgatgcctttgagaataacaatgtaacaaagcaacctgagactctggcaatcatggagtggctgaaaacggaaacatttgtcctctctgcgaatctccatgggggtgccctggtggccagttacccctttgataatggcgtacaaggtaagtgatgtccatcccccacagccatcccccccccccataggcctgagctataagcactgcacctgtgaactttgtggtccacactcttaacttctctcactggactagaaaaagcctaatttccccaaccatgcacaatctttcttgtgattgggttttttttttgggggggggggcgagaaaaaggataataacgaatctcgtgcatgccagggggccctgaaacagacagtgtagctgagagtgctcttgaacttctgaacctctggtcctcacaggcacgcaccatcgggcagcttatgaatactgagaatcaaacccagggctttgtgcgtcctaggcaggccctgtgcaacctaagttatatggccagctcttcctggaattcttaaccagtggatgggaaatgtggttggccaccatcggggaaatcctacagccaggtgcagtttgtatcacagacttaggttatatggctagaagaaaataaaaccagaatggtgtatctttttacaattttttttttttgtaatcatgtgaacattgttgactgtttctagctcttctcaatctgtgagtcacacaccacccctttgcggggtgggaaatgaccttttcacaggggtcccctaagaccatctgcatatcagatatttaccttacgattcataacagtagcaaaattacagttatgaagtagcaatgaaaataattttatggttgtggggtcgccacccacgtgaggaactgtgttaaagggtcacagctttaggaaggttgagaaccgctgctttagactctgtagccagcacttaggaggtggagaccagcctgtgtacatagtgagtttcaggacagcagggactacttagagagactgtgtctcaagaaaacaaaaacaaaaaacaaaaaaacaaaacaaaaacaaaaaccacaaacaaacaacaactgaaaatgtggccgaggtacctgttaacccctgccaacacctaaggaaaatggccgaatcccagaaactgacaagcatggtaaagagttcccttcatttctagactgattagtttgtaagtactactactaataataataatacttgttcattaaagagtaggaagaaggtagaggaggtgttcctggaggtgggaaccaataatgtctgtgtgtgccctgactgtgtactgtctgtgtgtgccgagattgtgtctctgtgttgtacgcatccctttgtctttctaacacagctacggggacactgttgtcccgaagcttaaccccggacgatgacgttttccaacacctggcctacacctacgcctcccggaatcccaacatgacaaaaggagatcagtgtaaaaacaagaggaacttccccaacgggattatcaacggctactcctggtacccactgcaaggtgagcgcctcttcttcattctgttctccagttcctacactggaagcaccagagagtatcaaaacggccgtattcctcagtcaggtctccatcccataatatcacaggagcagtggaggtgacggatggtttggaagatgcagaggcatgttcctcgctgtccgtggcctccttctctccctatttattcatttattctatatgcgtactgcatccaggaaccaagccaagaaagaaggaagacacagacctcgccctccggtgggatgtatataaggaactgggtgacagtgcccttagagtaggaagagagatttagaaaagccacaggtgtgcgagggagtctgcagcccacagcagcagggagcgagcaatgtagatcttagaggaaggtgctacttagtccctcctacaaggacagctgccacgaagctcccaccatttatgaccaggcagtggtgaagacggtgtggccagtcttcttccagattataagagaagttggatatcgtgaagaaatgttcttcaggcaaccaagggaaggggttctggtttcccacccttgaataggatggccaggcagaggagggttgatggtgtagggcgaaaactcactcagaaggaagactattcagtggtagagcacggaactatatatactatcatttcctcttggtggccatactggggattgaatctagggctttgcacattctaggcaagagctctatcattgggttacccccagccctctttttccttttactttgaaacaggggcttactaaattgccggggttgacttcgaactttcaaatctccagccatagcctcccaagtagctgggattacagacagatcttcaccataaggcttagctcgctcttaatggaatgagtaatgtcaacagaagcccaggggtatataggaaccagggcagtctggaaactaagaatcctgaggaggaacttagggagaagggcaagaggtgtgaccttgtgctagaggtgagcagccttccctcccagacgagtcggcctggcccactgacagcaagctgcagcctgcatctctgcacacaggccactccacaggcgccttccccggctgtcacttcgggtgcatgggctgtctagtaatctagcacaaactggtacttttgtgtctgggtggcccactgccaattttgcagatgaggtaaataagcagagaccacaattgatggtgttcaggcagggagcccagctagacgcagaggcaccagaaaattccttctgcccttccagatccattcccgctcacctcaggtctctagctcctccatcttcatcactacaaagggccttctgttccctggcactactgtccttcatggtcatccataaattgccaagacagaaatccagatgtgtggaaattcccaaattgctacaagttattcgcaagtgtgcatgtgcacaaaaatggattcagagagaaattcaaattcatagggttaaaagaaagaaaagaaaaaatcttttttaaaatatttatgggctggcaagatggctcagtgggtaagagcactgactgttcttctgaaggtattgagttcaaatcccagcaaccacatggtggctcacaaccacccgtagtaatgagatctgatggcctcttctggtgtgtctgaagtcagctacggtgtacttatgtataataataaataaatcttaaaaaaaagatttatttatgtcgggcagtggtgacacatgcctttaatcccagcacttgagaggcagaggcaggtggatttcaggacagccagggtgacacagaaaggaaggaaggaagaaagagagagagagagagagagagagggagggagggagggaggnnnnnnnnnnnnnnnnnnnnnnnnnnnnnnnnnnnnnnnnnnnnnnnnnnnnnnnnnnnnnnnnnnnnnnnnnnnnnnnnnnnnnnnnnnnnnnnnnngaaggaaggaaggaaggaaggaaggaagatttatttaacgtatgtgaatatcctatagctgtcttcagacacaccagaagagggcatcagatctcattacagatggctgtgagccaccatgtggttgctgggaattgaactcaggacctctgcaagagcagtcagtgctcttaactgctgaactctttctctctagtccagaaaaaaaaaacaaacaaacaaacaaaaaaaaaacaactttgtcacaagaatctaggtctatagagattgcttaacattttgacattttctttgtggattttggttttatatatatatatatatatatatatatatatatatatatatatatatgagtatttttgccttcatgtatgtctgcaaaccacatgtgccacagcagccagaagagggagtcagcacccctggagctggagttacagtgtgttgtgagctgtgggtgctaggaaccaaacctgggtcctctgtaactgcagacagtgctcttacgccctgagccatctctctatcccttgagcattttgtttaacttaaacttttccagtgcctgttagagcacatgtgttctctggggtgggtactgtactggttactggtttgattgctgggacaaagtgcctgacagagcatcatttaccttacacttgcatgattggtagaaacaggggaaacagaggtcactgggagaccagggacagatgccacctgctagccctatcactgtggccctgcctctgccaggagcagccaaggactgagtgcccagacacatgatcctatggaagggcatttcacattcaaaccagatcagatactgtgtgtaataaggtgtaatctacttccttcaaagttactatagggctgatggtgtggcttggtggtggaccactgaactggtataatgagattctggctagagctcagtatatattacagaaagagaagaggagtggggggggggggacttcatttcatcaaatctaagctgtcattcgtataaaatataacataccaccaggaaataaaatcctctctgttaaatacacatttttcagacatgaaattttaagacacataaatccagagatgtcatatacgaaatttcatgccctgtaaaatacacagtaactataaccctttgaatttagggtctcctaatgtcaaagaattataaagcacacaagagcagtgacagctggaagccacacgcacctgtgtctgagccttcctaaagtcagtagcatcttctctgagtctcagagacatcttgtcataaagaagaccaaagccacaaggctgcaccctgctctctgccacccatgggcaggagtccctggacctgctgccctcaaggactgttcagacagattccatgagatggcataaagatcttaggaaagaatctaaaaaaacaacccctgaaaactcagtaatataaacattattattattcctctaaaaccagtgtctctgattttagtttaattaattttatagtttacagaaatatttttaaagatctgcttttttcgttttgttttttgtgtatgcgtgtatgtttgtgtgagtctatgccacatgtgtgcaggagaccaaaagaaaggggtcaaatcccctggcctggagccacctgatgcgggtactgggcaccgaactcaagtttgctgggaaagtaccagtatccgtctttccagccctacagaaatactttaaaaaacaatcatattctgctgtctttcccagcctgtttatcccactacctttttgcagtagagtcaataaactaaattttcctttttgcaatatttttaacttaaaatgtctttgagaacatgagtgccccatttacaccgtgtcctgtcctcctctgaacctcttcttaaaaacagcctgtacccacataaaatgtagcctctaccctctaaccacgcccctactcctttctagttagaatgcaatttaagggggaggggtgctcttgaaatgtaggattttaagggagggggaaatcatttcccatctctgacttaattttggtgcataactgagtttcagtcagctgcaccccagctacctcacgggaccccgtgtctgtctgatcacgtgatgagttgtgaagccccacgtgacggatgtgttaattcacagccaatgcctctttttctcattcgctcgtctcccgggcacgtgatacttggctcccttccaccactggtccttaacaaaaatgagatgtgcttgctttgcagggggaatgcaagattacaactacatctgggcccagtgctttgaaattaccctggagctgtcgtgctgtaaatatcctcgcgaggagaagctgccgctcttttggaacgataacaaagcctctttgatcgaatatataaaacaggtgcacctaggtttgtgtcctatatcttcttgttaacactcacagcgtgggtagaacctttgcgtcgagcatatacaaaacctcctccggggacttggggctggacctggttttctatgccaggactaagggtttgaattctcaacgtgttatctacagtgtgtgagagatgctaggcttagctgttcgttcgtaagagaggatgagtcacttgttttgagggcgtaaaagcccagagttcccccaattttacatatggaatgatatgcaaatctggcaaaaagatcaggaaaaccggatgtactcttgcaacatcttcaatcagaagcctagttgtagcccgctgcgtggctctgcaggtaaatgcgcctgcgccaagcctggtgccctccgttcatcctgggagcccacagggtggaaggagagacctgactactgtcctctgacctccaaactcttatgccatagagcacgggggcctccccaagacaataaatatgtaaataagcaaatgtaaaaatttgaaaataaaaccgagtgctgccggcacctttataacattacaaacatatcattggctccctccaccttacgtaatcaccgtgctgggtccttggttgttattctgacatttcagtttccgctggccttttcccgtgagtcctggaataactgaaccatcatccattaaggctctcccgatactgattctttagtaagtcactctgaattcttttgtgaagtcacccttcgtcactatcatcaaggaggtgtaacaagacatgaatatgtctctgcccctcgctgccctctctgtcgccttttaatctagccatcgggatgatgggatgatccacagagcgctgaatcagggccagcttcgcatgccatgtttaatacggtattagtgtgcagaagctgtgcagcccgataaataataagtaataaataatagcataagcatcgttggcaatggtatattgagtttatgagtccatttaattaggccgtatcaagaatatttttccacccgcctgtccctgtaatctgctgagaactcagataacagtaggtttattagcacgtcaatcctgcccccttgtggtttaagacaggaatatttttttctgactttaaaaaaaaaaaaagaaactatttcaaaatactgatgtggttgttgctacttattagaaagtcttgctccacattagtgccctgcctgctgtcagagagaactgtctctgtaggtgatgatgtcagagagaactgtctctgtaggtgatgatgtcagagagaactgtctgtaggtgatgatgtcagagagaactgtctctgtaggtgatgatgtcagagagaactgtctctgtaggtgatgatgtcagagagaactgtctctgtaggtgatgatgtcagagagaactgtctgtaggtgatgatgttagagagaactgtctgtaggtgatgatgtcagagagaactgtctgtaggtgatgagggcaaatgctcctatatagacactccctggtctctgccacgctgttcattcattgaaagagttcaccaagtgctaggaagtttgtgtgtctaagatggtgactcatctgaaaggctcagacctgccctctgtgggaaagagaaacctctgatgtagcacgcgggcctttctttgcctgaaggacagaagccggtgtaggcgtcaagctcttaggctggtgtcctgttttgaaagctcacaaaagtgttaaacgtcagtatgatcggaagttggagtaagagttctgccctgctgcatgccagcctgctctatggctccggaggggctactgggactcacagaagaattcagtctaaacttgggctctgtagtattatgggctgtgttagaggatgttctcagtgtgcgttggaaagaggatctttagattctgaggcccaggtagcttgtctcatctctaggaagcaaagcacaaaggtttcagtgccgcccctgctttccccgctctctaaggcggatctcagccttgaggctgagggctcaccaccctcagatacctaagcaaactggcctaagaaactgggtgggaagccaggcaggggtggctcatgtctttaatcccagcacttgggagacagaggcaggtagatttctgagttcgtttccaatactggctttttctctcctgctatagcagctctttctgagcctgtgggtcaactggtctctttttagtgtctgacttcaacccctgaatacacgtaaggacaaatatcaatgagactttgaacaaaaaagataaaaggaggggaaaaaatgacagggagataattttgcagagttgacctccgtagataaagtggagaggaaacttcgcctttgataacccactccagagcaaaggagccaggaattgaacccgaaaggcaccagggggccatctaggtcaggggttgtgtaatagttgagatagagactcttgtgtgaggtgagataacgctactttgttactaatatcaaaaccttcacctttcctctcagtctttgtcagaggacactatttatcatgtgcctggtgtttttctttcatgatgaataatggctgagtgtagctatttggacattgttaccattgggttttggtttggtttgggtttttttttcattcgtgtcattgggcataaataagttaccttcagatagtccagtttgtcactggagggaacaaattggaattgtgactgatgcagtttaggggagagcatttcttgggatgtaggaagccctaggttcaatccccagcgctgtgaacattgaagtcttgaagtgggcaagtctaatacaatgctttagtgtggattccagagactgcctccatggatctcaaatctggctatgtagttggctgaaaaattaaggttatttaaggcatggatttgaccttgacccatcaaaaagggggaggaggaagaggaggaggaggaagagaagagaagaagaaagttattttagtcacccaaagccttatccttcacatttgcaatcgtttattttgttttgcagtcttggggactgaacccaggaacccagggctgtgtttatggtgcttagtgctaaacagtaattctaccacttagtgccacctccgccctatgaaactctgataacattgtcatcttgtagagttgatgtaaagattcattgagaacatacacccaaagccctcagtatacagactggaacatattaattgctcaataaacattggctgcttttgctaataataagacatgtaacactgttgttataattttgctccccacttagcttgtctagtgtgaagacaaacctttgaaacccttatatattgacaactgtcttttaagttaatcatttttgttcaggtttctaaggaatccaccatcatcatgcgttcagtacagtttaatgatcaaataaacaacccggaagtaacaggaagggattattcatttctgaccttccattttgatatacactgaatagcctatagccagcaattttggctataaatcaggcttgtagctcaactgtggtctacaggcatcaaaatgaccctcctttcgtgagcgctgttaaggcaggtaatacaaggggtgtgtttcttaaatccataaaggaaatgtctttcatgtgccgtaaaacgtgttatttagttgtaaatcttgtaaattgtattattattgtgccaggacacatgagaaggacaggggacagccttttagggagtctcttctctccttccactgtggactctaaggatcgaacctagatcctcggacttccagaactgtctcactgactggaaatatggcatgtatatttcattttctttgtgccttgcaggggtaaagggtcaagtgttcgatcagagtggagctccattaccgaatgtaatcgtggaagtccaagacagaaagcatatctgcccgtttagaaccaacaagcttggagaatactatctgcttctgctgcccgggtcctacgtgatcaatgtaagtgagcaaagcccggtattttataaaatgcacagtgcccacctggggtggccaacgctaagtgggaaatctaaccatgaggacagcaaggcttggaaggcaaggttaacatcaggcctgcaataggagaggagtggaaggcagaaacaaaccaatgagggggaatcacatatagtctcgcagtgatggtgttgcgccagggaaatgttagtgatcccccaaaacacacacaggagccaatctggtgcaactcaccagggtctttattctgttcgaacaaccctcccgcccatcccccaacgcaccaccattacgcagggcaggacagttttggtggtggtggtggggagcccagaatgtctatgggtcaaggctttatagtaagcagcaagcagggagtacatgtgcaagcatctcattggaaagctcctgtggcctttaacatgattggctggtgctgggagtctatcatagacttaacttctgctcccctctgcattggtggtcgttaggcagagggtaggcttgtaacttgggggtgcagatttgttggggaaatagcctggagacactggtcctgttgagggtgtaacctggaaactctgctcttgttggggattagactagagacgggagctaggctcaggttctgttggggggcaacttggaaactaatgctattagataccagcctgttggtctacctgagttcacacttaggtcaggttttctaaaatggagtctgaatttcaaagctttggcatctcagtggcatgtgcctttgaccccagcactcgggaggcggaggcaggcagatctgagttcaaggccagcctggtctacagagttagttccaggacagccagggctatacagagaaacactgtctccgggaggaaagtcatatgttttcctaaccaagcacctaccatgttttctcaattatgtacgcatctgtgggctatagcacacttggagaagttggtaagcagctttgagggcagtttgctccttccagcatacattctagagactgaatcatgtcgggcttgctgggcaagcgctttcacccagtgaaccatccccagctcaagacggctattctaacgcgtacacacacacacacacacacacacacacacacacacacacacacacggataacctaatcaatcagcccaggaggaagccagtgtaagccaaggtgccttacaggtagccctgccagagaagtcagggcagctaagcagacaccacatggtaggagcgaaagagggggaattaggaagatgcacaaaggtgtgcctggaaatgaccccagaggaaagagagaaacactcagcagcttcagccctggcacccaggcctgcctgtgaactgaggacgatgggagatgccagcaagcaccagtgtggcagggaaccatgaatgaggaatcccaagctttaaatccaatctagagagctcttctgaaagtggcttttctttgtcattttccttgcccttccatagccactgccaaacaccatcttggcataggagctgtcagccatcttggactctggctgaagccttggtccagagcacattttactgaagaaaagacagccccccccccctgctaccatgtggcatgccacaagccccgctgctgtctcagtctgcccccacgagatctaggggagtccctgccaaccacagcattggcactgtagcaagacagcccctcagtcctacctgtcaatcaggaacttagacaggtggtgccagctgggtcccccagctccaggaacagagctaccgggtggctccagacctaccattcacttctcctggccacagctgcagatgcagatgtttgagcttctcctaggtataaattgtgtgtgtgtgtgtgtgtgtgtgtgtgtgtgtgtgtgtgtgtgtgcgtgcttgaaaacaatggaaacacttcaagccatttatgtaaagcgatgggttttttttagatagagccccaaaggcacaaaattaagatagacaaagaaaaacgaaccaggaagcatggcaaaggagccaagagcagattgtccctgtgtcttcagacctggggaaaaagatctgcaaatgacttctccattaagagatgagtttctagaatatataaagtgctcaaaaggaagccctgaatgccagcactgcccagaggcaggtggacccagtgagtttgaggtcaacctggtctatgtagcaactccaagagcaatcgcaacctacctgaagattcacaagaacaaaactagtttttaaaacaattgaaagttgtttggttttggttttggttttgggggttttgtttgtttgtttgttttttcaaaacagggtttctctgtatagtcctggctgtcctggaactcactttgtaggccaggctggcctcgatctcagaaatccgcctgtctcagcctcccaagtgctgggcttaaaggcatgcgccaccaccgcctggcacaattaaaagttttaaaagaaagtggtagaagggctccgaaggtctgggttgaagttctggaatccaccgggtggctcacaactgaccatccgcgactccagttctaggaaatctgttgccctcttctggcctctgtaagcactgcatgcaagtggtagacacgtgcaggcaaaaaaaccgctcttgtgcaaggttttgggtttggttttgttttgtttctttctttctttttaaaaaggaggggtggggagtgaagtagagttatacaccttaggtcagtggcaaggagaatgggagtaagttgaaggaagaatctactcacaatcttgatatccaataaggatactctaggcttggtccaaaaaaagcacctttaccccggcacactgaaaatgaccgtggcagaatcagtcgtggcttcctccatttagtcttttccttcactagatgctgaaccccctctctgttcttacttcattttgtaattcttggtagcatttgcaccaaaggcctacatcaagaaacactggcaactttccgggcgctatagccccggaggcgtggaccgctttcaagccacgcatgcaccgctcaaaggggtggagatctgtcttctgcgtggacctcacacccatctgaaatcactcaagtaattgtttcttgttccttctcaggttacagtccctggacacgactcctacctcacgaagcttactattccagggaaatcccagcccttcagtgctcttaaaaaggattttcacctcccgctgcgatggcagccggattccatctccgtatccaatccttcgtgcccgatgattccgctgtacaaattcatgccaagccactcggctgccacaaagcctagtctgggcgtgtttttcatgactcttttgtacgtattttttaaataaagcaaggtgtgaaactcgacttccgggaatcagggattggttactcccggttatggcaaccctccctcctgtgggactgcgattgggacagactccactgttttccttaagaagaaaaccggatgtttccaaacctggcctagagcgacctgtaacgaccaaatccatcttcagtctggataaagtggaggtcactgcttagctcatgctgcccacacaaacgccaccccgaaggagtcccaaacacttgtaagaaagttcagaagcaaaacagatatccctacaagaaaaacaatttgtctacggagagccacgtggatcagagccgcaaggacgggcactttctggtcacttgctgtgttacgacctttcgtgttatttgtagagagctgatattgtctataagtggttctccccaaaggaagaaatttctagataacgggactaagagcatttactcttgccaatggtctaaggccaaatgagagaaaatggacaaacatgtctgatgtgggtacagatgcagtggcctctgtctcccgtgcctttgcccttgccccctgcacctgatgccacagtcctacgaagatgacccctcctgtataaccccagtcccttgcctgagcctcagatgcaactccagctgctcaccagacacacccacctgactacgatgcctaggaactgcagttcatccggttgactgttgagacgccatgcaaggctgttcgattcccatatccagtcactggaagctgctgtatacagcctctccaggccagttagcgtccctccgccgctgacccagctgctgctcatgggtattttcgccaagtccgtcttccacacagaacctggggagctgggctgcccaaagctctcctgctccctaaacacaacacagtaagtgctctcggtcccaggtctggattctgattgtgtcacgtcttgtttcctgctcagtaaaactccattccatggggggttaagagcactgactgctcttccagaggtcctgaggtcaattcccagccaccacatggtggctcacagccatctgtaatgggatccgaggctgccttctggtgtgtctgaagacagcaaccatgtagtcatacacgtaaaataaataaattttttaaaaggaagaattccaagcatcgtcttcaacggggaagcccatggagttccaggtggtcaagttcaaggccgatccttcaaagaagttcctttgactagtgactttacagcatcgtggtgtggaactgctctgtgctggccttctctagcacgccatgagctctttaagacaaggatctgcttgagaaataatttctcagagtctagccaaaaaacaggaaataaatggatggggaagtgtctcagctaccgctacagacctttccagaacgctaaggatctgagtaattttgtgtaaatgcgttttatgtttggcaacattcagcttactagtacacacacacacacatacacacttttcacgtgtatgtcaaagaacaaaatccaaagataaatgcaaatgggtgagctgtgaggcttgagggaaaggcattagctgttagccaatctgccttctagaccagaaaacaaattcttacagttcgaagtaaagtgtcccctgtaaaagtaactttattctaacattagaagaagagaaagctgggcgtgttggcgcacacctttaatcccaacactcagaaggcagaggtgggcggatgtcttcgtttacacagacagaccctgtctcaaaagtaaataaattaaaagaaaaaaaaaaggataaatatcaaacaggaacattaacagtaactccgaggtgcaggtttctaagtgacatgcatttcccacaggaagtaagaacatgcggggtttgacaggcgatgaaggcttgagactctaaagagatacgtgggcaccctggtgccctttcttggtgccaaacctaatctatattttaatatcaatagtctgcatagctttttaaccgcttctaaatttggaaatagcatgagtatcttgatcattttatttaaataagcattaacttatatcccagaaggcgcgtattaatagttcaaaaagggatctgggtatattacatttgaagtatatatataagacgaagccaggtgtggtggtgaactattatcccagcgcttgggaggctgaggcaagatcgacacagctcaaggctagcctggactagccatcttagaaaagcaaaaccagtaagatatgtaagagcaaacttggttcgccatcagctggtgttctgagttctgactggttgaccctttcctaagattccgtgaaaggaaatgagctgttcgctgagctgctcatgggcctaaccggagacttggtactgaaacaacttgcaagtgcccgtgtcttaccagagactgtgccagggctttgcacagggccattgagccacagctacgtctttattttgttactttttgttcagacacagcatttcactaagctgtgtagcctgcacttggaactcatagtaagccaaactggctttggatctgcctgccgtagacgctggagtagctattacagacctggtccgctgtgtccatattcaggttacattacttaaatcagaaatatatatcaaaacccagtgtaaaaatcactaaaacagggtgaggggtgtagctcagtgacagtgtacttagcatatgcaaaggcttgggtctaatctccattaactacccccaagacaaaacataaccaggaaattattctgttgccctctgccaggtagagaaagcagaaggaatacttgggtctgtaactgttttgaaagcaatataccttactaaaggtgacctgaaaacggaaatgctggttaccaaaaaccacgtccttttcaaggaaactttcacaaagtgcctagtttacatgcgtgcccatttttgaattgagatggtaaaatcctagcacccaggcagcagaggcaggtggatctctgtgagttcaaggccagtcttttctacagagttctgggaccgccagggctacgcagaaaaacccccgtttcaaacaagcaaaaacagtcccagttttctcagactctgcctgtactaaaatggtattaacatcagatctgctttccaatgtatgagctgaagctgggttgagacgtatctgtttctaggaaaaatatacaaagccatatagcacacttattttcctattgcaacaggagtttcattctcagtctcggagggggcatctagtgaaggtttgtgagctcaattctgccttcctggtgacctcaggtacgggagagaatgatgctggattaggtgaagagcatcgggttcttggtgcctacaacagattcttcaccgagtttgttctagacttgcatcactaataagatgctgtactgtgtctcacaggccgtttaatcaaaccttaagctcacaagccaacccacagctctgtgcgagagacttcatgcgggtttttgtttaacaagcttctaagtgattcctgccattaaaagcacagaagcagaagctattaaaggtgcccaggttgagtggtggcagtgctggaccacgcctttaatcccagtactccagaggcagaggcagaggggactctgagttcaaatccagcctgcctggtctacacagtgagttccaagacagccagggctacacagaaaaataaataaattctcagattatctaagattacaacgtttgcttgggagggaccatgactacctctgagcttattttatttacattatctgattatcaataaagaatattcatatagtgaatgttgtctctttccactactgttttgtttgcaaacataacaaaaatctacaaactagaaaagactgctatatggggctagaaagatggctcagggattaagagcactgacttcttccagactcacctacactctcctctctccacctctttcttcttcctgcctcagacccccaaaccccacctgtctctcttccacacagctacaggctgcaggcatctttattcgccaatcggggataacttgggggacaagattacagagcatcatctgggtttaagtgagaatttcccagcccctggaggcaaccagggccagtatttagcaacacccaaaacctaacagtctccggccttccaccttgtggtagcctcttgtttctgtcatgatgcatactgcaagccagctgaccagcaagcttccagatgattcgcctgtgggtctgcctgtcatctctcatgctgtggttacagatgagtgccaccatatccacggtttctggggatggaatcagggcacaagacaagcactgagccatctcctccacacaagtatcttaactttaagttaaatcgcaaacatttctccgactcaaaagaaaatccattgcaatataatatattgggaaatccctaggcaaaattgcctaaagtatttaaatttgtagctattaggggctggagagatagctgagtggttaagaacactggctgctctcccagaaattctgagttcaaatcccagcaactacatggtggctcacaaccacctgtagtgagacttgatgccctcttatagtaagacagctacagtgtacttataataaataaagctttgagccggagcaagcagccagcagaggtcctaaaattcaattcccaacaaccatatgaaggctcacaaccatctgtacagctacagtgtactcatatacataaaatatataaaccttaaaaaaaaaaaaaaaaggcggcatgtagacagctgtgtggtcaagagcagcatctgctcttacagaggacagggttaggctcctagcctggaactcgggtcctaaggatctgatgccctcttccggcctcttcaggcactgcatgcatgtagttcaaggcagtgtatgcacacaatacatatacatgtggacgaattattcatacacacaaattttaaaaaggtggagagcaatggatcaatttcccagcacccacagggcagctcacacctgtctgtaactccagttccagggtttctgtcaccctcacagacatatagccataacaccaatgaacataaaataaaaatgaattataaaaagatcactgatgggggctgctgagatggctcggtggttaagagcactgactgctcttccaaaggtcctgagttcaactcccagccaccacatggtgggtcacaaccatctgtaatgagatctgacgccctcttctggtgcgtctgaagacagctacagtgtactcacatataatgaacaaatctttaaaaacaaaatcactgacaaaaaaatgtgtaagacaaatctctttcacaattcttcaataaaccatttatttgcaaataaataacatcaatgccatttctaaataaacatttaagaactaataacacacaaggtactttattgtaaatcgggactgaagctgcccaggctgccgcacccaccgcctcctattcaaatgctgtcacgtgggaggagtgttcttgttcttgtctctgaagctttaacgcaacattaatacaaagctatccttcgcttcctctaccttacagttttatgttttctatacttagacgtgacccttcaatcaaagggaagaggcctattatgaaccaggagattaatctacatggatagacgagtcatcttagaatgagttcactttatccatgttctgattcagtctttctgaatgggctggtttctaaacctagcctaagtacaggcctgaaacataggcaaccaccaggaaccacggagctgaggcaaaaaggcgcttctaccagcctcaggcttttcaacctgggacaaactgcaacacttgtgccacacccctatgacaaaaagctgaaaatgctggaaaataaggcgtgtgttttcacttacataccaccagatgcaattcatgcctttaaaactgtgtgtgtgtgtgtgtgtgtgtgtgtgtgtgtgtgtgcgcacgcgcgcgtgtgtgtgcgtgcgtgcgtgcatccatttgaagatcagggaacaactttgtggaactggttcactcttcctgggggttccaaggatcaaatgtgtgtcagtgggtgtacacagcaggtgcctttactggctgagtcttctctgcagcccacaactcacacattttagattactacagtttcagaatttcaataacttaaatatacaatccttcacatagtctttaactctttacatgaaagacactaaataaattaaatgttcttattattaacaaaaaaaacagaaatcaagtacttctgtagcccttgatgaggaaggtccaccatcatctgcaggagatggaaaggacttctcacatacacttccaaagtccttccaagcggagattatttaaaatataaggaaaatataaacagccaatgcaaattacttaaaacacaaatataaaataaacaagtgaaatttccctaaaaaggaagaaaatattcaccatatttactctccaggataaattataagtgaattttatgtggactaagacagttttctggctttaatgtataaaaataatacccatgttgtctaatttgggggtcatatagttagaaatataaaattctatttttgtgagcaggtcagctagttgaagtaagttagcacaatcatttggattggctgtctgcacactgggcagggcttgtttcttttttttagcttctttgcacacgtgaaacatgacatgaggtgtccagtcttgccgtgaacaatgcagccatttttaggccgcccctggcagatcacacatggttcgatggcattcagggagaagctagattccacactctcgtctttgtcctgcgtttcctccttcaactctttcacgctttcttggctgctataaacaatgctgctggaagtcgatggttgggaatagtcgtcactctcctgggacaggggcgtctgttcggccttctcctcgctgtcctcctcagcacatggctctttagcatcattctctgtcagctttttgccatcaggcacatccaagccttcttctgcctgagctgagttttccagtttggctttttcagagatttccactttatctttccccttatcgtctggaagccagttctcacgaagggtccagcatcttttgcagtgtgatggaaggggaggattcatttcattgcatgaggtacacttccaatagtccttcaataaaaaagacagtaactcttcagtcagtgttcatagcaaggctaataacttcaatgtggctaaggtaaaagtataccatgtagcttaattttcagcatttcatattttacataaataggcaaagaacatgaggaatatatctaatactatataccagaaattagctaatagagtagactctaggtactttcccctacacacacacacacacacaaaaggtgacctatatgaaatagtgacaggctagagatggctcaggttctgagcacacacgtggtggctcacaactacctatagtcctaattctgatctcaacattgtgttttatttctttgaagaatctatatacttacagctaaggaaatctcaggatctccttcaaaagagtctgtatcgctttctcctgtctgatagactgtgacccgatagacctagtaagacaaattcattagcatcaattcaacccttcaaccaagaagccagaattctcagtaagtcttaaaacaaacagcttgagccattaactgtggacgaagagttctgaaagaaagttaaatgcagttcaaggcaagcaggaaacgcaggataggaaaacctttactcgcaatggcaagagttgttagatacttaaaaccaaacaaaacactcaagaagacattttataaatttagagttattagacagaaaacaactagaaatgtagagttgctcccgagaaagagatactcgggtcctattggacactgttcgttgcatgctttacattggtgaaaaacaaatcagtactgagaagggaggggcagaagtaggggctcacacctttcatcccagcaatcaggaggcagaggcaagaggattcccatgagtttgaggccaggctggtctagatagccagttcagggtcagccagggatacacggtggtaccctgtctcaaaaacaaatacacacacacacatacatacataaatgggaagaccaaatggagaactttgtggtccagccattatgagaatgttcatccatcattagcagagcagtggtggcgcacacctttaattccaggacttgggaagcaaaggcaggcagatctgaggccagcctggtctacaaagcaagttccaggacagctagggccatacagaaaaaccaagtctcgccgggcgtggtggcgaaggcctttaatcccagcacttgggaggcagaggcaggtggatttctgagttcgaggccagcctggtctacaaagtgagttccaggacagccacggctacacagagaaaccctgtctcgaaaaaccaaaaaaaaaaacaaaaacaaaaacaaaaacaaaaaaaaaaaaccaagtctcaaaaagcaaaacaaacaaaacaaaaacaccccatcaactcaaaaaaagtttaaaaacattgttcaaactctcctctaagttttttatttagtaatgtgagactataataaatcaagcaaagggctggagagatgactcagaggttaagagcactgtctgttcttccaaaggtcctgagttcaattcccagcaaccacatggtggctagtaaccatatctagtgccctcttctggcctgcagacatacatgcaggcagaatgctgtatacataacaaataaatctaaataaataaatcaagcaaagaaactataaaatttcacctcaaatccacaaagcaatattctatcttgaacaaatgaaaaagcaagactttccagagactctgaatagatggcctcttcatcttactaaaaggctgacagacacagaaacccacctcatcatcctcatctgagagctcgtgcccttcgtcactcaggctgtaatcttccgagtccagagactcaacttcaaattccacgctaaactgatcagaaactgaatcctgatccaggcaatcaccagaatgctcacttacgccatcgtcaagatcctatggaggaagaatgcagcgaatgtaaatgcattgcctctgggcctcatttagagctcccgggttcatcccgagccactatttccttctcagccccagaccacatagactgggttcaaggttactaccttactcaaaagtcctacctcatgaaggaaaagtcagagccccttagccccgaggttacactcagaatgactgcattaacattttcaaatgtccagctaaacacaccctccaccctattcaatacccatgctccagccacatcttgtttcctaaatcaatccacacactaactttttctcagtaagataatctgagtttctaagccccactcatctttctttggttaaggttcccacaataccataaaaagatcttccacaatgacctttcctacgtgtgtgattatatgcacacccactattatctgaagcaccactgtgagtttatcctattaaacacaggaagacgaaggcctccctgactcacaggctagtgtgacggagtgctagtgacgacacacaaacaccaagctggcatctgggttttccgatgcagccttagttggcctggggcctcatgtgacactatattggctattacctcatgtgacactatattggctattacctcatgtgacactatattggctattacctcatgtgacactatattggctattacctcatgtgacactatattggctattacctcatgtgacactatattggctattacctcatgtgacactatattggctattacctcatgtgacactatattggctattacctcatgtgacactatattggctattacctcatgtgacactatattggctattacctcatgtgacactatattggctattacctcatgtgacactatattggctattacctcatgtgacactatattggctattacctcatgtgacactatattggctattacctcagagagctctgctgtccctgcttcctgagtgctgagattaaaagattcaacttcaggccaggcatgtggtgtatgcctttaatcctagcattcattcaggaggcagagactggaagatctctgtaggttcaaaaccagcctggtctatacagtgagttccaggacagccaagagtcagaactaaataagagaccctgtctcacaaaaatgcaaacaagagattcaacttcaaatcatacactaagttcatccgcaaatcaacttacttacaactgataaaaatacactgctctagaattcaggacacaggcattctcaatttgctaccaagatgctgcttaactgcagacacatcatttctcttccagaaaatacagtcagcttgacataaaagtagtcttttttttttaagattaatttattattatatctaagtatactgttgctgtcttcagacacaccagaagagggcaccagatcccattatagatggttgtgagccaccatgtggttgctgggagttgaactcaggacctctggaagagcagtcagggctcttaaccgctgagctttcaagttctagcctgtcttattaaatgtaataattagttgtaggatcctttaacaaattatttgaaacactatcaggcatagtgttccctgtaaataaagggtaaaactactgagactaatgttctcataagtaagttaaaacaaagcaaaacacagttgtattaaaagcattttcacttaagtttaaaaagtaacaaatttttaatatggaagatttttagaagagcatatatatatatatatatatatatatatatatatatatatatatatatattctgttttgacagcaggtcaggttctattctaagaaactagataggcagagatccgcagagaggttggctcactgactgttgggtgttggggatgtaattaactggtagaacacttgcccagtgcgcacagagccctggatttaatctgcagcactcaaaactagggcagagatgtggtagtcaacccactttcctggcacccacacagtggctccaaccatccctaaccccagttccaggggactccacaccctcctgtggcctcaaagcactgcatgcatgtggtgtacattctggcagacaagacacttccatattaaaaagtaagataatttcttaaacccaagcactacctgatgcgagggcgtctctgtggactcgctgctgctgctgctactgctgctgctgccgccgctgcacatctccctcagctcacacagacccaggctcggatcaaaggacagggacctgcggcgcttccggtgccgctccccaggtagctcatctgtgttctcttctatagattaaaggacatggggttaaaactccctgtactgggactgatttgagattgaaatatcttcagcacctatttgcaacaaaatttaatttcaattatattaaacagagaagtgaaccattaatgtttcaaaagtcagcagtgtttcattggatctgttcagctacacataagctctacttctaagcttgcaaccttctttgtggacgttacctccacaagttactcatttaatcctcctagtgcttttactgattcaacagtacacgatttccccatcaacagtaagctttaagaataaggctgggctggtgaaacagctcagtggttaagagcagcagagcactcatacattaaataaataaagttaaaaaaaaaaagaaaaaagaaaaagactatgcaaaggtcaacctgatctatatagaagccctgtcccaaaacaaagaacaacttcatctccttttattagaagtctagggtagcagctcttaactttcctaacactgtgactctttttttttggtttttcgaaacagggtttctctgtatacccctggctgtcctggaactcactctgtagaccaggctggcctcgaactcagaaatccgcctgcctctgcctcccaagtgctggattaaagatgagagccaccatcgcccggcactgtgactctttaatacagttcctcatagtggtgatcccaagcataaaactattctcattgctacttcatagccatagttttgctaatgtgatgaatcataatgcaaccatgtggttttcagtggtcttaggtctcagacctctgtcaaagggtcatttgacccaaaatggaaacaccaagcaactgtttagtatgtcacataatgtccctatgtacctgtctcactaatggatctccttctagatgaggtagacagtctagaaattaaatcagaagatgaaggtttctcttctggtggcgcttgcaaaggatcctaagtacataaaagaaagtaaaatattgcaaaataaacattaaacattggctgttccacaccctgttttatgtaaccctcccaattttcaagaactatgtgtcatgaagctagagcggtggctcagagaagaagaccatgtgctgttcttgctggggtgtgtttggtttccatcactcatgtctggggcagctcacatccacctgtaactcagctccaggtgagcatcacctctttcttttggctggaggacatacacacacccacacttacagacaggatattttaaagagaaaagtgtgttagagtaagaactttatgcaagtattaccttcagatcactcccaccttcaggctgacgtctgctctcactcagcgatgtgccagagtctgaagattgtaagagaaagtaaaaagtggatcaaaacaaagaaatcaagaattcaacatataccagtctaacacatgcccaatacaaaatctaaccttttaacaactattaaccatttgtatcaagagtcatttgcatgctggagatataaattcaacaggaattatgaagcaaaataagcaaattttaagatatactagcaggggaaacaaaaatgtttagtagacgtgggggaggggctctgaagagctatcaggacagattctggaatcgcctacgctgaagttagcataggacagacactccagactgaaggattagtatgtgagaaatcatgaacacgcaaacagttcctgtgactgacaccaacataataaactcctctgtactcaaacagtaaagtgcagggtcgctgtgcacagagccatgcgtgttcagctgagtcacatacaaggttattcttctcaacagttattcaagcagttctataatcttgcctgaggccatcttgcaacttctcactattaaagggttttagttcaagaaataaagctaatttcctagctcacagaactattctccccagagagcaatcataaaactcctaaataagaagcaacaaacctccaggtggtggtggcacacgcctttaacctcagcacttggaaggcaaaggcagaggcaggccaatttctgagttcgaggccagcatggtctacaaagtgagttccaggacagccagggctacacagagaaaccctgtctcaaaaaaacaaaaaaagaacaacaacaacaaaaaaagcaacaaaccactctgacaaaatagaatttaaaaaacaacaaacccaccaccactcccaactgggcacggtgatttacactacagcaatcatctccagcaggccagcctgggcaactcagtgagact

SEQ ID NO: 1128 - DNA, 5198 bp, Mus musculus
ccggcgggcggagacgcgcgcctggtactggacatggaccgcgcgcgcctgtggctggggcttctgctgcccgtggtggccgccctggatttccgatatcaccaccaggaagggatggaggcgttcctaaagagcgtggctcagaactacagttcgatcacgcacttgcacagcatcgggaaatctgtgagaggtagaaacctgtgggttctcgttgtggggcagactccaaaggaacacagagtcgggattccagaattcaaatacgtggcgaatatgcacggagatgagactgtagggcgagaactgctgctccacctgatcgactatctggtgagcagttacaggaaagacccggaaatcacgcatctgattgacagcacccggatccacatcatgccttccatgaaccccgatggattcgaagccgtccagaagcccgactgttactacagcaatggcagggaaaactacaataattatgacctgaacagaaactttcctgatgcctttgagaataacaatgtaacaaagcaacctgagactctggcaatcatggagtggctgaaaacggaaacatttgtcctctctgcgaatctccatgggggtgccctggtggccagttacccctttgataatggcgtacaagctacggggacactgttgtcccgaagcttaaccccggacgatgacgttttccaacacctggcctacacctacgcctcccggaatcccaacatgacaaaaggagatcagtgtaaaaacaagaggaacttccccaacgggattatcaacggctactcctggtacccactgcaagggggaatgcaagattacaactacatctgggcccagtgctttgaaattaccctggagctgtcgtgctgtaaatatcctcgcgaggagaagctgccgctcttttggaacgataacaaagcctctttgatcgaatatataaaacaggtgcacctaggggtaaagggtcaagtgttcgatcagagtggagctccattaccgaatgtaatcgtggaagtccaagacagaaagcatatctgcccgtttagaaccaacaagcttggagaatactatctgcttctgctgcccgggtcctacgtgatcaatgttacagtccctggacacgactcctacctcacgaagcttactattccagggaaatcccagcccttcagtgctcttaaaaaggattttcacctcccgctgcgatggcagccggattccatctccgtatccaatccttcgtgcccgatgattccgctgtacaaattcatgccaagccactcggctgccacaaagcctagtctgggcgtgtttttcatgactcttttgtacgtattttttaaataaagcaaggtgtgaaactcgacttccgggaatcagggattggttactcccggttatggcaaccctccctcctgtgggactgcgattgggacagactccactgttttccttaagaagaaaaccggatgtttccaaacctggcctagagcgacctgtaacgaccaaatccatcttcagtctggataaagtggaggtcactgcttagctcatgctgcccacacaaacgccaccccgaaggagtcccaaacacttgtaagaaagttcagaagcaaaacagatatccctacaagaaaaacaatttgtctacggagagccacgtggatcagagccgcaaggacgggcactttctggtcacttgctgtgttacgacctttcgtgttatttgtagagagctgatattgtctataagtggttctccccaaaggaagaaatttctagataacgggactaagagcatttactcttgccaatggtctaaggccaaatgagagaaaatggacaaacatgtctgatgtgggtacagatgcagtggcctctgtctcccgtgcctttgcccttgccccctgcacctgatgccacagtcctacgaagatgacccctcctgtataaccccagtcccttgcctgagcctcagatgcaactccagctgctcaccagacacacccacctgactacgatgcctaggaactgcagttcatccggttgactgttgagacgccatgcaaggctgttcgattcccatatccagtcactggaagctgctgtatacagcctctccaggccagttagcgtccctccgccgctgacccagctgctgctcatgggtattttcgccaagtccgtcttccacacagaacctggggagctgggctgcccaaagctctcctgctccctaaacacaacacagtaagtgctctcggtcccaggtctggattctgattgtgtcacgtcttgtttcctgctcagtaaaactccattccatggggggttaagagcactgactgctcttccagaggtcctgaggtcaattcccagccaccacatggtggctcacagccatctgtaatgggatccgaggctgccttctggtgtgtctgaagacagcaaccatgtagtcatacacgtaaaataaataaattttttaaaaggaagaattccaagcatcgtcttcaacggggaagcccatggagttccaggtggtcaagttcaaggccgatccttcaaagaagttcctttgactagtgactttacagcatcgtggtgtggaactgctctgtgctggccttctctagcacgccatgagctctttaagacaaggatctgcttgagaaataatttctcagagtctagccaaaaaacaggaaataaatggatggggaagtgtctcagctaccgctacagacctttccagaacgctaaggatctgagtaattttgtgtaaatgcgttttatgtttggcaacattcagcttactagtacacacacacacacatacacacttttcacgtgtatgtcaaagaacaaaatccaaagataaatgcaaatgggtgagctgtgaggcttgagggaaaggcattagctgttagccaatctgccttctagaccagaaaacaaattcttacagttcgaagtaaagtgtcccctgtaaaagtaactttattctaacattagaagaagagaaagctgggcgtgttggcgcacacctttaatcccaacactcagaaggcagaggtgggcggatgtcttcgtttacacagacagaccctgtctcaaaagtaaataaattaaaagaaaaaaaaaaggataaatatcaaacaggaacattaacagtaactccgaggtgcaggtttctaagtgacatgcatttcccacaggaagtaagaacatgcggggtttgacaggcgatgaaggcttgagactctaaagagatacgtgggcaccctggtgccctttcttggtgccaaacctaatctatattttaatatcaatagtctgcatagctttttaaccgcttctaaatttggaaatagcatgagtatcttgatcattttatttaaataagcattaacttatatcccagaaggcgcgtattaatagttcaaaaagggatctgggtatattacatttgaagtatatatataagacgaagccaggtgtggtggtgaactattatcccagcgcttgggaggctgaggcaagatcgacacagctcaaggctagcctggactagccatcttagaaaagcaaaaccagtaagatatgtaagagcaaacttggttcgccatcagctggtgttctgagttctgactggttgaccctttcctaagattccgtgaaaggaaatgagctgttcgctgagctgctcatgggcctaaccggagacttggtactgaaacaacttgcaagtgcccgtgtcttaccagagactgtgccagggctttgcacagggccattgagccacagctacgtctttattttgttactttttgttcagacacagcatttcactaagctgtgtagcctgcacttggaactcatagtaagccaaactggctttggatctgcctgccgtagacgctggagtagctattacagacctggtccgctgtgtccatattcaggttacattacttaaatcagaaatatatatcaaaacccagtgtaaaaatcactaaaacagggtgaggggtgtagctcagtgacagtgtacttagcatatgcaaaggcttgggtctaatctccattaactacccccaagacaaaacataaccaggaaattattctgttgccctctgccaggtagagaaagcagaaggaatacttgggtctgtaactgttttgaaagcaatataccttactaaaggtgacctgaaaacggaaatgctggttaccaaaaaccacgtccttttcaaggaaactttcacaaagtgcctagtttacatgcgtgcccatttttgaattgagatggtaaaatcctagcacccaggcagcagaggcaggtggatctctgtgagttcaaggccagtcttttctacagagttctgggaccgccagggctacgcagaaaaacccccgtttcaaacaagcaaaaacagtcccagttttctcagactctgcctgtactaaaatggtattaacatcagatctgctttccaatgtatgagctgaagctgggttgagacgtatctgtttctaggaaaaatatacaaagccatatagcacacttattttcctattgcaacaggagtttcattctcagtctcggagggggcatctagtgaaggtttgtgagctcaattctgccttcctggtgacctcaggtacgggagagaatgatgctggattaggtgaagagcatcgggttcttggtgcctacaacagattcttcaccgagtttgttctagacttgcatcactaataagatgctgtactgtgtctcacaggccgtttaatcaaaccttaagctcacaagccaacccacagctctgtgcgagagacttcatgcgggtttttgtttaacaagcttctaagtgattcctgccattaaaagcacagaagcagaagctattaaaggtgcccaggttgagtggtggcagtgctggaccacgcctttaatcccagtactccagaggcagaggcagaggggactctgagttcaaatccagcctgcctggtctacacagtgagttccaagacagccagggctacacagaaaaataaataaattctcagattatctaagattacaacgtttgcttgggagggaccatgactacctctgagcttattttatttacattatctgattatcaataaagaatattcatatagtgaat

SEQ ID NO: 1129 - protein, 443 aa, Mus musculus
MDRARLWLGLLLPVVAALDFRYHHQEGMEAFLKSVAQNYSSITHLHSIGKSVRGRNLWVLVVGQTPKEHRVGIPEFKYVANMHGDETVGRELLLHLIDYLVSSYRKDPEITHLIDSTRIHIMPSMNPDGFEAVQKPDCYYSNGRENYNNYDLNRNFPDAFENNNVTKQPETLAIMEWLKTETFVLSANLHGGALVASYPFDNGVQATGTLLSRSLTPDDDVFQHLAYTYASRNPNMTKGDQCKNKRNFPNGIINGYSWYPLQGGMQDYNYIWAQCFEITLELSCCKYPREEKLPLFWNDNKASLIEYIKQVHLGVKGQVFDQSGAPLPNVIVEVQDRKHICPFRTNKLGEYYLLLLPGSYVINVTVPGHDSYLTKLTIPGKSQPFSALKKDFHLPLRWQPDSISVSNPSCPMIPLYKFMPSHSAATKPSLGVFFMTLLYVFFK

SEQ ID NO: 1130 - DNA, 140352 bp, Homo sapiens
ctcatgtgggctcatcttattctcatacccaagctataaaatattcaatgcatgcattttggtttactcttctgtaagaagatggtcacagatgaaagcacactacaaaattttataagacttttctgagaagaaactgaaaaactgtgcccagaacttggggtagctactcacagattacttgttggggtagagagagttacttaagagcgaatagcataaactctggaaatatactgccagatattatgaggttatcctaataacttcatatatccaatatccaatggtcccatgatgatgggggtgtctgctgaagggaatgagcccttgtcattgggaagaggtcagtttgagagtagggaacagagactctggaaggagcttatctggtagtggtaggaggaatattttctttgctctagatctggccaatgcttggcagtctcagggtcatgcaattgccggaagcatttctgttggtggagggtggctttccttgtccctgggcgattacctgtaagagaacctgggaccgtgccaaggaaagggtctcgggttgggtcctgactcggcagtgcgtctgaatcatgctctgtgccacgtgtcctttcatcatcagtacagtctgtcctgcattggatcagggaggggtccacatccacatctttgtcaggaccatgcagggaaatgctggaccccttccctggaggtcaggtgatggtgccaacagaggacaacagggctcagcagcagccagagtactgcctaggggtgttaccttgtaatatgaaaagaagcaatatctccctcttggttgtcacgagatttagaggaaagatgtgcaaagtgactggaattcatatcctcattcaacgtttattcatctcattacatggtgtagttacttcacgccaagctccaggcaataggaatacagcaatgagggagctgggtcaagtcactgctctcttagtttatatcctcttgagaagtggggacagacagtaagaagataaacacactgtcagggactgagatggggatttgggtgcatgtgatttattgaggatgttctcctcaggaaaacctgtaaaggatgaagaaatcaggatggggaaggggaagaagccaagcagaggggtgctgtggaaaaatctaacctgggcctgatccctgggggccctgaagtgcaaatcacaccttcagagttgtccttgaaagcaacagtggggagcttttgtacccgtctctgtcagtcattggccaccccagggtgttgtagtagcctctcaggtaaagaggctccttaggcaagagcgtttcttagaagaaggccatgggtgtaaggtgttagctgctgcgtgcccaggagtggggcacacgggctggttatgggtcatgcgcagagtctcaacaacatcagctacatctcttcataaggggaaaagtcaggcagtgggaacttctaggagagaatggaaattcagcgacagcagagggactgtaccgttgctttagactgcgtggccatgaaatgggcagattcagattttatagattttgagacttacaatttggaggtgcctttttaaagtaaaagactgtgaaatcatgaatacaaagctagcacaaacatgaaaatttattcaaaatgagaagacaaagaattacaaataaaagctaagaaataagcatcacaaaatccagaaaaaataattaatatttaattaaagttaataaaactttctgacatacctctacaataccttttcctacattatttggccatatatattttgattacctccttatatgataatggcttggtatttgctttttattaagagactagaaagacattttggtctttcccttaaagtggtaaaccatttgttgttaatacttctcaaaagtttttcagcttcacaacttgttatttggtaaaattatgtgaattttgaggatgattatcaagattgggaaaccctcaattaagcttctttcatatatgagctataagctttgaaaagatgccccacagatagcttctgactccacacatttcaaactcacttttgccaggcacagtggctcacacttgtaatcccagttattagggaggctgaggtgggaggatcctttgagcccaggagtttgagaccatcctggacaacatagtgagatcctgtctcttcaagcaaattggtcgggggtggtggctcacgcctgtaatcccagcactttgggaggccgaggcgggtgtatcatctgagttcaggagtttgagaccagcctggccgacatggtgaaatcccatcgctactaaaaatagaaaaaaaattagctgggcgcggtggtgggtgcctgtaatcccagctactcagaaggctgaggcaggagaatcacttggaccctggaggcagaggttgcagtgagccgagatcgcgccattgcactccagcctgggtgacaagagcaaaactccgtctcgaaaaaaaaaaaattttttaaagaaaaagaaaataaaaataaaacaaactcactttcctcccatactatccttgtcttctggtgctgggtgttgtaggacattttcatgttgagatgtctttgtgtgacgatagcaggtggtcggcagtgagtgatgagtattccaggaaatcattactatacaagagtaccacacaaggaagtgactgcaaaccacttacatacttcccctcaattcaatgaacccctaaatcaacttcccctttgccaggtcctccaaaggcctatagccactccaatgccaatggaagagaggcaagaggtagagaaaattggaataaaaagagagagtagccttaagttttaactgattgtggttaaaatattttacttttgcaacatttacaaaaacacacatgcatgtgaatagatcactagagtccctcccagaacttacaaaggacccctgcaagtgaggggctctgaaatgtaagcctcattgttttcaccataaatccacctctgtcagtgagggactgtttgaggagatgacatgtagctgaaagcacttagatgacattcagtaagttattattaattggagactcatggtaaatctactgcagtctttgaaagcagagatctcttgctccatcttgagtctcagactaacttatacaaggacaggaagacagcacttccccaggaaggcctctttaaaaatagaagctgccagtgtcagagaccatcccaaaattaccgcactttggccatccatgcatacagggaatgcacagtaacagtctgagtgtctctgcagcattggttggaatctataaagatctgaaatcaatgccttgtttgactgtgatttgcatcctctttttctttgctggctctgggtctctgggggaaggagtcccttgtgcctgccaggtgctcttgattagagtttggggctcccagcattgtgattatttgtttacctgcctatctcctttgcaaaagtgagctgtgccaagcaagggccctatcttatttatgcttgcatccccagggcctagcacacagcctagcacacagagggcactccattcatgtttccagatgaatacataattgcctatccagcaatgtatgaaagaaaaaaaatatcattccacccatttcttgatttcatctcaaattctccaaaacaggtaagttaatactttgtacaatttggtcagtaatgcaatgtttgaccctgaatcacttaaaaatatttctgtttttcaaatcatttgcagaaggcatgagcgagtttacataaataattttcactctttgatagaaagcattcacaaaatcaaggagaaataacatacaatatgcagttttcactctgggtgctctgcactggaaaatgcaacagattctctttcttatttttgagaaggacaagagagctgcttgtctagaatcactgttccctttgtcaataaataaaaggcccttgtatttgcaaggatttcacatgatgttaccaaaaaaaaagaaagaaaaggcgtgtaaagttttccatagcaagtgtgctcaccaaatttggctgtaccgcttaattacagaggacccagagggaaaacccagagttctgtgcggtgctattagaaaggcttcagggtgtctgggtgtcttttccttggggtctcctctttcctctctttcacaaattaaaaaaaaaaagttaattaaagctgaacagttgaagctgatttccaagggactgacaacatctgacaccaagctgaattaatagcagagaaaatatttttttcctgtattgaaactaccaacagtgtttagcaaaagtgatttaaatcctttataaagtttctagagttcttaaataaacactgtactaagataaaggcctagttaattccaaatgtttcaaagaggttaaacaatataaatactttcttaaaagttaaaatcgagatgaatctcgaaactagtaaatgaagattaactctggatatttagaaaagatctttatctatcaaatatctatgtttgtaagacaagaagagccttggtttcattaaggaaggaatagcaggggctggcaaatggaattttattaagtaaaggtcaatccacatagcatcagatgatagccctgtcaccaactgccctacttctatggataatttttaatgatattaaaagtttttgtctaactccacttagctatttctgcccactgttgtactatgtatgtgaaaaccctggcatcagcctcatttagctctgctaaaagaagttagttcttattaatcattaatagcttattgaattgacatttgcactagcaagaatgtgaaagaaagaacacagagtaagtatgtgggctacaggggtcaggaaggttgaacacataaaatggtttcctaagagtggtaaaggcagctgtccctgggagagatatcctctccctgggtggaacttgtagaatgaggtggttctggatgacaccctggactgtggtcatctcaccccagtcatgccatcttgaaggcttttcaggtgatgccggatcaccttctccagggtgtgttctcttctctctcaatgtggccttgcagtcgtggtcaaacccatgggctctgcaaccagactgaggtccattgctcaattacaatttcagctgtgccacctaggagggggtacttttttgtttatacatgtctgccccattaaaatgtaactttcatgagggcagcaactttcattcacagccatagaagagggctcagttcatggtgggtgctcaatacttaatttaaatttattaaaagaataaatgaataagtgactgagtggatgaagtgtttaacctctctgggcctagttttctcatctgtaaaacgagggtaataacagcactcagtatgacatctacacaggtagcaaccagtgtcagaatgcagcaacagggtttacctagccaaggggtcctttatattcttcctgtttagggagaatgtggtttcaggatgtgcagctgctggcagaagggtgaaagctaaagcaaccgcaggtgggtcctgttatgcgttgtttaatcatgctcacttggaaactcactctgctttttcaaggagatttggtcatacagatgaccttaggtcatgctgttatttttgttttcacaggacagccatttatatttaatgaaataaaagaaactcaaataatgtataattgaagaaggaagaaggataggagcaagactttccagttatatctcatggctctcattctcatttcacctacacgacttgggtaggaaagtatttttagaattcagtatgctcagttgcaaaataagtgtataaacattggtatctttcctacatatggctctgttcggttggaaaaaaaaatgaatatcgttttgcaatagcaaaactaaatattaaatacccatgaataaacttaacaacaaatacaaaggcctatgtaaagaatcctttacaattttactcagagacaaaaaaggaaacaatcaaatgaagtgagatactttatttctggatgaaaagattcattgttataaaggcatcaatttccaagtcaatttataaatttaatgtgaaaatttccacagcgtatttcttggatctattcaaaataattttaaacattatctgaaagactaaacttataaaaataacccatatcatttagaaaaatcagaagaatatggttaattatttaatgaaacacaccataaagctatagtatttaaggtataataaataagattgctagtcatgacctcctaaattatttcatagcctactaagggtcatgaactgcagactaaaaaacattggtttataaatatccaaaactgagcagtttcgttaaatatattataatatactcataatgcagaatatatgccattattaaaaataatgtggtagaactatataggtatggaaagatgtcgacaacgcatgggtgaaaaatttactagaatcaccctattttgaaaggaaaaaatatcatatatttttatatatgcagagaaagagcatatggacagaaaattaccaatatattaacaatagcccatttgtctgtagctgctgggtttatgggcaagtgtaatcttctttttactctctgtaatcaatatgcattagtacttaaaatatgaattttaaacattttagactgttacataatacatagattttgttcattattttcaggaaaaatgcagatttggtccttaatacataattaatatccattacatgattttttagcaaagatattataaagttatagtacttagagtataataaataagtttgctagtcatgacctcctaaattatttcatagcttaccgaaggtcatgaactgcagttttattatattttctgtcattttctttgacagaagatacgataaaatgaaacattcttgatttctttaacattaaatttacagcagtaagcaatcctcaatccaaataatcacatttttagctgcaaaataggaaacacttcttccaattcctgtcatagaacttctctaagaataaaacagctgcttagctatcattgcctttaaaggaaaaaataccatcattaaactgctgctttgggtatttgagtcgaggtgctctagtggctattgtaacactgtgcctcctgtcacgctaccaacctgctgggttgagtaggccatccaggcttagagttgtctctagccaagaacggtagaagtcaagatttatttatgctggggctgctgaataaggcagttactcatgaggacatttttaaaccggtacaagtaaacccaagcaacctttaaggggagaagtcacaaacaaacacattaagtctggagttggacatgtgtcttggaagaagagacatgggtgagggaagatgatgcttgcagatttccagtgtgcacctccctctttagctgtggctggtaaacttacctgagtcattgattttctcccctctagatgccgccctgaatttcacttttgtctgctttcataattgagtgaccagaataacagtctgtcaaccattccacaaaatatttgcctcaagtcaaaaatatcctagaaaagagttgttggtgaatataaggccaatttcatgctctcttaaaataatgacacttccaagggtagaaactgaataagtttcatagttcatgtctcttgttctagacttctatatcaggaaatgttataattttcaaggcatatagattcagtaaaaaaaaaaaaaaaaaaaaaaaaagacagagagaaagaaaagaaagcttgaactcgggaggtggaggttgcagtgagccaagatcatgccactgcactctagcccggtgacagagcgagattctgtctgaaaaaaagaaaaagaaatgttacaatctcactgttttcggaattcattcattccaaaattttgtgcatctataagttgaaagaactagatgagatgattttgaatagaagtactgagtgagaacattctctagcacattatctggcaatatgggatgttgtaatacaatgttaacagtatacggtgtaaagataccaatgtatactgttaacactgtaacagtacacattgcctcataatattaaaaactcttataaacttcatcttaatggcagaataatattctaagatgtgattaggaaatcattttgcaaaccttgtttccaatatttttgttattttaaacaatattatgatttctaactttatgaaaaaaacattttccaaatttcaggtcatgcctttaggatagatttacaaagtagaattaccataataaacattttaaggttacattgcaaaattattttctaaaaggcttgtagcaattttcatccctacctgcaatgtatcaatagccacttccttgtttcctcattcatattaggcgtctcatttacaaaaatgaatacataaaaaacaattttataaaatatttgatacattaataagttaagaattttgttcactgttgttttaatttgtatatatttttatttacagtgagattaaacacttttccatatgttatttggtcatttgtatttcctcctttgtgtattgttgtgcatgccttttgcctgaaaaggaccatttccttttcagtaataatcaacattaactaccatgatgactactatgacaggagagttgattcagcttgggcttgcggggaggaagcaacagaggtctgtctgctagaaagtgacctttgagtggatattcaaatgatgatggtgggaagtagagagattgggcagtagctttcctggcagagggacagaatcgtttgttttgaggcaggtctgacctgtgagtccagggctgtccagagaataagaatgctggctctaagggacatggacattctggtcaaatgaagaacattttcatccatgctttgatgagacagacctcaaactactatcatactactgtgatacaatagatgatgactactatgatatgattttttttcattcctagacaatgtagtataatataatctcatatcaaaactcagggtctaaaaccttctcccgtctaaagtgctaccttatcataaaataatgaaaggttttaagattgctaagaaatgtaggctgggtgcggtggctcacgcctgtaatcccagcactttgggaggctgagacgggcagatcacgaggtcaggagattgagaccatcctggctaacatggtgaaacccagtctctactaaaaatacaaaaaaaattagccaggcgtggtggcgggcgcctatagtctcagctactcgggaggctgaggcaggagaatggcgtgcacccaggaggcggagcttgcagtgagcggagattgtgccactgcacttcagcctgggtgacagagcgagactccatctcaaaaaaaaaacagaaatgtaatgccctacaaatttattataatcatttcttgccaaagacattttcatttatgctgatacttcaaatataaggactttttaatttcctctttttcctaaatgccataaaagtaattgtaactaatatgttgggccattaagaaattttatttacacaggataaaattcctttatgaatgaacaaaatattttttaattggattacattgtggtccaaaagaccttaaaaaataaaagaagctgaatgagctgaaactaattcttgatctattttcagccatcaatagaactatcgcaaaactttcaggacatacttatggtgtcatagggaaggcagtcattattttgttttcataagttgggtattttattaagtaaaagcactttaaatcagtgcttttgaaagtgtgaatcatgatcatgaccattagtgagtcatgaagttagtggatcagactggcttttttttttttttttttttgagacggagtttcactcttgttgcccaggctggtgtgcaatggcgtgctctcaactcactgcaacctccacttctccggttcaagtgattctcctgcctcaacctgctgaatagctggtattacagcgacacgccaccgcgcccagctaatttttgttatttttagtagagatggggtttcaccatattggcctggctggtcttcgaactcctggcctcctgtgatccgcccacctcagcctcccaaagtattgggattacaggtgtgagccactgctcccagtcttttttttttgtttaatgaactagaatggaagggaaaagaaaagagcattgcaaggtaagtattaccttgcaaaagaaaaggtaagtattacttcaagtggatgtgccacattgctacataaaatgcattcctattgtaagactgtggtcaaactggtttaaaaagcactggaattcaggcatggtggcttatgcctgtaatcctgccactttgggaggccaaggcaggagaaaggaccacttgagaagctcaagatcactctgggcagcatagtgagactctgtctctacaaaaaaaataaaaataaaaatatataataagtaaaaattagtctagcatggcggcacacacctgtagtcctagctactcaggaggctgaggtgaatgaattgcttgagcccaggaggtcgagctgcagtgagacgtgactgcaccactgcactccagcctgggtgatacagcaggaccctgtctctaaacaataataataataattgttttttaaacattttaaagcactagactttacataatagccggtacacttcttatttttaagaagtcttaaattattctatcctcaccccagcgattactctccattaacattagcctttaataaggtaaatttaaagttaaatgtgctgctaccatgtgttaggcactgttctaggccctgaggatgcaatggtaataaattgggatcctagctctcatacagcttccataaagttgggaagacagaagaaatatatgaaatacagagtcaagttgttctgcaagcaccaggaaaagaagaagcataatggcaaggcaatgactcaggtgcaattttatgtaggatggtcaaagaaggcatcattgagaaagtgacatttgaacagagtccaatatttaagtttttaatctagcatttttaatgttattttaaatttaagtgaacattttgataaataatagctaacaactgctgagatttaaaattttataaactatttcattccctattatgattcttaactttttgttcatttgcatatttagtcatttactcaacaaatatttattttgtgctcaccaagggctggccactgtactgagccttggggattgagctgaggaaaagacaaacttatttcttgctcttagaagtgtctggcctcctgaggtgtacactgaggcaggagaattgcttgaatcctggaggtggatgtttttgtacactggtgtgtacaaaaaaaaaaaaaaagaaagaaaagaaataggcaattccaaagtcataagtgggtcatgggttaaaacagattgcagttcccttcttggaagatcagagaagacttcctggagcaataatgattaaattgagatatagagggtaaaattaaattaaatttcaaatttttgcacacatccgcattttaaattttagttgaggccataggcttttagtggtgcttaataagaaactttgagttgtgaaaaaagtacttttaacttcactagattagtcattacccccgatttaaaaaatacagaagtttagagaatgtttacatgcttgttaccattaaatttacattaaatctataatcattctgtatcttgtaatcataaacttagatttccctctatttactaagaagggcaaagagtgtccctgtaatattcagaggtatgtttttccagtttgaagggctgttgatttataatctggagactgcaaatgttcgtaccgcagaactgcagtctacactgtcgaatgttgttgtagagaatcgtgtttgttcacttgaggttgcaaactgtgtttgtcacacgaggttaaacttgctcaccaaccccatgataattaaccagcaaggcctcactggtgttgttataatgaactcaaccagtataaaggcctgtgggttttcttgacataaggaaagtatttgaagctttttccttgtatagtttatgcaaataaaaataaataggtaaggctaagccaattaatttcaagcacaaccccaaatctcattcttccgcagaagctggcacgcaaggtggagcagaagagtctagttttctagatcaagggaaccgaatacagcagaggcctcaaggccaaaacaggcaggtttatttcaggaacttgaaagtagttcagatgcgaagcttccaggtgaagagggcaggttgaatagatcatgttatctctctccctgacccaaacttaatccactaatgcaatgccctccaaagatggcatttcataactaccaccacccaatttttgtccaaaagcatttatcactctctaatatactatatattttatttcgttattttctgcccccaacccattcccacggccattagaatataagctgatggagtatagtaattttgcctattttccttactaaagctccagattgaggatgggggagtaaagactgattggaagttcaaagctgaggcttattaattttgacctttactctaggtccaaggtgctttgggtagactattttttgactcccctcatccccacccttaacctccatgtcagtatttaaaagtatttccctttgggctggttggaaatttcccagagaagagtcttccagcctcttgcctggagggtaaggtctgggaaactgtcagattctgggagctgagtgggagacaggtctggagtacctgcatcatgggcattaaaatgcaagcagccgctacacctatgctttccacagagggtaccattccttcacctatgtctggtatctctcactccagagactctattttgccctctctagaagataaacctccagtcttcaaggggctatagcctcagccacccagtgatctggagtggggcaagaggtgagagagtccagaactccagaacataaaagccagtctgcctgccttcctgggagggtaaaggagaaaatcacctttccttatttcattgatgactctgatccaacagtgaactagttccaagtatatttctattttaaattattaatctacaccctgtcacattagctaacgccaatgaaacccagggaagctcattgctttatgatccattaaaagaaaagagctccacctgccttcataaacatttgttctctttttgatgtgctttttagggcatactaaataagaggcccatgataagacattaaatgttaagctaagcattgacctaaagtctgaatctgggttcccaatgtggggagaagagtttgggtttaaatgtttgacatattacacttgtacaacattcttgtagcactttgacaagtatactaattatatttctgatggcattatgaaaaatttgtattatctgtgtttaaggaaatatttgtgaatttgaggagggtagctcattctccccacccccataacccaggtttccaaaccttctctgaggaggtcagaggaattagaaaagaaacctagggctgggcacagagctcacacctgtaatcccagcattttgggaaactaagatgggcagattgcttgagcccagaagttcaagaccagcctgggcaataaggcaaaactccatctttacaaaaaatacaaaaattagctgggcatggtggtgagtgcctgtagacccagctattcaggaaggctgaggcggaaggatcacctgagcccacggaggtcaaagctacattgagccatgatcatgccactgcactccagcctgggtgacagaaaccttgtctcaaaaaaataaaaataaaaaagaaacccatttacttgacaatttgcctggggatgtttctgcacagcctcaacctttgctcagccctggtcctaagatctcttttgaagaggtcccatctgaactaaaagtctactcaagtctttcactacttaaggtccaggacttcagctaaggacacctgttatgaggtgaaagtattcatagcttcaactgaaaaaagttctaagtctttcggagaagctcttaaataccagtagatattaatgttgctctgtttcctatcacagtgacagtctacatgacgctgcaccttactgcaccaccccgtactcacccagggaagcagcagaagtcagaatattagtcattagcttcagcagacttattattaacttttctacatggcctttcagactcaggagcaaatttatgtccaagttagctcagttcaagacatagaagcaaaaagctgattatttgtcctgtcttctctttctatctatgcttccaacttctgctagtccccttcaacagtctggctgataatggttaggccccattcatcaactcaaatattaagatatggctgttcacttacctaagtctataatatgctccatatggatctctggcttcagacatcccctctctttcttcttcatccttctactccaaatgaactacaccttctcttcttattaatatttaggacaggagctgtcttatgtaggataggccttacttatttcctttacacaaggcaagcagaagcctcacatatgactgaagtcacatgtatttctgattaaagaaaatgaggtaaagggaaaaggaagcaaaggaactcacaggaacactggagttccataacaccgcatattcagtatgtttatgaaaagtttatggactccattaactctagcatatgtatacaaagatttcatttgatgaacttcattgatccatgaagtcatatcagcaagaaaactgtccttcaagatcaattccttctttgctggaccttccactaattctcctggttccaagctaccaagttgcaaatgagttgcaatgacaagtgaagatcactatttagccagcatttgcagatggggattctggaactctcagatagatgaagacacccttctgaaataatggtcgattatttacttaatgctggtttaacttgcttttttaacctggcagccaaaacacagtctgctgttggtaacaatggagaaattttattcagtagaattccttttagagagagcactgcacttgtttcaaattaatgtcttgataagacattttgggagtacttttaaaaagcctaacaacccaagtgtccatcaatggatgaatggataaacaaaatgtggtgaagggaaccagaatatgacaccccaaaatatgccactttggcataagaattattttgagctgaagacaatcaagaaacagcagacagaaaacaaaaaacaaacaaacaaacaaacaaaaactctctgccctccccctatctggctaaaagcaggacatgactttccatttttaatggaaaaaccaaagtctgcaaaacagtttaaagagatttttcagagccaacatgaagggccatgacctggagaaaaacaaccttaagtggtcttgagaaagtgcgctcatggccaggcacagtggctcacacctgtaatctcagcactttgggaggccaaagcaggtggatcacttgaggtgaggagttcaagaccagcctggcaaacatggtgaaacactgtctatactaaaaatgcaaaaattagttgggcatggtggtgggcacctgtagtcccagctactcgggaggctgaggcatgagaatcacttgaaccccggaggtagaggctgcagtgagccgagatcattccacagcactccagcctgggcaacagagggagactatgtcaaaaaaaaaaaaaaaaaaaatcagagaaagtgtgtccaaagcagtcgggttatagtttggttgtatacatttcaaggagataggaattacagctaaagacataaatcactttatggaagacaatatcggttcagcccaaaaaggcaggacatcctgaggtggggagaagagcacttacaagtcataggtgggttttggggattctttagttggaaattggttgaaaaaattaagctttgtctaaagatttgaagtcggtagaaaggaatgtttaagttaaggaggttcattacccaatacactgggtcagagtgacctgtagggatgtgacttaacccttgtctggcatggtcataggtcctgtttacaatttggtatcttactgtcacaaagagtctgttttgtcagtcttatgatctctattttaacattaatactggtcagttgtgcctaaactccagaagggagggagtataaaaaagtgtgttcaacctcacttgctgtcatggttggaaattcagttcttaaggttttttgtgtctccatggccaagaaggatctgttcagtcagtgtgggcttaggattttatttttaggttatgcgtttataaaggtgtcctctcccttgccaaggaagagaacaactcttaatgcaatcacctgatggatttggtctaccctctgcacagacaaatccaatttactgagattgtggtattgcagtaaagaaagagtttaattaacactaggctggccacatggaagatggagttattactcaaatcagtcttcctgaaggcttggaggttagggtttcttaaggataccttggtgggtaggggactagggaatacgtgttgctgactgactgaggatacaatcatagggttgtggaagatggtcctcatgcactgagtctgcctctgggtgggggccatgggaccggctgagtcatgagtcagtagcgtcggtcagtggccaaaatgcaaaagtctgaaaaacatctcaaaagatcaatcttaagttctacaatcataatgttatctataggagcaataggggaagtcacaaatcttgtgacctctggccacatgactcctgagtagtaagggattatagaaactatattttagcagaatttaggccactcccatagttctaatcttgcggtctttcatcagttttacaaaggtggtttcagctcctgaacaaggaggggatcagttttagggagggattgtcatccttgcttccacattaaactagaaactaaatcccttccatggttagcttcctatgcccaggaatgcgtgaagacagccagtctgtgaggctagaagcaagatggagttggtcatgttagactcctcttgctgtcataatcttcgcaaaggtggtttcattaatcatcggggctcttcatcactggagatgactctagattcttttcagcccaaagacctggagaggaatgtatataacaaaccttactaaaccacccttttcttctatttatttccctatatatttccttcccacaagttaccaccattaggaatcccccttttcctttgtcttgtcaatctctgcaatgtatcaaatgtatcactgtttgtcaaaatgctgtgtcacctcttaggtctaactgcttctctgccccttcacttttctaggaaggcccctgtatatatacatgataaacctttcctcctgctaatctgtcttttgtcagtctaatttgcagggccccagatactgaacctaagaaggtaaaggaaaacatttttttcttcccccacagtggtatatgcataccatgaactattattacttagcatttcaaaggatggaaattctgacatatgctatactatgcatgaaccttgtggacattatgctaagtgaaataagccagttacaataagatgaatactataaaattccactggtgggagtgtctaaaatagtcaaatttatagggacagaaagtagaatggtggttgtcaggcactagggggatggggaaatgagaagttgtgtaatagccatagaagttcagttttgcaaggcgagaatgttctggagattagttatctaggggccaagggaaaagttccccttctccctatgaagtttcactgaaaaatcaactcacaaaaggcagactagtaggagaaataacatacaaatgcatttaatgtgtacatgggaaccttcagaatgaagacagaggaaagtgcacatttttatgcttaggttcaaaaagtatgtagagctgtttagaaatatgactggacaaaagggtatgatgtaactttaacagatggagtgaggaaacccagcaaggcctgtctgtctagattcttcttggcctctctgagcagcatttcttccttctgcgtatgggacaggaccctttctggaatgggggtcttatgacctacaatcaaacaaggtaggtccgatcatttccttatgaccagtttttatacagaatgtaaaccaaaagtatatgagacaggtcccgatcaatgtagaaagtttactttgccaaggttaaggacacacccatgacacagcctcaagaggccctgcctatgtgcctaaggtggtcaggccacgactttgttttatacattttagggaaacatgagacatcaatcaatacatgtaagatgtacattggtttggtccagaaaggtgggaccactcaaagtggggacttccaggtcacagggagatttaaagattttctgatttgcaattggttgaaagagttattatcaatagaaaggaatgtctgggttatgataaaggattgtggagacgaaggttttatcgtgcaggttaagccttcagagagaacagattgtaaatgtttcttatcagacttaaggagtctgttctatcaacaattctaaaaggaagagggtacaatgaggcatgtctggctcccccttcccatcatggcctgagcttgtttttcaggttaactttgggatgcccttgccaagaggaggagtctgttcagatggttggagtacttagaattttatttttggtttacaagaaaggcggatgaaaagtttgataatatttttaggttttatagctggctttcgggaaaaggggttctggtttctaggacccacgtggggaagagggattctagtttctatggctgccctcggggaagagtgggactgagagacaggaggcgagcaggagaaggtcagagaaaaccttttgcttctcaggctgcttctgaggccttcattttagggtgttgttttccatgtcccaacagtgacacaacagtgtgaatgtacttaaaactactgaactgtaggtttaaaaatggttatgatggtaaattttgtgttatgtgtgtattatcacacttggttttttttgtttttttttttgagatggagtctcgctctgtcgcccaggctggagtgcagtggcgctatcttggctcactgcaagctccgcctcccaggttcacgccattctcctgcctcagcctcctgagtagctgagactacaggcgcccaccaccgtgcccggctaattttttgtattttcagtggagacagggtttcaccgcgttagccaggatggtctcgacctgctgacctcgtgatccgcccgccttggcctcccaaagtgctgggattacagacatgagccaccgcgcccggccattattaccacaattttttaaaacctattttaaaaagaccacgaaacactttaaacattaaaaataatcaaatatttttttaattgcttatttaaatagacttatgatggcttttcaacctacacagttgttgagttttttgttgttgtttgtttgtctgtttgtttatttagtagagatgggggttcaccctgttggccaggctggtctcgaactcctgacctcaagtgatccacctgcctctgcctcccaaagtgctgggattacaagtgcgagccaccatgcctggctcattcaacttatacagttgtttttaaaataaaaaatacataagccaggcacagtgttgcacacctgtagtcctgattactcagaggttgaggtgggaagattgcttgagcccaggagttcaaggtcaacctgggcaacatggtgaaacctcttctctaaaataaaatatatgtaataaaaaatttaggctgggcactgtgtcttgcatctgtaatcccagcactctgggagacccaaggcaggtggaccactcgagcccaggagttcaagaccagcctgggcaacatggcaaaactccatctttacaaaaaacacaaaattagccaggcatgggggcatgtgcctgcagtcccagctacttgggaggctaaggcaggaggatcgcttgagctcactggaggttgcagtgagctgagatcacaccactgcactccagcctgggtgacagagcaagactctgtctcaaaaaaaaatttttttaagactataggtattttcattatttttctcatgactcttctcatccttctgatatttgtacctcaatcctcagaccactgtccctgtctattctatttgggtaacaaccagtaagtggacatttacaaatttcctagtttttactggggatgacagtccccaatgctaagttgcatcgccttttacctgcctgactggtatactaaaaaatcaactctcagttgttataggtaatcatcatgattaatagaaaatatgttactcttttcacctgttctgcagataggacaaagtaggtgcagaatcgttaattcacctgaacaagtcatagcaaaggtctcaaatgagggcttgtgcagggtcagctttctgggcttgagacctgtacagtcacataggttgccacatttagaggagctccatgcttgtttgatgttctctgttatcatcttgacatttttaatatatatatattttaacaaaaggccccatatttcctttttgcactgggccctgcgaattatcttgctggtccaggacttaggtcactgatctcaaaatatgatgttctagactcagcagtgggaagggtcgtacaagcaaagaagcattatcccttttattcaagattcagcgtagctattttatacacaatggtcatactgattttgctgtagagcactgcaatactaacactagaatccaccatttaaaagggaagctagagccctcaatagttacatccacgtttcagagagaaatccccacaaagacggatataattttctcataaatatttacaagttttaaatagttggatgttagtcaccccatttatcttggtgtttccttgtgaatgaagcccatccaacgtcgacatcgtattgagaaaaatctgtgaagctaatgaagaaagaagaatcaagagtgccaaaaataaatgtttccatcctgagccaaagaatgaatcacttgtgcattcatatgttatagaaaatgtgattccttttttccagttttacaaggccaacacctatcagcaacacaaattctgacttttactgacttagactaggtctcaaaagccataaaaaggccgttcatggaaatgaacaaagaatgtatttgtatctttatctgagaagtcatgccagaatccctttcaaatcagcagggtaacatttggttttacatttgtatgttttagtgagttttataaaccctgaagctaaccgatttttcttgtaaagtagagaagtaaactgattttgggagagacgcctggggatatagcagagctgaaatgtttgtgccttgtttattaaacatgatcatcctcaccagaaattaccatagcatcaggtttcccagaaggttctgagggccagagtttgtgcttcacttcttccttattcctaaggcaactaacacgatgctagcatgtgagaagcacccagcaaaccctctcttcaccctctctccaattttggcctctcgtgggaaaaccccctccttgcccatgatgtttcacccacatctgtcttgactgggcaatgcccccatgcagccaacttttcatattctctctttcacactttcattataatgtatttgtccttggtccaactgcctttgatttctaagataaaaatgatttgaaaactaactcagtcttaagttttgaagaattaacagcgtagtacaagacctctgttctcctttaggtaatttttttttttacaataacaatgatattttaaggcagtggccactggaattaatctaaaagttgaaatgtcttattaggcaatggggattttgaaacacttctgagtctcatcatttaggttgcagtctatggataggactggctctttctaaaagatattcattcattcatttaatcatcaaacatatcctgaagacttactctgtgccagggactgctgtgggtgctgggatgcaacactgaacgggatgaccaggaccctattctcatggcattcacattctgaggtggcaggaatgtataaataaggagaaaatatgtaataatagtaaatggtatgacgaagataagacagagatgtgcaaggaaatgacagctggggtgcaggaactgggggctacatctaagtggtcaaaggtctctcaaagaggatggcattgaagttgaaacccgaataagaaggaaccagacatgggacgacttaggagaagaatgtgtctggcacagggcagagcttgtgcaaaggcccttgggtgagaggcagatctgtgtgttcagggcacgtgtggctataacatagtgttaccaagggatgagaggcaggcggggatagttcatatagggtctcagaggccaggaaggaagaggctttgggtttgattctgagtgtgactagaagcccctggagtgaaaagaacatgttctgattatgttttaaaacacccctctggcatttgagctataactagactacaggtgccagagaggaagcagggaggggattaggagagaaacgatggtatctcggaccaagatggcagcagtggaggtgtcacaaacagcattaggaggtatcttggtgatggagttaacagaacttcctgatgtattgcattggttggggtgggtggagagtcaaagactcctggggttttggtttgagtaacagtgtaaggtggtttcatttcctgcgacagaaaagctgggggtggaggggactgagtggaaggggtttgaggggaaaattaaaaaaggcatttaaaaatcccctttttaagtcaggaaacaacagaagctggagaggatgtgaagaaataggaatgcttttatactgttggtgggagtgtaaattagttcaaccattgtgaaagacagtgtggcaattcctcaaggatctagaactagaagtaccatttgacccagccatcccattactgggtatatatccaaaggattataagtcatgctactataaagacacatgcacacatatgtttattgcggcactattcacaatagcaaagacttggaaccaacccaaatgtccatcaataatagactggattaagaaaatgtggcacatgtataccatggaatactttgcagccataaaaaaggatgagtttttgtcctttgcagggacatggatgaagctggaaactatcattctcagcaaactatcacaaggacagaaaaccaaacaccacatgttctcactcataggtgggaactgaacaatgagaacacttggacacagggcggggaacatcacacactggggcctgtcagggggtgggtggctgggggagggacagcattaggagaaatacctaatgtaaatgatgagttgatgggtgcagcaaaccaacatggcacatatatacctatgtaacaaacctgcacattgtgcacatgtaccctagaacttaaagtataataataataataataatcccctttttagtatctaacatccaattaaaagaggagtcatggctcaatcctcaagaaagaaacatgattatatggagtctttgccttatgtggacacagtatgcattttggaaggaaaagtcagtcttctgggaaagtgtggaaaatccaaattggacagaactcattgaaaaaggcaagatttcagtcactggagctgtatttctcaactgcattttggaaacttttgccagcacattcttaagacagggagctcagaagggaatttgaatcatggagatgctactaaaggaacagtatggtgcccccttagctgaataaagaatcaccagagagctgtgtccatgaccactttttttttttttttctgagaatcactgcttggtcacagcacatcacagacaccatttctggaatacaggtttgaggataccatgtcagcagcttcaagaagagaccttcttgccaggacacaaaatgatgctctcctctgggaacctgctttgaatagtgggattcaaggacatgagaccttcttgctggatttttatgatacaatctctacgattttacaaataaaggaataaaacccagataagatgatgtctacccttcctcggggtggtctgctgattgtctggtgatggcgtcagggcagccaaagacaggataaaggccgaggagggtgtttgtgcccttatgttattagcaccattgttcataggacttgtgagaggattctggaaccaataaaggggtagaaacagtacctgattcataggtgaactggaacaaacaggaatttaccagacctgtgttgaagctaagccatatttatcgcaatgtttaagattctcagaaatcacattttatgtctatccataagtaaaatggaactgccattaatagagcttttacaacgtaacatgtgaactgtgatttggtgctctgaaaaaacacggaagagtgggaaggaaggttctaaccttggctcctgataacttgttctatgtgtggagcaaatcattaacctgtctgttttttactgggcaaatggggataatcaagcacaggtccttcggccaatgggttgtgatgattaaacaaggtaattttgtgcaaggagtccaggttttggagtcagacagacctaggtttgaatccaagtgctggtgatggcagcagtggcctgtgtggagtggctgctgccatgatgccagctgtagtgggggaggcgtggctggggcagcaggctccatggagccagtgggagccgggaacagacccttccaagttggcgggatgggatccctgccctcctgggtgcagctgcagctgcccagccctggctacagaccctggcatccctgcactcttggggcccaggaattccccctgcccctgcagactcagaggtgactgctcccactgtctaacctctccctgctcctggcacctgctccgattttggagcaaactgtggccaaacctgggtgctgacatgacttggccaagtgtgcatgctctgaggcactgacatgccagcaccctgccacctaggacccctccacactttgggcactgacgagcatggaaagcagtgtaggcctgcaggagccccttagcaggaacagcctgggcactgtgggtgccgtggagggcaggttgatggtggcaggaggcagacaggctcctgggtggaaaggggcaggtactcagtgaagccccacctccaagctggggacggcctgaagcctgggggctcggctttcagttctgcagactggaatgagaacttatggtgctttttcttggacacccatggccacccatggaccaatccatacacactttctcccctctaaagcctgtataaaccccagactcagccagactcaggcagacatgggatgacctgcctgaggataggagctacctgctctgggtctcctctcagctgagggctgcacagacctcaggacaacctgtctgcggataggagctacccactttgggcctcctcaagaactgttctgctgctcagtgaagctcctctctcccttgctcatcctccagttgtttgagtacctcattctttctggatgcagcacaagaactcaggacccaccaagtggcaggactaaaagaggtataaattaaacagggctgaaacatgcccccccacccccacacacactcaccatgttgtaagcaacaagaagaagagaagagctgcggccctttggggagcacagacctgggggctcctgaacccagggctgtgacacccacggttctgtggtcctggcatttctaagcttccattgactggacttctactacgcaccaggcagcatgctgagtactttgttttacaaatttttttaaatgagcttcgtaaagatttaaaattatatccacaatcactaagcgagtaggtgtcagtgtcctgggatccttaggggtgtcacttttccagctggaagcctctgtggctggcggcacctttgcctgagttttactcgggcctcctgggctcgttctgcccactcggcccagcaggctgtgctcagcttgtgctactggcccggattccacacctgccaaacatgagccagatgtggagcagcaaggggtgtgtgggcaagcaagcgcaggatccagccactgcacacagccaggcatgcaggctgctactgcagggcaggcagctccaggcaccagcacaggtgctggctccatgtgaggctgtggctggaccagacgtactgcacatggcttctgctgcagacacctgtgtctggatgaggggacttttcatctgtacttttcaactgtaatgtaaggtggtattactgtttgaaaattagatggcagtagtttgcatttctcatgatcagaagccaagatataaacacacactacctaagaaagctaaaaaaaaattgcttttttaaaatgttgagtttgagaggcctattaaacatccaagtagaaatgtcaagtgagcattgagatatgtcaatctggggcacagaggagaggtcagggatgaaaattgaaatcaggggtcactggcacatagatgggagttaaagccaaggggctggatgagattatctaaggagaggggtacacagagaaggcaaagagccaagaaggccctcacttggggaaggagagaagtcagcaaaggagcctgagagagataaaaatccagactgtgtgtgtctcagaagccaagagagggtagtgcttcaaggagagggagtgtaaactatgcccagtactgatgagaggctgccgcagaggcagacaaaatacgtgctccttggaggtctttggcaacctttatagggcagtttcagagagatgggaacagagtgaggggactgaaggaatgtatgtcatacgcttccaggttgggcaatacccccaaagccatgctagactagcagtatatgatgttcttaaaagtttttatttatttttctaaatgatgtggcacagagaaaatacacaacaaaaacatttcatgacatttctatcaccacctacaaagctggtaaatcttgaaatgccatgaaggagctcctaaattaaccagcatgaataactttatggggtggctctccaagacatcatgaaggaataactaataaaagcaattgtaaaaaaagcctaacaaaaatagaaaatctggctgggaataactcacgcctgatggatttctatgttgtaatgctgacaaagccaccataaacacacagcaacgacttctgtggtgaaggcattgatattataacccatcccacaactagcaaaacatttgtctagaattgtgacagacttttatttcacttgtcacaaagtgcaactggaatcatatcatgttccatttgattcaacgaatatttttattgagcagatagtaaacagaagaggctgtgcctgccactgaaggagacacacagatgagtcacaagtagcccttgtcaccaacaagaactctctctgcctccaggctgcaccaccatcagggcagggactgagcttgtctggattgccactgttacatagcacctgggcagagaaggcactcatggggcaatgtttgtgaatgaataaatgaattcaaaacagagaatgataagtatatcaagtacatagtaggtattttgtaaattatggaataaacatcttagaagatgttacaaaataaggaaaaaataaatacagggatataggactgtcagaaaagattattgaagagattgtggcttctgaaataggccctgaaagctagatagaattccaacagaagagtcaggaggaagaatattccatgcacggaaatatgaaagaactgctgctgtaagatttttaaccacaaaaggaaatccttgggttcttccattcctgcttaaaaaaaaaaagagagagaaaaaacatacctgctgaaggaggctcaccgttaccggggcacgtgaagtgtactaccttgagctcctttctaatatcgagccaagtattccgtaggagcaatgggtatgaatgtcccgtgctggctcccacagttataacttacatggaaggctgttctctgtgaaccagtacctgccttcctggcctgacattaccttcttgggaaacagtgattttggttaggtcacctgtaaattttggatgaaaatatcctaccattcacccttagccagaatcacacagataggccagggtgtaacataggcaacagagctcaagcctcatgttctccagatccacctgtaggcacaggggagggatacatggttggccacaaagggtttctctttctacttacttctgtgaagaaactcaggcgggcatcaaagacatctgcagaaccaatcaacaaaatgaaacctccatggaatcatgccctgtcctccatcttcccaacaatttggagaagacagagatcctgtgggaggcatgaaaagattataaataagacatacaaggggaaagtctctatctcttctctctttagctggtgctgtacctcagaaatgtcccagataggtgctgggatgaggggagggaggtgggcagagccagcttcataggtgtggggcctgcccgatcactcagagccctctgcttagaagggtcccatgcttttagtgcactgctgtccccatcttgaaatttttaataatttcattttgcactgggtcccacagatcatgtagcccgtcctggagatggggggctggcaagacatagccttcagagaaaagaaagttcaggctagactctcacctgggctttaaacttctctttctctggccaagtactctcaatgccagaacaaagtaacctcatactggctaacctgggtctaagggaagagcagggaccagctctccccagtggaggcatttccttgaaggcccatattttatcctaagcaaaaacccaaaacatatttgcattctgttctatgaaatatctattagatacatttttaaaataagataggctttccctcaaaaaagcaatctttaagtagcattgatgcttcaagaggatatacccttattatcacttggatatgaagtccttctggcccccagataatctcaaatgccatagcacaacatggcatagcacaacatgtcccggagaggagagaggaaactccaattcagcaaaaacccacacacggattgcagcttcctccctcccctcacatggtttcccatggccttcactggcacattgtgtaactgatggcatctggctccttcctttctgccctttgtccttttcctcttcttaggaagtcatgtttacttgctagaacactgccctaaaatagccttatatttccattcccagtccagggtgtgctcacagccagtctaggttattccatgaggcccccgggctcctggttgctctgctccctgggctctggcacctcccagtttccatgcctcctccctgctctggacatacgacccactcgctggtggtgggggctggcacggccagcacttggcatctgcaatatgaaccctaacgatgatgagaacctccaggctttcccttgcctatcagctttgcacacataataccctcttcctaaaatgacagaagattcccatctgtccctggggctcagtgtagatgccacttcctctgggaatccttccttgacatactcctctcccctactcaccaccaagatgaagctagtcctcccatcctactccttcttttccttgtaggaatacttaccacactgtacttaccacactctagttaacttgcctgtatccccagctaaaccctaagcatgatcaggtcagggatatgcttgccttgttcttcaatgtattcccaaaacctgaaagcctcaaaaacattgttgaatgctgttgaagtttgagcattgttaagtgatttttatttattatatcacaacaatcctaaaaggaaaggattagtgttctcatttaacacttgaggaaagtaaggctcggagaggttgagtgagtttcctaagatcacacagttgtaagtggtacagccaggctgtcagactttaaagtccatatgtttcattccatgttccaaaattcaatcagagaagcagaaccactaggagtgatatagactaatggatttgttttaaggattggaccttatgcaattgtgggagatcattaaaagctctatgctatggcttctgcacccggtgcttgggtctgcagtctgcagggaaggtagttggcaaggaaagatggacatgaagttggagaaggtaaagacaaactggagcctgtggggaagagctgggcctccagacagactggaacccatgatggtatctccctacctccaggcctaccacttccacgtgaggatcactttgaagaacagcggcaccttagtcaggagtaaatacacacctggcctgggggtcgcggaagctgaaggagcaatctggcaggctctataagggctggtggacccagctgctgcctcatgcctgtcaggtgagccagcagagaagcaacaatgtatgtgagctacagtggctctaatgccctggactgaccttctgagcataaaaagaataggcacttaactcccaccttccaaatcttggacaaagcttctgctgtggcccaatcaatccacaaccatgctgggaaaaaaattcagggaaacccagttccagtttagctaaattgatacaatataaatctatttccctttctctcctacttgctttactgttacaaattacaaaataagatttccatttcctgaaacccaagatttataacactaatatataacataatgtagtatattaattatttcctacctttttcaataccctgttggcgcgcattgggcgaatgaagatataccttagtggtatatcttcttgaagcatcaatgctactttatattaattatttaccacctttcaaaacctttttctacacagcagttattcaccttcttttagaacatgcaccttaatttccctctgaggaaccagccctgcctccactcttagtcaatatggtttaggtgtagctgtctgccccctcactccaggcatgagcacgtgaacaaggcccaagcacactgcatcctctggcctcagaggatggctcaggcacaggtgcataatcttcattcgcccaatgcaagccaacaagacctagctgaagctttgatttgacttaaagggaagcagactcttccaggtcttgacctggagatgagaggctgtctgagaatggagcaaacacagtgaatgcaacactgattatgaaatgagagaaaccaggtctgggtgccatcatttgagtccctgggcatgtcgttctgaagccagcctcacctgcaattttccattgctgtacctcaactgtgttcgcttgcttgtgcaccacaagcatgatccataattcaacaacctaatacaccttctttgaaaacctactgcacaacctccattgataatagcaacatttactgaatgccagacacattgttgagtgctttatgtgaacaatctcatttaaccctctcaaactccttatgaggtaggtgctatcaattatccacatttctaaagaagaaactgaagcttacaggagttaatgccaggaagaggatgaaggtggtaagtggtgaattcctaattacaactttaaacaccaaaccacagtcacgttggcactcagaatttgaatccttatctactgggctccagaatctgtactttttaatttatttacttatttctgagacagggttttgctccgttgcttagactaaagtgctgtggtacaatcacggcttactgcagccttgacctcccgggctcaagcgatcctcttgcctcagccccctgagtagctgggaccacaggtgtgcgccaccatgcccaactaatttttgtattttttgtacagatgagctttcgccatgttggctaggctggtattgaacttctagactcaagtgatccacccacctcagcctcccaaagtgctaggattacaggtgtgagcccagaatctgtacttctaacaacaaaaatagtttctaatacatacaaaatacttgataggcctgatggaggataaaggaattaataaagtatattttgtgtcctccgggagcttaccatttagtggaggaaatatgtattcccacaaataactgtggggcaccaagttatgagtacttttacctccactccaatctgccactggctactgagcaatggtccaaggttagagcatcatatttagccatagtatacattggcatgcttactgggttgtgtggcagcaataaatggcaactgaaccaaaagatgcaggagtctagcaagactttttacttctggagcaatttcaggcttccaaatccttactgaattacccttaattgcaatttctcgtattactgagatgatgagagtctaatcattgagactatttcctcctaactttgttgctatatgcaggcaaccaagcttcattctgactgggggttacgctaacttggattttaaaacccaattctgcagttcaagagagatgataaatggagtagagggacctcctccctaccctccccccaaaacccccaaagccttcccaactccctatatactctaaaagacagacactagaaactaaacaacacataatctgatgggctgatcaataatgcattggttttattacctgaatattttggggttactttttcatgtcagtctctcatgtcaaaaattctcatttccctaatgcctaccccctcaggccctcatctctcttccatcttcctcacgaatgataatttaaggtcataaaacagatagcttcacactttcaatataaactccaaaaaataaattgttagcggtatttatctgacccctatattctagctattatagtcagataataaaatccagggtgctcgagggaacagatcaaggggacagttagaaaacttaagcttcagtgtttctgttgactctagaaaggcaaaactaaaataactcatctgtagcctgaatatcattcccaataggagttagataaaagcctatcttggcaaagctcaaagtccttaaagtttgggtcttatttgtttgtttgttagactattttggatcttgagagtttgctttgggatggggaacagctattagagctgtttggcgagtggggatgctagaaatgggttgaaattatgacattagtataaatttttataaaaatctaatttctagactgggcaacatagcaagaccttgtctctactaaaataaaaaaaaattttaaaaaagctggccatggtggcacacacctgtagtcccagctacttcgggggctgaggcagtaggagcccttaagcctgggaagtcaaggttgcagtcagccctgattgtgcaactgcattccagcctgggcaacagaacaagaccctgtctcaaaaaaaataataataaataaaattagtcattatataaaaattctttcttttctttttttttttttgagacagagtcttactctgttgcccaggctggagtgcaatggcgcgatctcagctcactgcaagctccgcctcccaggttcaagtgattcttctgcctcagcctcctgagtagctgggattacaggtgcatgccaccatgcctggctatttttcatatttttagtagagatatggttttgccatgttggccaggctggtcttgaactcctgatttcaggtgatctatgtgtcttggcctcccaaagtgctgggattacaggcatgagccattgcacccggcctcaaaattatttctaatgtgtgcaaagatatctgataaaaactacatgactatgtaaaataaaacatactatttcctctgcctggactttctatttcttcacccttcaagttacagcttaaacagatccatcttctggaagcttttttgaactccacttaactccatttcaactcaatgagcaccttctgtgctcttgaatgcaggtttctgatgactttggaggttgtgccactggaatagagggaaaaaacttctaggactttcatggagagcttatgtgttcatgaatattgagcagaacaggagttatttgcatggactgagcaaacagaagaccaaaataatctttttatgattttttgcttaaaacgttgcttattctttgtgtttttcagagtcaagaaaacttttttatttggagctatttacagcttttaacaactgagtaaaatacactccagtgagcaaattttggagcgcatttctttctctctaccttatttctctgtaatttggaaactatgtctacgtatacttaatttatggtagtatcgctatttgcataagttcagtaagcatctgttttcttttgtaacaggacactattagagacactagttattttaccaaggctttgactggaatgacatgttttcagacttttcagactgctttgaggaattgaggttgagctacagagctgataaaaattccttggaaaaactggccaccttgtttttacaaggttcccaacctgtggtaagtaaaaatgtccctttctgataggcctaggaatcccaagttattttggtacctctagaaatgaggaattcattcaattcatacaggtatctgcaggcacaaataaatctttggctgggctcaagatgcttttaaaaggtctaatctgagattccttattaaaaaaacatccagcaaagccaattttttaaaaaggcctatatagcaaataattattcatgttatgtttcatgcaaacaattaggcctagtataaataaaaccaaagcttattttgcaaataaattggtcctgctatgatttgtctttggtaaaaatgggggaaaactggagagggaaaaattatgtttcaaaaaaaacctatagcatgcctgttattagattctagccttggctgggcacagtggctcacacctgtaatcccaacattttgagaggccgaggcaggaggatgaatcacttgagcccagaagttcgagaccagcctgggcaacatagggagaccccatctctacaaaaaattatttaaaaattagctgggtgtggtggtgcacacctgtagtcccagctacttggaaggctgagatggcaggatcactttagccctagaggtcgaggcttcagtgagctctgatcatgccactgcactccagcctgggcaacagagtgagacactgtctcaaaaaaaaaaaaaaaaaaaaaaaagaaagaaagaaaagaaaagaaaaaaattctagccttgtccattgtttgtgagcctatactaatgactcacatctgattggttcttggggatatttacctgaatccctcaaggcttcagatcagttctgcaaggactcctgaagctaagactttcacaccttgcattaggtctcttgtagtttactgttctcttaagtgctatactaacgatgtggataagaatactaacgtttttgttataccaacattggggacccaacaaggcacctgggaatacatacagacaactgcaaaatggtttcactcctcttaccttgggggcaacccttgccccaactataccccctgtcaacaggaagagcagttgtcagccttttcccatctccccagctcacacctcaggattgaggtgtgctgaagcacaagggagggaactgaaaccacctttgcaaagattatgacagcaagaaaagtctaacttgactgactccatcttgcttctagtctcacaggctggctgtctttgctaattcctgggggcacaaagagctaaccatgggagggatttagtttatagtttcacttggaagcaaggatgataacagtccctccctaaaactaatctcctccttgcttagagagtgaaaactaatgaaaggccacaagattagggttattggagggacctgaattctgctaaagtataggtatacttttataatcccttactgctcaggagtcatgtggccagaggtcacaagatttgtgacttccccaattgctcttatagataacatcactactgtagaacttaagattggtctcttgagatgtttttcagatttttgtattctggccatcaactgatcctacctggactcatgactcatgactcaactggtcctgtggcccccacccagaggcagactcagctcactgggacagttttccacacccctatgatttttttcccaactaatcagcagtacccattacctagtccccgcccaccaaactatctttaaaaatcctaacgtctgagttctcagaaagactgatttgagtggtaactccagtctttctgctctgctgccttgtcacttctttattgtaatttaaaaaaaaaaaacaaaaaacaaggtgaaggagccaggcatggtgtctcatgcctatcattcctgtattttgggaggctgagctgggcggatgacttgaagccaagagtttgagaccatcctgtgcaacgaagtgaggccccatatctacaaaaaataaattatctgggtgttgtggcatgtgtctgtagtcccaactgctcagaaggctgagatgggaggattgcttaagcccagaagttcaaggcttcagtgagctatgattataccactgcactccagcctgggcaacagagcaagaaactgtctaaaaagaaaaaaagtaagtacgttctgatagtatgtctcataatatcctgtaattttctttctgtaataggcatcaaaatggcaactgagtgactgcttatctctgtatcatctttcccaatacaatatgaactctatcaaagtgaggactatgtttctcttttacaccatggtattcatagtgcttagcatattattagatgttcattaaataattatcaacagaaggaatgaatgaaccaattaatcatgagtcatgaggagacaaaagaatttgtttggctattgtctgagtatatttataatttgactttccagaggtcattgttgaatagatatgatgtatgctgttttcaaaagggtcattgaaaagtaaatgattagatgaacttacaaattattaactatcttcaaacagtctctttgtcactctgctatatatacatttttcccttcttcccacactccccctgcctttctttctgctacaggtacagggtattaacaaagatggcagattctttctcaaatatacagtttttaaaaaaaaaaaaatccagaaatggttttctcgacatttgaaacaaagctagaaaagaaataaatttcagtaagtatattgtttcctaagagacaagagtatgactttcatctgctgttatgtcagattgtttgatatcacacaatccagattaaatgcagctaaataggactgtctttgctttggaaatcggccttattagagccaagaagctttcttgcaaatctataatataaacaaagtatagtaggagaagtaagcattattttgcactcaaagaccatgagtttaagagaaaaagtcactattgtaacaattgctttgtaattgtaaattatcacaaatttatggttgataaaggtctattccactattgcaaatatgttggaaggagctgggatgtggaaataaataagataaatataaacatatactatctgttgtatccctttctgtcttgttcatcttcactagatggtaataataataaaaatgaattcagcttgggacttataaagcatttataacaggccagacactgtttgttctaaactctttgtatatgttaactcatttaatatatgcaaccctgtaaggtcactataatcctctaagatcaataccatgagttagcccagtttacagaaaaggacatgaatgcaccaagaggtgcagtgacttgctcagggcacacagtaagcgacagagctggggtttaagctaagatggtgtggttccacagaccttacttttaataatttactattttagttattacatataatctcttgatgctatattcttcctagaataacacttataaatcagcaagcatgcactgagctctgacctagatgccatgggggaaacaaaaaatgacaccatttgatgcttcactcactctatttggggtgtcttcctgaactgaaattaatttcaaacgtttagatttttcctgacattgtttctcagctgatgtgttagggcatactggagtgtcaaactttgatctgattacattttaattttgcttcaccaacagtagatagaatgtgaagctaagaaggtcatgctgtgcagtacagaatgtggtacaaaccactaggggataagacacaagaagcagaaagtaatattatgccagctccccaagaaagatcacaggtttctttgaacatgtgaaattctttagtggagatttttggctcttgtagaatgtaagctacctaagggcagagatttgttctgtcttgtttacagtcgtattccctaggagcaagtgcagtgcctgacacagagtaaacaataaataattgataaggaaatgaatgaataattaaaaatcagagagtggggcaaagcagaaataggtttactctcacagtgacatagtgccaacaagggacaatagtgtgataacggtgcatgattttatagtcattgctgtgtatttttatattcttcctatggtacgctttttgattatgtagatagcatttttttagtccttttctttctttgtgccatgaaaaattctaggattcagaaatttatcacgaacacaaatgtgtatacaaatcctttctaaatctctcaaaggaatactaatgcatttacagttgcacatccaaaataaaagaactactctgtttggtttttgatagacaacttgcataacaaacagaaaacacagccacaatttctagagaaatgcttattaaaaagacatacagttctaaaaaacaaagtctactaataaaaaaataaaggaacaatttttaaaagatgcacagccaagactacagagtccttgttttaaacagagaatgcttgagttgagacatattctttcaatctctgagtcccactgtttagacatcacccgtggtagtttagggaaaggatcatcttggaccttaacaaaaaccatccagcttttcactaacaattttcttatctctagctataaatagcaatctttcctttctgaagaattgcaaggtcactttccttttttatcaaaaacaaacaaatccggttttgctgggggtactgatctgagttgggggagctactttgaaggaggtaggtttagtactgggggaggtaccaggagatcccagcttaagataaatgcccaaactccctcagatacatgagaagcagcagacaatagaaagaatcattgagcagcattagtataaggcattatattctacttgtgaaatttcaagaaaatgtgtctttaaggcctaggcaggcagatcacttgaggccagaagttcgagaccagcctgggcaacatggtgagactctgtatctacaaaaaatacacaaaaaaatagccatgcgtggtggtacacacctgtagtcccagctacccgggaggctcaggtgggaggattacttaagcctgggaggttaaggctacagtgagctgtgatcacgtcactgcactccagcctgggcaacagagccagaccctgtctcaaaaacaaacaaacaaacaaaaaacaaaataatgtaaaataagttttaccttattgggcgagttatttctgagcgaccatttgatgcttcactcacactatttggggtgacttcctgaactgaaattaatttcaaatgtttagatttttcctgacattgtttctcagctgatgtgttagctttatatacacacacacacacacacacacacacacacacacgtactcagcacatcttcaaattacttctgtagcacaaaaacacacaaattgaccaatggaacagaaataagccagtcacaaaaagacaaatattgcatgattccacttatattaggaatctaaactagtcagacttttagaaagaatgttggtagccaggagcaggagagagagagaaaaggtgggttgttgttcagtgggtatagagtttcagttttgcaaggtttgaaaaagttctagagctctattgcacaacagtgtgcatagagttaacacaactgcactgtacacttagaaacagttaagatggtaattttatatgttttatagcacaataatttaaaaaatataggaaggacatggtctcagaataaagggccatcttttatcataaagaaaaatttgcaacccaattccaacatgttaaggtgttctcttcttgttgtttcattgagaactgctaaaagtctcagtgcccttctcatttggatggtggtcctactcaaacgtttggagaccaaagccccatttggtaataagaaggatgtgttgcctggcctggtgctctgggcatatacacttcaggagaacctttcgtaggtaggggttaaggattggaatctgtcctgacagaacaatgtcttcacacaattaacacatagttcacatactagatgaaaacaaattccaagtggactacaaatataaatctgggggagggagagagggatgaataggtggagcacaggggatcactagggccatgaaattattctgtatgatactgtaatgttggatacatgccattatacatttgtaaaaactcatagcatatgcaatataaactatagatttagttaataataatgtgtcaatattggctcatcaattttaacagatgtgacacgctaacgccaagatgttaataataagggaaactgtgtatgtgggtagggcaggaaaagggtatatgggaaccctatactttctgttcaatttttctgcaaatctcaaactgctctaaaaaaattaattttaaaaaatgagatgaaagaagaaaaatgaaaaaataaaaataccaaagaaataaaaatagaagaaaatataaattaatttataatttaagaataaactttctaagaatatatcaaaaaactatgaatccagaaggaaaagactaatacacaaccagaaaaatgagcaaaagctattaatagactattttttaaaagaagaacaataaatgttcaataagactatgagagaaatgttcagtcacattaatactaaaacttaaaattatgagatttcatttttatctatgaaattggcaaacatttttaaaagagataatagtaatcatgaggagccaaacaggcattttcacatatcaccagtgaggactgtaaattggaatgacctttggtcagaaaaaatttttcaaaacttggaaagcaaaatatgattgcataatttgttttcatgttaggcattgcctaaccagtccatctaaggtgaattgaatcctgactcgttattacagatttgcacattttacaactgtaaattcaaatgttagtttgtagaaaattggtgagatgctatatttttgtccaatggagatataatttctgtcctgcacagatgaaaataattttgctctgtaaagatagcaccaaacattatggtttatcaccctgtaagacattaatcagatttatatctaatttagcaataatgtagaatgattttagtattcttttttatatatttatgtatatatataggatgtatatttacatatgtatattatatatagtatgtatatacataatataaatacaatatgtatataggtatgtgtacacataatacatatactatatgtatatatgtacataatatacataagtatatacatcatatacatatatgatgtctatatgtatagacatcatatacattatgggatgtacatacatatatacataacatatacatatattatgtatatattattatagatatatgtacatatatacatacatatatgtatgtagtaaatgtatatatagatacatatgtgtatacatatatagatgtatgtacatatatctatgtatatacttatagatgtatgtacataatatctatatatatacttacagatatatttatataatatctatatacttacatatatgtactatgtatatttagatatatacacatatttatacatatatgcatatacacatatacatatatatgtatgtacatatataaatagatatacataatatatgtatatacacatatagatatatatgtacacatatagatatacgtgtgtgtgtgtgtgtatacacacatattttctcatgtctttctttgaactggctttgttatcctgctggtttcctcattaataagttaaaattaaaacttgaactgtgcttactctatatttgtatgagaatactttttaacattttttaaattatacatttgacattttataggagtataacttggccaaatattttaagtcttaaaagtgtacatgctttttaacctagcaattacatgtctaagaaatgatcctaaggaggtaaggacatgctcaaaggtttagctctgagaatgtttctagatgtgctgtgtataataaagaaataccagaaacaaatgtgccacattagggcgctggttaatacctaaatgtgtgtgtgtttgtttgattgttttggggtttggggattttttttttttaagacagagtctcattctgtcacccagaatggagtgccatgcgatcatggctcactgcaacctcaaacccctggggtcaagcaatcctcctgccccagcctcctcagtagctgggactaccttgccccatccctaaatgtgttttaagaatggttgtttccaggtaagtaaaatttgtaagtttaaaatttttcttttatcttgttcagattttcttgtgacactttcaaagaaaaaagtttgaaagtcacaaagtctagttatactgttctcattcttgttgacatctattgaggtacttagccccgactatagttattccctctgtcccaattcctgctactatcttagggaaattcagagtccttaaacagaaccaatccaacactctggctttttcattccttaatttcccatttccagtgatctttacctcctcttcacttttgtaattcactctaagatattttgatcctgttttcattcagaattagtcattggtcctctctaacacttttgtgctttttcctctgctttgcttttaaattaaaatgccttcattgtttttccaatttaaaaaagcaatgcatgtttggtggaaaaacttttcagaaaatacagaaagatgtaaaaaagaaaattaaaacattgcaactcgtggatttgcactcagcatgttggtaaccttagaaacacattgctgggaatagtttttttttgtttgctttatctaaatgagatcttactatttattttacttttattatctgcttcttgcctgaacaatttgtctttccaagtgaataaatgcagatctacattgacattattatggctgaaaaacaattaattgtacagctataatattctttaacccagggtgtcttaacttcagcactattgacattttgggctgaataattctttgttgtgggaggctgtgttgtgcactgaaggatatttaatgcctccctgccctctgtatcagcactagatgccagtagctcccatccctagttatgacaatcaaaaatgtctcaagatattgccaaatgtctgctgtgggcactactgcctcaagttgagaaccactgatctaaccaatctgctgttgtttgacatttaggttttatctactttgtcacaatttaaagcagcagcacttatgaagctcctaacatatacaaactcaacacatcttcaaattacttctatagcataaatttctagcaaggaatggcacatataaaattttgatgtctattcccagatttccctccagaaagattgtattaatttagaacaccattgaaacagcataaatgtcatttcctgagatcctgtctacttccaggtattgtcaatctttttaatcttgctttgtgataagcaaaacaaagtattactttacccttttaacttgtaattctttgattgcttaccaggttggtaacctttactatatttattagctatttgtgttactgcttttatgaactgcttattcatctcctttgctcattctttattttgtaagagcattaattccttcttccagcttgtaatttttctcataacctgatttaaacctttcttcttataacctttataaggttttctgtacagaagtcatacatttgtatgttttcaaattattagcctttttattatggttttacctttaatggtgccatacttagaaagatcacctctaggtccaggcctggtggctcacacctgtaatcccagcactctgggaggctgaggcaggcagataatttgaggccaggagttcgagaccatcctggccaacgtggtgaaaccccgtctctactaaaaatacaaaaattagccaggcgtggtggtgggcacctgtaatcccagctactcaggaggctgaggaaggagaattgcttgaacccgggaggtggaggttgcagtgagctaaaattgtgccactgcactccagcctgggcaacagagcaagactctatctcaaaaaaaaagaagaaagaaagaagatcacctctaaaatctctaaacttcagtattttactctattaggctaaccttttattttgctgttatctttcatactcttaacactaaatttttttttctctcttgaccagtgcaccttaaacttgaatgtacatatacatcatctggaaatcttattaaaatgtgtgttctgattcagtaggtttggagtggagtgacagattctacatttccaacaagctcccaggtgatgccagtgctgtccctggcctgcactctgagttactagctcctaaaccttcagcactcagtcctctgtaccccctacctccattctctgactccttcctgaagttgcctcccttcctacctagtgtgaaccccaatggcagcaatttcaactatagctcatctctgtttttccagaacaacaatcctggcaatctccattccagtattgatgaagccaccatttcttccagtctccagccacagcaccctgcaggaaatcagatagtgtccacgtacttctcttaaaaagataggatttctaaggtacatcagcaagccttcactttgttcccacccagttccctttcccattcctagagtaactttgcctaaatttaatcttctcaagctccagtccccctcctcagacctcttagtcaatgaacaacaatgaaagggaaacgtcttcaacccttccagtggaaataacatttagcatagtgactactgcacaattaaaaaaaaaaaaacctactcaaagactctacaatgtcatactaagacttccaactcttaggccaggcaaggtggctcactcatgtaatcccagcactttgggaggctgaggcagaaggatcacttgaggccaggagttcaagactagcctggccaacatggtgaaacctggtctctattaaaaatgcagaagttaggcatgtgtggtgtaaaaatacaaaagttacgtaggtgtggcgatgcgtgcctgtaatcccaggtacgttagaggctgaaacacaagaatcgcttgaacctggaaggcagaggctgcagtgagctgagattgcaccactgcactcaagcctgggcaacagagtgagactgtatctcaaaacaaacaaacaaacaaacaaacaaacaaacaataaaacaacttctctttaagaaaaaaaaaaagatggccaggcacggtggctcacgcctgtaatcccagcgatctgggaggccgaggcaggcagatcgcccgaggtcgggagttccagaccagcctggccaacatggtgaaaccccgtctctactaaaaatacaaaaattagccgggcctggtggcaggtgcctgtaatccgagctactcggtaggctgaggcaggagaattgcttgaacctgagaggaggttgcagtgagccgagatcatgccattgcactccagactgggcaacagaattgagactccatctcaaaaaataaagaaagaaataaaaaattaaaaaaaaaattccaactcttggaaaattccctttaaagagttacgaattaagctggtttatttatgtaataaacgcttcgcacagttcttacaatgtgcctgccaaccttatttaggtaggtacaattaagacttccactttacacaccagaaaataaggcacagagtcgacacagccactgagtgtcagagcaagaattggcactcatcccgtgagcgcctcagttctttttttttctttatatatactttaagttctagggcacatgtgcacaactgtggcacatatacaccacggaatactatgcagccataaaaaaggatgagttcatgtcctttgtacggacatggatgaagctggaaaccatcattctcagcaaactatcgcaagggcagagcgcctcagttcttaaaccactcttctatgctgcggcagaatcactggaagtctcagggagtcctgagtgcgcaattctaggaaaagtatctatatctgtaagaaagaaggggcagggaatctaacggttctcagctcttgaaggcacattagattcattcaaggtcctctctaaaaatacactttcttgggcctccacgagaaaaattctattcaattagtcgtgggcttgcatccgtatttttagtctgtaaaagtggaatgttatctcaaatcagtggttttcaaactttttatattctgcggaccttgacacgggcccccaataccctgacacggttacttacaatccgggagagagtgggagaaagggggagagagggaaggggagagggggaggggagagagagagaatgaatgagaatgaatcttttagagaggtagagggggttggcccgtgccacaaaccacctctcaggtttgagtgaagccttcgttctctctcgtgcagagaccatgccatccttccagaaaggagcattttaggacgttttaggacgagagacctgtaattggcctaagactcaggtgcaggtggaggaagcatcggatttacaacagtggtcctgccttcttcgatgtgacttccagttttaaattcaattctaatttacacaaatcccacccactatgtaaacttgttggaaaatgtcctgcactctgcacttcgtggcatttaaaacttccacacacgcgcgcgttctttctcgaagccccgtgattgcttagcctcgctgggcagcttggcactgctgggagcttggctcgccctgccggggccgacgccgcccgtcccgcaggagcccgcgcggggctcagggcactcaggactccgcatgcgtcccggctccaggtgggccccggcaccgccaaccgcaggaaacccgccgagccctaaacgtctcccaagcggctgcagtctgcgacagagagtgtccctcggtggagcgccctgtggctgcccaggctacagccgtggccgaggcgaggacacacttctgacctggggctccagcaaagactgtccgcgagcggcgactccatgcccgcagccctccgcccagctcagccgcccggccgcgggcaccagcagccgcgccacgaaagggcgcaccgcgcgggcgccgtctctcctaggtgcgaaggcggctgaggccccgcccgggaggcacccgcgcggctccggagtgggccggagggacgtccgggggcggggcccgggcgcgcccgccctctgaccgggctataacacccggccccgccgggcggccgcgggtgggtagaggtgcgcgcctgggacctggtgaggctgggggtgcgcggggccgggcgcagctgtggcagctgccggacggcggaggcgccaggaggaggaggagagggaggcgcgggcggctgggtcgagggcaccgaggctgcccgtgctcccggtctctggttgcacggctcactcccgaaggtgttgcttccagcttttgcctccttaggaggcagggagcgtcagtgtcgggagaccctgagaccggagtaccgagacgtagctggtgatgcccccgcctgccctcatgtgttctcaggttcttcttatttttattcatctctagaacatggacttcccgtgcctctggctagggctgttgctgcctttggtagctgcgctggatttcaactaccaccgccaggaagggatggaagcgtttttgaagactgttgcccaaaactacagttctgtcactcacttacacagtattgggaaatctgtgaaaggtagggtccgtctcgtgaacactttgccaaaccctcagtcctccctttcagtattcattaaatatgccccagcttcctgtctgctcttccacgcacctactctgagtggcacagaacaagtcaaccggtaccgtgcgtgttggttgttttctgcttttgttgggaggaatagtaggaagaactgaattttactggacttgtccattgtaattcagtgtcactgagtcctttccattattggagttcttctgtctttttggatcttgcagacattggttatttgggatgtatgttttagttccttttcaagataaactcccaagtaagtccgtttatccgtttcagttcccctttgtgtgggcttctttatatatgacttggactgttaatgtcatttcttcatgtctcttttaaactgaaataatgcagttttgttggtaagatttctgtgtcatctgtagttagccttttatttaaagttatgcaaaactatcatttctgcaagtttcttttaatctaagtagtacagttctgttggttagatttgtgtcgtgtataattagccctatggcttaaagttatgcaaaaaagtggttctatgattaaaggctgtttttaaaatgtatccatttgaagaagacaatgctagataatgaatatatattagtagtgattgaaactcttcccagcattttcatatttatcattaataatttattgttctaagttagaaactacataaagttattttcatttttatagacagcaagtttgaatcagataaattaaataatttgttcaaggtctcccagatggtgaattttatagccaggactggcacccatccggccaaggcaaataatttgatcagatatcgttatttcatctttctttctttctttctttctttcttttttttttttttttttttttggtcagagtctcgctctgttgcccaggctggagtgcagtggcgtgatctcggctcactgcaacctccggcttcctgagttcaagcaattctcctgcctcagtctcccgagtagctgggattacaggaatgcgccaccacagctggctaatttttttgtatttttagtagagatggggtttcaccatattggccaggctggtctcaaactcctgaccttgtgatcctcctgcttcggcctcccaaagtgctaggattacaggtatgagccaccgtgcccggccgagataccattattacttaatcatcttttattatcctgatgttcccaaagaggttaccagaaaacttagtccttaaatcaaaagtttcataaattttatgcaatttggatctcaactttttgtaaggtgtgttcaaactctaccttgattttagctctgaacttttgagtcaattgagagtctcataattaccatattcttcatcatttttcaaaaaaatcaaggctatggcttctatattaaagaaaaagtattatataaatgtatttatgtgcaatgcgaagtcaatatcctgggctgtgtgtaatagtaactttgtttttaaacagcattgccaaagagatggtgccagaattactctatattgctctataatccaaaattatagaggttgggtgtgtgagaaatcatatcttgaatcagcatacgtattcagccttctgaaatcatttttccctagggctagagtagagcaatttaaaaagatctaggaatactaattatattaattaaaaatatatagaacacaactagcttgagttattgttcagtcatcatttcaaccacaagatgatgaggatgttgttaattttaagtactaagtgatttggtaaggttttgtattttcaaacacaatgtgcttgtgacagttgggggctctctttcctaatatgaatcagcagttgtgatctatcctgcatgatatcaaaccacaatcacagtgaaagtcagcaggcttaattttgtttttaattttaccttgtatgcactcttgcggttaaaggcttgaggagttatcatgtaaaaataaaatctgacactagtggttaaatatttgtgttgaatatgttgttctgaataataactcggattaagaaaaatcccaaatctgccatttggctccaactggtagatgaaactgtatgccagtaactgggagtcagttgccaaagtgtcactgcacattagtgtgacaattgagagatggtgctcctttgttggtggtctttttcactagatattttccctaaccattctgccctctgatgtaagataagtttgcttagaaaacagaatttatgaccaggcccagtgactcatgcctgtaatcccagcaccttgggaggccgaggcgggaggatcacctgaggtcaggaatttgagaccagcctggccaacatggtgaaacgttgtctctactaaaaatacaaaaaattaaccagacatggtggtgtgcacctgtggttcccgctactagagaggctgagaccggagaatagcgtgaacccaggaggcagaggttgcagtgggccaagatcatgccactgcactccagcctgggtgacaagagtgaaactctatctcaaaataaaagaaaataaacagaatttattatacacgtgttatttatttatttatttatattacatgtattaacgtgggcagtcttacccagaagggaaagtaatattcctaagtaactaaatacatgtttagtttttgtaaaaacttaaatatatgtgctatgcctatgtaaatatatgcatatcacatattttctttgttgtaattgtggattatattctgcttgttttttcatttcatgttatttccttagatatttccatgaattgacaaagtcggtagatgtgaattcgttgctgtttagtattctatcctcttgattatgtgaattttcttagtcattcacctctttgagcatctgtatagtttttggttaactctgttataaacagggatactataaaaccattgatacatgtcatgataattaccttctattattattggtgatttttaaaaacgtttttattttgaaacttttaaaatccacacaaaagttaaacacatctatacccagcttcagccatagtagaccatatttcagttgagccttttgaaggaaatcccactgcctagtgacatagtaaagaaaatcttaggtgaaacaagagaagcaaaaaagtactgatgacttagttcagaaaaatcagaaaaggtacagtgttcatcagttcgttcgttcaatcctccgttcaattaaggaagcacctcccattttttgccccaacccctttgtctagaaggatgcctggcacataatcaataatctatatctatttatttaatggatcaaatatttgctgagcaaaaggcatgggaagcaaacaaacgtgtgtgtcattcattccctgccattaggtagctcattttcaaatacaaatgtatttactgtgaatttctcagggtagtctctccacacacaccccaaaattagtttaggaacattttattatttttttaaaaaatgaacccttgtgttgagggttgactatcaatagatagcaatgaaagaactgctctgctacatacaaaaccccaaagggccattttaaatgagatttcctaccatctattttaagaatcttgcattgactgggtgtggtggctcacgtctataatcccagcacttcaggagaccagcctaggcaacatgggagactccatttcttaaaaaaaaaaaaaaaaatttaattaaccaggcataatggtgcatgcctgtggtcccagctacttgggaaactgaggcaggagaatcacttgagcctgggagttcaaggctgcagtgggccatgatcgtgccaccgtactccagcctggcctacagagcaagaccctgtctcaaaaaaaaaaaaaaagtatcttgtcttgcctcctgctaagtctgatcatcattgtatctgaatacagtaggcgggataataacaccttccttactagtgataatactattagagattttttaaagccagccaaatttagtagtctctgttatcaagtactttccatgtagtaaatagtttaagacattatttcgatctcagcaactcaaagtaggccttatcctcatttacaaaacaggtaaaatgaggcacagagaggttaattaacttgctgaagataacatagctaagtattagaagattcaaactcagatctgcctatttcccaagcacctctctattctcttttaaaaagcagcttgacatttaagtctttaatccatcttgaattaatttttgtataaggtgtaaggaagggatccagtttcagctttctacatatggctagccagttttcccagcaccatttattgaatagggaatcctttccccattgcttgtttttctcaggtttgtcaaagatcagatagttgtagatatgcggcgttatttctgaggtctctgttctgttccattgatttatatctctgctttggtaccagtaccatgctgttttggttactgtagcctcgtagtatagtttgaagtcaggtagcatgatgcctccagctttgctcttttggcttaggactgacttggcaatgcgggctcttttttggttccatatgaactttaaagtagttttttccaattctgtgaagaaagtcattggtggcttgatggggatggcattgaatctataaattaccttgggcagtatggccattttcacgatattgattcttcctacccatgagcatggaattgttcttccatttgtttgtatcctcttttatttcattgagcagtggtttgtagttctccttgaagaggcccttcatgtcccttgtaagttggattcctaggtattttattctctttgaagcaattgtgaatgggagttcactcatgatttggctctctgtttgtctgttactggtgtaagacttaaacgttagacctaaaaccataaaaaccctagaagaaaacctaggcattaccattcaggacataggcacgggcaaggacttcatgtctaaaacaccaaaagcaatggcaacaaaagccaaaattgacaaatgggatctaattaaactaaagagcttctgcacagcaaaagaaactaccatcagagtgaacaggcaacctccaaaatgggagaaaattttcgcaacctactcatctgacaaagggctaatatccagaatctacaatgaactcaaacaaatttacaagaaaaaaacagacaaccccatcgagaagtgggtgaaggacatgaacagacacttctcaaaagaagacatttatgcagccaaaaaacacatgaaaaaatgctcaccatcactggccatcagagaaatgcaaatcaaaaccacaatgagataccatctcacaccagttagaatggcgatcattaaaaagtcaggaaacaacaggtgctggagaggatgtggagaaataggaacacttttacactgttggtgggactgtaaactagttcaaccattgtggaagtcagtgtggcgattcctcagggatctagaactagaaataccatttgacccagccatcccattactgggtatatacccaaaggactataaatcatgctggtataaagacacatgcacatgtatgtttattgcggcactattcacaatagcaaatacttggaaccaacccaaatgtccaacaacgatagactggattaagaaaatgtggcacatatacaccatagaatactatgcagccacaaagaatgatgagttcatgtcctttgtagggacatggatgaaattggaaatcatcattctcagtaaactatcgcaagaacaaaaaaccaaacaccacatattctcactcataggtgggaattgaacaatgagaacacattggacacaggaaggggaacatcacactctggggactgttgtggggttgggggagcggggagggatagcattaggagatatacctaatgctaaatgacgagttaatgggtgcagcacaccagcatggcacatgtatacatatgtaactaacctgcacattgtgcacatgtaccctaaaacttaaagtataataataataaaataaaataaataaataaaaataaaaagcagcttgacacagatggggatgattccatggaagttgaggtcattagtagagggttttaggaccatggtttgggcacatttgacctgaaggtatagctctaccaaggatctagagctgttcaattcagtagccattagccactaagcaattgaggagttgaaatatgactagaccaaactgaggtgtgctagaaagtgactttgaagacttaatacaaaaaaggaaaatatttcactaataatgttttatattgattacatgttgaaatgataatattttagatatgttaaataagaaatatttttttaaattaatttcaaggccaaaagcagtggctcacacctgtaatcccagcactttgggaggctgaggcaggtggatcgcccgagctcaggagtttgagacccgctggggcaacatggcaaaaccccatctctaccaaaaatacaaaaaattagctgcgcatggtggcatatgcctgtcatcccagctacttgggaggctgaggtgggaggattgcttgagcttgggaggtggaggttgcagtgaaccaagattgtaattgtgccactgcactctaacctgggtgatagggtgagacccccatctcaaaaataaataaatatataaataaaaattaatttcacctgtttctttttacattattgtaactagcagaagattaaaattatatatatgacttgcattatattttgatcggactgtgctgctatagagtgcaatttgttattattaattttttcctgcgtacaaaaggaattctagttcatttagaaaatttggatcatacaacaaagcaccaaaaagaaaattaaaatctcaccatccaaaggaaacatttagtagactgcaatcatactacacagttttgagcctttttacccccctgagtcaaatatcttattttgtttgtccatgcaaacatgttatctctaaaacttgatttttaatttctgttttgtgtcctgtcaatagatattttattgtttaacttatgccccactggtgaatatttagtttgtttctaaactttcgctgttatgatcaatgctgtagtgaacatccttgtagctaagacagcaaaaatctgagcacaggctttggaatcacctgcccaagttcaaattccggattctcagttttgtagctacgtgaccatgggtctttagaataattcctggcacatagtaagtgctatgtaaaagctgctattattattattattaatacatacccaaaaaggaaattactaagtctaaagctgttttaagtatttgatatatataccaaattgccttccaaaaagattgtgttgatttataatttcttgggaaatgcatattaagaaaaataaaacaactcttctaaaacttacactagtcataaatcaatactgtcattagtgctttgaaagatgattgtagtatgtatttctcattgttatgttgtaagtatgagggagaatttatttctcttgcccctttccctaagaactctcaccttcccatcattaacagacattcactgaattcctctactaggagtcctataccatttcagatgttcagaaatctccctaacattggttaagattcttgctcctaagaggaaagtactatgttcacatacacagatctctcatgatcacttgccctcaactggatagattttagccggtgatttaccctcagaaaacagcattgtatataaaattttggcacaacacttggtcatccgtcacactctgctcatttcccaaatatgctcgtaaaaccagtttgcttgagatcctgtataaaatgcctattgtgatgcaaatactgacatattgaggatgaatatgaagaaaaccactaaaatctaggaaattcagctataatatacatgtttgtgatttaaagttatatgggtttagtaagcctttcccctttaacataatacgcagagtacctttctgagacatttatcagctatcagccttattcttattcttgaaacattcagggtttcttaaagacattgcctttttttttttttctatatggagtctcgctctgtcgcccatgctggagtgcagtgtcacaatgtcggctcactccgcctcctgggttcaagcaatgctcctgcctcaacctcctgagtagctagggttacaggcacccaccattgcgcctggctaatttttggtagagacagggttttaccatgttggccaggctggtctcgaactcctgacctcataatctgcccatctcagcctcccaaagtgctgggattacaggcgtgagccactgcgcccttcctatcacttatcttgtcatgcttacattattccccacaattttaggttttttttttttttttttttaagtagagacaggtgtctcactatgtagcccaggctggtctcgaactcctgagctcaagtgatcctcctgcctcagcctcccgtagctctaggattaaaggaatgagccactgtcccctccgcccacaattttctaatgtcctccatagggtaagatgagcttacaattatctgagcctaaaaccaaaatcttttttgtatacaaatacaaaatatttccccccaacagttttaatatatactgaacttttcagggatgccactatatgtaaattgaggggaaattatattttgttttgctcttaacgtgactgagagatatttcatattcagagaatcctgacaacagtgaacaaagagccaaaccaatctgcatttgtaatctatatgttcacggtgactctcaagtatagatacaagcatgtgatttctttgtcttctagtggagtacccaagttattgcatatggataccatatcttatgtaaattgcattctttttttatttctgctttatatagtttgaacactatattgatcttttgaaattatgtatgtaaatgtgttagaattgtatgccagcatgataaaatagaagttgcaaaatattggatatgaaagcaagaggcatcatctgatagagttaagaactattggtgtaaaagcacaaagagagctgttaaggacccacttgaagctcatgtggccagcatccaaaaggtgcttagtttctgttcttaatccctgaacgtgtgtatctgacggtaacactgtggttacagcagtatctacatttgagatgtgataactgccattagtcctgattcctcctttcagtttgtgtgtttagaacacccctttctctaagaatgcaaagtaagaaagtaagatgtaaaaaaaaaaacaaaagaaaaccttaaagtgaaattactcaaaacacacacacacacacacacacactctatatcaaataccaacatgcatttgggttaagggaaggagactaagtcaaatttagtcaaatcttcctgtttggagctaggcttggtcctgtagtcccagctacttgggaggtttacacaggagaatcacttgaacccaggagtttgaggctgtactgcactatgatcgcacctgtgaacagccactgcactccagcctgggcaacacagcaagagtctgtctctttaaaacaaacaaacaacaaacaaaaaacacttctgtctagtgatttaaaacaattgacattcttcctagcaattaaatgtaatactgtatagtagtttgtgaagaggttagtaagtcctaatttgaatttgtgttaaaataaaagacacaaaatgcacattaaaaatgtttctcatctctgttttctgaggactgctgcatgtcacaggttttaaaaatacacattttctatctgtgacctttcacatacatacctttgtcaagctcaactggagggcttaatctccactgcatcaaaaaaaaaaaaaaaaaaatgctgccaacttcaaacaaattgccttggagctggcttcacagagttatcacgcacttacccggagttgaagataactaccttgacagtggggatacaaaggcagtaatgatagtgcctactaccccagtctttagtctatcacagaattcaggagaagccaattaagtaatccttctgtttgtttaaagaactttcaattagttgcttatccagtttttaaattattctgatgcaaatccgtgaaaactagaaccacacttaaaaatcacaactaaagtatcatgaattgacagttattcaaacacataactaagcctcctttcccacataatacacacgcacatatacaaatacaggcaggtgaaatttagcataacatcatgtttttagagcacgaataaatgttagagaccatttgatcattcattacgttaattgaaacttagttcaaaatgttgcttcctccaggaagcctttttctattccctgggcagagtcagaatctccttccacacctcttctcctcttgagcatcttccagtaactctatgttcacatagaggccaaggaccaggctttgttcagctttgtatcctaggcactaagatgtgcttattacatgtaacagatactctcaaggacaaagattaagagttattatgtgcttattaaatgaaacatatgaatgcaaatatattgtatgtagtatattaaataatacataagtatataggatgtacatttttaaatatacttttatattgttacatatattatatgtaactttatacacttttatatagttacctatattgtatgtaagttcttcagtccctcaagaaaatgacattgttttcttatgaactttttgttaaaattagttttatattagtagtaaataatatgataacttagagaggtagaattgggggaccacaattatgccccagttcaagataagtcactggcatgtaggagaaagcctcagagaagttacggactttcaggcagtaaaggacacagttgaattattcactggctagcctaaaatgggtctacccccaccccttgccttcagccccctaaaacactgaccaaacatgtaataagaaaagagtaattataggaggttcaccaccatcacactcacccctgccttcattaagaagtgtttaggctggttgcggtggttcacacctgtaactccagcactttgggaggctgaggcgggtggatcacttgaggccaggagtgcaagaccagcctggccaacatggtgaaaccccatctctactaaaattacaaaaattagccgggcatggtggcaggtgcctgtaattccagctacctgggaggctgaggcaggagaatcgcttgaacccgggaggtggaggttgcagtgagctgagagccgagatcacaccactgcactacagcctgggtgacagagcaagactctgtctcaaaaaaaaaaaaaaagtgtttaaataaatgcctctggctttatttgaacagtccaggaataattcaagggtctgtcacagaattttgacaaagaaaaaaggtgggagggatcatgtgaagaaggccttttttcccccaagagttaagcaggggccaggcacagtggctcaggcctgtaatcccagcactttggaaggccaaggcaggccgattgcttaaggccaggagtttgagaacagcctggccaacgtggcaaaaccccgtgtgtactaaaaaaatgcaaaaaaaaaaaaaattagccaggcatggtggtgcacacctgtaatcccagctactctggagtctgaggcgggagaatcacttgaacccaggaggtggaggttacagtgagccgagactgtgccactgtactccagcctggcccacagtgagtctctgtctaaaaaaaaaaaagaaaaagaaaaagaaaaagaaaaaaaaagcttaagcagagatatgaaacccttccattttaagtgtcttttcccccctctatactcagaaatgttgtacttattttaggtgaaggcagatgatatgtctaactattcttgctgtgagtggtccagaagggcacagttttggaaatacacagatgaactgttgaaggtagtttcaccttaatttttagtccttgttaaatatttattcccttgtccattgttggtgactcagttgagcccactcgttaaaatccttttcacggggatagtcactcttatgaaaacatagacacctagagacatgtgggaagcgtagggtcatttaacatgtggcgattctacagcagttttcccattgtttaactggagagatttatttacagcttgtgttaggctgttcttgggttgctagaaagaaatactgggtaatttataaagaaaagaggtttaattggctaagcgttctgcaggctgcacaagcgtggccccagcatctgctcagtttctagggaggcatcaggaggcttttactcatggcagaaggtgaagcaggaccaggcacgtcacatggtgaaagcagaaacaagagaaagagggggtgggaggtgccacacgcttttaaacaaccagatctcgtgagaactcactcattattgtgaggacaacaccaagccatgagagatccactcccatgacccaaacgtctcccaccaggctccacctctaacatgggggatgacatttcagcatgaaatttgggggaacaaatatctaaactattcacaccttactaataatactaaatgtgcacagttaaatttcagataaagattgttcaattggggcagacacgtaattttttccattgctctttgggactcagatgaataatcttagtgtggtagagataagcctagctggtttgtcatgtgttactgtcagttcctttcaatttatgaagaaacagaaagataaattgggaaatgtcacattctagccttgacgaactttttagttggacttggccatctttcgagttgtaagaacatgtacttctaagggtacaaaatgtgtttccaaactctatggcatacagttctagcataacaccatgtcagtcaattgcagaaacttccaaacattttttacactgagagctctttggtcaaataattcttgcttggaagtaaatcccagtctgtgtgtgccaggcactgtgttaggctagagacagagtcatgagcaaatagcatctctgctctgatgtttcttacatgtgctagtgagggaggcaaacaaaaaacaaggcgagttcagattttgatcattgctatgaagcaaatacatagtttagtataatggagagtgacagttactgtggaacataggttccatgaaagcatggagcctatcctacttgtcactgtattttcagtgcctaaaacatagcagttactgtttgagagaatgttgtatggaaagaatgacaggaggcctgcctgaaaagatggtaggttaaagtggagatctgaaaggtgacagtcagctagatcttatagcctgattacaaagtgcacaaagtgcaagtgatgtgcaaaggcctcgaggtggaaagagtagaacagaagtgagaccagggtggctggagcccagtgagcaaggggaaagtggtctttgagcaagttggaaggtacacaggggacagagcatagagtgccttctaagccaattctaaagtggagagtttgaattctgttctgagaataatgggaaaccattgaagggttttaagaagagagtgatgcaatctgatgtgggttttagaaagataactttagctgctgaatacagaaaatggccagaatagaagcagggagactaatccagttacagtagtcctggcaaatgttgatgatggtgatttggattaagatgctctgttaggaatggaggcaagtgaaaggattggaaatctgttttggaaataaaaccaagagtacttgctaatgggttgggttgggttgggttggattggattggattggattggattggattagattggattggattggaggaggaaggcgtgtgagcagaagaggaaaatcaaggatgatgcttaggttttgtgctcgactgagtgtatgaagtgttcttatgttagatggacaaaactggaagaggacagatttgggatgaaatcaagggctctgattcagacattttctttagaaattgtgaactcctcaggaggtatccagtggagacggttgggtatataagtggagctcaagagagaagtttggctgcagaaagaaagttgggagtcatcaacatagaaatggtattgaaacctgcaggactaataaaataatctagcaagagagtagagataaagaaaagaaggccagaatcgagctatagcaccgtcacacagttagtctgatagagtagaggagccaagaatggagatgggaaaaaatcagtaatgaggtagaaggaaaattaagagtgatgtcacagatgtcaaaaaggggagtggctcaagaaggcagttgttttggggagtaccatgaccacctactagtgatttgctggaaggactcactcacgactcaatatagaatcatattcaaggctaagatttattacagcaaagggtatggtgcaggaacagcaggatacagatatatggtggcaaaactagagaagtcgtagtaggctttcttgtcctctctctgtagggattccacatgtttctcaggaatgcatgtttctctccagctgtaaactgcagagacatatgcaaaacgcctccacccaggaaagcccactcaagtcttaggggttcagagctggtcaagggagctggtcgtgtagctatgtaaccagccaggatgcagaccccaaactaggtactaggatgcatcaggaatcttcatgtcaactttaaacaatgatactgtcttgatatattttgaccactgccttgagggcacaaaaataacataactaattagtaagcatttcagggagtttagtgctcaggatttgggtcagggtcattgctgtgactgcaggtgttcccaaagacaagcaagaactgagtaaaacatactggctatgttaactctttcctctagaggtcatggttaatgttgaatgcaggtgaaagtcaaaactgagagccataaagttaatttctatatcccaaagtatagttagtgaaattatatttctctccagatagattcattccacttatttagtaaacatttattgaatgcctaatatagttcatggcatgtgctagcatgagactataggggtaaataagttagacatggcacctgccctgaaggagttgacaaaccaataaacgcagatgtcattagctatgtgcgagaatatgacagaggtctcacggctgagacctgaaggataaagagagatcagccaggtgaaaagggaaaggcgaggcaataaatagcacgttcaaaggcctggaggtgaaggagcatattgactttgaggagcaaaagaagttcagtgtggctggaggggagaaaggagaaggtgagtgtggggtagattatggaggaccttatacaggctgttaaacacgttttgcttcatccacggggagatataatcctaagggtttttgcttgataggaaaatgacagatttgttttcttgattgaaaaatttctgataattttacagttagttttgcattgcaacagagattctctctctctctctctttttttttttttttttttgagacaagagtctcgctctgtcacccaggctggagtgcaatggtgcgatcccagctcactgcaacctccgcttcctgagttcaagcgattctcctgcctcagcccccgagtagctgggattacaggggtgtgccaccatgcccagctaatttttgtatttatagtagagatggggtttcaccatgttgtccaggttggtctcgaactcctgaccttgtgatctgcctgcctcagcctcccaaagtgctgggattacaggcatgcaccaccgtgcccagcccagagattctctttaagaaatttggtgcaacagtcatttctgggacaaaaagtagtgagaaaatacaaacacaccagggtaaataaaccagagcgccacaaaatgtaatattaagtgtgtaaaaataataatccctgagagctatcagtgtgaaaagtttttatttgaatgccgtaattgaatggaattgttcatttaaaccttcaagtgaatttatttttatgtctaaaacttattagaaatgtttcaatggtgattatatgtagtttcttttttgccttcaacagagcacagatcacacagaaaggaatgattttttttttaatcagcaattttggagacaaattctatgaatgccaacctatacagaaactgacaagcattaattattcagaatgtaaagagaaatgccagagtattaaggaacagatacctagatttaaacataattttggaatattataattattatgaattacaaccacttatatttgaggcagtatgtaacagctgtgtgcgtgagcaggaacatgagagggaacgtaacctggtctcattttctagacaagccattcaagaggagcaaagagagtgggaaaatgaaagcaatgccactactgattattgaacatctttatctgccatgcactgtgctaggccctttacacattttccttctttaagctatttaaaaactgcgataagttccttacattcccattttataggcaagagcaaatagattttacagatgaagaaattgatgtcccaaaatgatatcttggtaggtgatagattcggttcggtaacccaaatgtgtcttttagcgatttatgtattcattcaacaaatattcattgagttcctactgtctaccagaacttttgtaaggggatgcaaagaagaacagacccaggtctttccctttatgaactagggcagtgggccttacacccaactgccgtaatgggaaaagcattgtaatggggctttgttcgttacagtcaacagtgcagtgtagggatgctttgtaagctggcctacagggtgattggtaaagttgagaaaggcttatcagggaggctgacatttgaacaaaggtttggatattaccaggcagagagatggaggtggtaggaattccaggtaaagcgactgggaaaacacatgctgtgcttgggtggcaggagcagtccagggaggacatggtgggactgtgctgcaagaagccttgtatgccaaggagatgagacttcccttgtacatacagccaaggataagaatttgatgacgatttctaatgtatcttagcatctaagttcccttaatttgtgctcactggaaaccacagagttttagaaggcttttgtcattgtggtttaaaagaaaaaaatagattgttcaaagaacagtgatacatagggaaaatattttgactcaggaacgtaatttctcactaaaattggcaatatttgtagccccatgggaactatgtttccataggacattctgttcgctgtccttgggaagctatctaaaaaaagaagaaaaaaacacaataaaaagaggtatttggggatcagtaataaaagttgtatactttattgaatgtgttactgtgtactagctacttatccatattattttaaatcctgacacctattaaataataggtagtattatccctgttttacagataggaaactgaggctcagaaaaaagtgacttgcctgagactacttagctagtaaggagcagagctgggaattcaaacccaggtctgtcaggattcaaaaccccagttcttccagtctctagagcctggtctctagagcctggagacttctgtggaggtgacctaggccacttcaataggtgaggagacagaggaccgcttggggatgcattccttaaatcagagcagctgattctatgaatgccaacctaatacagaaactgacaaacattaattgttcagaatgtaaagaaaactgccagagtatgaaggaacagacatctagatttaaacataattttggaatattgtaattattattaattacaaccacttacatttgaggtagtgtgtaacagctgtgtgcatgagcaggaacttgagagggaacgtatcctggtctcattttctaggcaagccattcaagagcagcaaagagaatgggaaaatgaaagcaatgccactgccgattattgaacacctttatgtgccatgcactgtgctaggctctttacacattttcctcttttaaattatataaaaactctgtgataagtttttttaagtatacagacttttgtgctaaattggaaaacccgtactggaacctgggggtgggggcggggcagaggtcttctaatgactggccttgtgctctttaagctgcactagctatcccactttgaaaagaatgtgtgaaacacagttgcagtcatgcatactccatctccaaagaatggattcattcttcaggccatagtatactgactataattttctgtttgtaattacccagattccaagcctgtttatagcatttatacctgaggaatggaatagtgaggatttgaagaggccgcagtccttgaggttttctttgataataatatctgtgtagctgcatcaaacacaaatttgatattctgtgtatctgtagcacaggtcatgtgactgtaaattcttttgatatcttgttgcatactgaggtcaaggaactggctcttgatgtaattccccgcatcctcatgggagttgttaccatcatactctggaaaacaaatgctgagatggattaactttttacactgggtttccgcatgggattttataggaataaaggttccactaccagcagtgagtagcctgaagtctgccacattgaccaggaacctttgcaagaataaaccgaggatgtgccctctgcaggtgaatgtgctaggctctctggggttgccaaggagtttgagtccccatccttgagtccccatcaactacatctagttgatgtacacgtgatcctttgcaaaggttctgagccctctgaaactgatcaaaattgcatctgttagaaaatattaaatatattctatatatcaagccaaatactaggagcttgtgtaagcaacagagtatcttggtggatcacgtgggtgttgggttaggcaaaagatcccactgttggccctccccacacccacatccttactatgctctgggcagacagagttactccaactatctcaaaatgcccagaaacccttaaccacctctactgatttgcctgtattcaggagcctccttcttcacagctgagattcagacttcattgagggacaaggtgaatgagagggtaggggacagtagggggcagaatctggtcatcaggaactttggactttccagtgagcacagactgagatacctcaggtgctaagactgcagcacccctggaggaagactgtacactagacaacaacaaggctggttggcaggacagcatctacccagcatccttaacatccgggaggagatgatggtgccgtgtagggacacttgaccctgcccatagcagcctcagcccctgtgcatcctgggagtgaagtgatcaggtcatgcaagtaactacatcagtcctcaccactgggatcattgctacagaggggaaggcttttccctgtgtgttggagatggagatagaagtgtattaatggaggaaaacaaaataagcttttacatctgctaaattaacagaatcccaggctgccaaaaccctgaggcttgctcaatcagcagtccaaactgtatttcctctaagggacaaattatgagctgctgtaaaggtacacacagtctagtgagaaaccattcaattttgagggggaaactctagggaaatagagtaagttaaaggagtagagtgtgccagtatgagaaggcaactctcctggagtttgagttccaaaactcagtgggctcataggtcatggtgtgatcttagaagtcataagtgaccaacaaggagtttaataacgccttttcttatactccctctttttacatagcctttataccaagttatcatctggcagtcattttagatataggtttctaagttagacggtagggtccaaatgaagtgtttggcaaagtcatcttaattttttaaaacttgatatgaaaaagatggtggtatcaggtattgaaattgaggagctatcagaatagggaaaaattccccatttatgcccatactcacaaatacacaaatatttataaacaataatgatacaggcaggcatggtggctcacacctgtaatcccaccactttgggaggccaaggcaggcagatcacctgaggtcaggagttcgaccagcctggccaaaatggtgaagccccgtctctactaaaaatacaaaattagccgagtgtgttggcgcatgcctgtaatcccagctacttgggaggctgaggcaggagaattgcttgaacccaggaggtagaggttgcagtgagctgagatcgtggtattgcactccagcctaggcaacaagcgcgaaactctgtctcaaaataataataataataatacaacttatttttttccctttggggggctttccagcaaaaaccagaaagcctattagacaaattttaaaagagctgtaacactataataagactgtttaataatggttgagaacacagagcccgaagaacacagattgcctgggttcaaatcctggttctgctgttcagtggctgtgatcttgaactactgtcttaccctatctgtgcctagttcctattttgtaaaatagaaataatagttctacctcgtaggttgtcgagagggctaaataagttaataaacataaagtgctcagaatatgattggcacataagtgctatggaagtatatgctactcttactgcagttacataaattgtgatatttggcagccttgaagcgtggccctgccatatgctttgtgtttaaaaccctcaaactactgtttattgagggcatctttgatgtcaggcacagggctaggcaatgttcctgctgtatctcaatgaatctacacaacaccctatgaggtaaataccaatttacagctttagatactgacttgccagtggttaagtaacttgcccaaggccacaaagcaagtacctggtagattcaggactgaagcttcaagtctagagagcttggctccagccgcagctgcagtttgggctgaccttgttcctgccagcacactttgggacctgggccatacaagttatagcatcctggacagaccctctattttatagaaaaggaacctgaggccctaggattaaatgaattgccagaggtcactctccaaagagactctgaggtccagattaggaaacctgaactaacattgaagccgtgtctttctgtataagatccaactgcttgtggtatgtttggccaaaaagactcaggttaaagtcagataccaaataatatattgacatctagcatatttatgcccagatgccgtatagcaaatcatccttcactttaattagcttatagttatatactcgacaatgtgaatgaacagagaaaaacaaggtatttttttttcatcttctaaatttgcttgggaaattcctccgtgtcttttacaggtttaaaaatcatgtttaacgataatgtagttatcttaggaaaaagaccaacccatttttatcactctttatcattgggccatcacagatgagagctttctatcttatagaatcatttgcacaaagtatatatgaggatatacagcattgtatttgtagcatttcttataatagtaaaaaaatgaaatgatacagtcatctagttaatgccactgagttgtacacttagaatggttaaataacaaattttgttatatgtgttttgccatattttaaaaaaataatagtttaagaaactagtgacttgtatacttaaactgagtggattgtatagtatgcaaattatgtctcaataaagatattttttaaaacccatacatttatccatagagaattggtcagattatgccaaacccagtcaatggagtattttacaacctttattaaagaattaggtagatttatatgttttgacatgggaggatgtccagaatatattgtgaagtaaaaaaaaagttgatgtgcatttccatatgctgtatacacacgtctacagttttgtcttatgagtaacactcttgtaaatgtcattatgcaacttggctttttcacttatgtgtgttatgttagaggttagtacatatagagatacctcatttttttaactgtttcaaactattctgtggtataatcttatcttagtttatttagtcatttccatattgatgagtctttaggtcatttataacttttagatatttcgaagaatgctgcaataaatactgttaaacaagcacattagctccataatttcccaagataggcactactaaatcaaaaagtacatgcatttttttcctcaagtttctttctttcattgatgatgctcttcttcctcctcttcttcctcttcttcttcttcttcattattattattattattatacttttaagttctgggttacatgtgcagaatgtgcaggtttgttacataggtatacatgtgccatggtggtttgctgcacccatcaacccgtcacctacattaggtatttctcctaatgttatccctcccgtagcccccccaccccccaacaggccccagtgtgtgatgtttccctccctgtgtccatgtgttctcgttgttcaactcctacttatgagtgagaacatgcagtgtttgattttctgatattctgatagtttgctgagaatgatggtttccagcttcatccatgtccctgcaaaggacatgaactcatcctttttatggctgaatagtattccatggtgtatatgtgccacattttcttaatccagtctatcattgatggacatttgggttggttccaagtctttgctattgtgaatagtgctgcaataaacatatgtgtgcataaaaggtatatgcatttttgtgcttgatggatactgacagattaacctacaagaggatgtattatttacactcccagccccacgtgagtatgtgtatttccccacatcctaaccaacactaatttttttccattctaatgggtgaaaaaaaaaatctccattttaagttgcattttcactgagcatggtggtacacacctacagttccagagacttaggaggtcaagatgggaggattgtttgaggccagggccaggagttcaagactagcctgggcaacatagcaagatcccatctctaacgaaaatttttttaaaaactagccaggcatgatggtgcattcctgtcattccagctacccaggacaccgaggctggatgattgcttgaacccagggccatggtcccaccactgaactatagcctgggtgacagagcgagaacctatctctacttaataattagtagcatttacatgattgaaaatcagaatgaacatgttttcacattaattcaacattagataaacattgaggtactgccccagatgaacaaacacaaacccctgcccctgtggaacttctgttaaactctattggtcatttctatttcctcatgccatttgcctgtttttctatttattcatgctttgttatgtgtgtggcaaatattttcacctcttctgtggcttgtcttttgagctccattttcagtatctttggccttacagaagtttttaatttttatgagatcgtattcgtcagtccttttctttatgcttttatgttccatgcctcacttaaaaaggccctctttcccccaaggtcataaatatattctatacccttttcaatatttttatggttttagtttttatgtttagcacctaactccatctggaatctatttttgggaatcgagtggtatgtagatagatttcatgtctgacaatatatatttttgagcactcaaatttttaaaaagtatgtatgactttggtaagcagaaagagccaagaggagtttgaagagacactcagaaagtggatgtccattctgggtgggcccaggagtttgcaattttagcagatacctccagagaaaagagaaagtgatgagaaaaaaaaaaaaaaagctgtgtcctgtggagtagattcaggtcataatggctgtaggtagagacacagcagaaagagtagccccgggttggccttgtatcctggtacctacagcaccttaggaaatacataaaatacatgaaatgtcacagctttgcaagaactagaagaccagccagaatgaatcagagaagggattcttcagtgtttctacttgtaatggaatttttaatccctcatctggtacaaaaatgagtttgagataatagtccatttaaaaataacccaagccggtgtggtggcttacgcctgtattcccagtactttgggaggccgaggcaggggaatcacctgtcaggagttcatgaccagcctggccaacatggtgaaacctcgtctctactaaaaatacaaaaattagtcaggtgtggtggcgggagcctgtaatcccagctacttgggaagctgaagcaggagaatcacttaaatccgggaggcggagattgcaatgagcccagatcgtaccactgcactccagcttgggcaacagagtgagactccatctcaaaaataaataaataaataaataaataaccaacccagccctggattaatgatgaattttcattctggctagcaaaggttagcaaaagtggatgactacatgtaggcatgttaattaacactttttagattctggaaaaagaatgttgtgtggcagaaatatgggtacaaatgtgcaagccttctgtagatgattctttaaaggcaggtggagtgggagccgctgggctaacctaccccaaatcactgcacttcctttcttcccttgtcattaaaaccatatgacccctttagtgtctgtgttgcactcatgagttcagaagttccaatgcatctatcaaacacatgtgtttgcctactgtgcatgttgttctaagtgctccttcactgcttctgacaaccctatgaggtactattataagcctccttttacacatgaggaaactgaggctccagagagttaaataagttgcccatagtcccacaggcagtggtggcattgggatttggactcaagttgtctagctccaggttcgcagaatcaccctaataatgtgccctccaaattggctatttcagcaactgcagtgttcaggaaagaattatactctgatgagccttcatgaggcagggttgaaaaacctgtgtcaggaaaagatatgacaccttactggttatcagaccatgctagaaggagcctctttaaaatcgaacaacagagccactgctctggtgcaagcagcactctcacccagccctctgacctcagtcacagtgtgagctctatagttcctggcaaactttagccatggggtcaaaaatggagaagcgtgccttcaggtataagatgtgatgtgttcatgcagggattagctctgtttaggcttaattctggaagccagggttcttaatttggttcccattccctgacggaatactatgcagtcctgataatgaatgatttacatttatacaacagtatgcatggatgcaccacaggggacagtgcctggaaataggcacaagggtgctttgaggctgctgtctacacaaatgtgtgtttagtttatgaaaatccacagtggcgcctgtaatcccagcactttgggaggctgaggcgggcggatcatttgaagtcaggagttcaagaccagcttggtgaaaacccgtctctactaaaaatacaaaacaattagccaggtgtgatggcggatacctgtaatcccaggtactcgggaggctgaggcatgagaatcacttgaacccaggaggcagaggctgcggtgaaccaagatcgtgccactacactccagcctgggtgacagagtgagactttgtctctcaaaaaaaaaacaaaatctacagtgagctcttcagcatatagctttctctgcatattgtattccatgtattcattgtactggattcaatgtacagtattctatgtatattgttatttcactgaagagttttttcttaatggcgtgaattagagtcagctgaggtatttgtgaaaaatgcagactcctgaactcacgcctcaagattcctgttctggatggggcccaggagtttgcagttttttacaaatacctcaggtaattctgctgcaggtcatctgaagatatacctgtaagaacatagcaaagctgcagacctggtctgctgttgatgtgcttaatactgggcatcaataggactctataagtagagcaaaagaatgacttgagaatgactaggctcacacattgggatggtaggaaaacagcctggtgcactgcaagggtaacaccatcttgaagcgaaaccaccacgatgaccgatgcttgagtcctgcatgccaaggtgttcttgcagcaaggccaagaaacaatgcctgtagcacagataacccctcataaacatgcttatctgacttccccagtggtcaccagtgttccccaggaggatctgagacatgaccagctgtctttactctaaacacttgctatataaaggatcatttctggtgggtggacacagggactcactttctggagcagcccaagacatcgcttctatttgtaagtccctattaaatattttttctgaagaactggatttatcagcctctttcttaagcctcttagttccctctgcctttgtgggtaggtttgcgtagacctactcaccaagaaacaaggctatatcttacatgtatccatgattttttttaatgcacaaaaatgtaaaaagactatataaaatacctacaacaagatttctgttggccaggtacagtggctcatgcttggaatcctagcattttgggagggtgaggcgagtggatcacttgagcccaggagttcaagaccagcctgggcaacatagcaagaccctgtctttacaaaaagtacaaaaattagctgggtatggtggtatgtgcctgcagtcccagctactcaggaggctgatgtgggaggattctttgagcccaggaggtggaggcagtggtgagctgagatcacaccactgcactatagtctgggtgacagagtgagaccctgtttaaaaaaagagagagagagagaaaaaaaaagatttctctgaatccttctcatgcgtatcatgagagatgttttaaaatgtttctatattttggccgggtatggtagttcacgcctgtaatcctagcaccttgggaggctgaggcgggtggatcacctgaggtcaggagttcaagaccagcctggccaacatggtgaaacccccatctctactaaaaatgcaaacattagccaggcgtggtggtgcatgcatgtaattccagctactcgggaggctgaggcaggagaattgcttgaatccgggaggtggaggttgcagtgagccgagatcacaccattgcactccagcgtgagcgacaagaatgaaactccatccccccaaaaaaaccacttttctgtattttaatgcacagtttaaaaatgccagacctggctctattctacttaggtttctgttcattagataggagtcattcatgtatgactgaatcactatgaggatcctcctctctctcttcttccccttccacccacatgccaggctgtggttcagactgccttctgctttctcacgggtctctgttgtgtgatcttgtgcccacctctctgtgtgttaaatggagagagtggcttgaacagtaccctcatggttggtcttcaagagctcatctaattctgaatggtagttgggcatgtctgaaggtattagcaattctgttgctcagcattgctgatgtattgagcaatgtgaaaaccttggcgaatcttgttgccatcttcccctaagaatctgcctcatcctgaagcccaaccatttgactctgtggtaaaatgaagtaacttcagtaaggtccatgtctaccaatttcttaatctcatttgaggtaaatagatgcacattatcagaaaggactggccactatgtactgcaaatgatgggcacagagttgtgattgtcccagcagacttgagatgagctagggatacatcagtccattatgagacggtatctgttatagtcaagagtgtctctggaatggcttcttgtaattatttggactttctaccaaggtttctgtgccatagcctatggaaaagtagattcctttcaagagacctgacttgccaagcatggtggttcacacctgtaatcccagtgctttcaggggccaaggcggtgggatcacttgaaaccaggagtttaggaccagcctgggcaacaaagtgagacccccatctctacaaaacattagccaggtatagtggcgcatgcctgtggtcccagctacatgggagggcaaggcgggaggatcacctgagcccaggagttccaggctgcagtgagccacgttcacaccactgcattccagcctgggcaacagagcaagacccagtcaaaagaaagaaagaaagaaagaaagaatgagagaaagggagggagggaagaagggagggagggacggagggacggacggcgggacggacagagggaaggagagacagagggagggaggcctgacttgtatatttatgtgcacgaaatccgttctaggcctctgaatatggcacctggcccactctttcttgagaacagtttgccagtgagcaatgtgcctcatgtcctttgtgaaactggcagagcataaattattaatttaaaatacacaaactaagatcaagataagatgtgctttaatgaacgggtaaactcaaatggcttattaacaccttcatttcctcatgctgcttctgaaatgggcatttctcaacttacattttaaggtaggagctgatctgagatgcaagttaattatacagtttgtcgaagccaaagagttgggtttgggagattttctgacctgaaaatgttcagtggcggtgcccatgtaatcttgggcctactctgacagacagttcagagccttaacattcagtgttggtcctttggatatattgaacataagctacagtttacgggtatgagaggacattattgactgagacttcaatagttccaaagggggaaaaaaagagaaagatggcttttttaaagctactgtcttcagctcaggaaaaaacatgtgatcagccgactgtaaatgcacagcttgagaaatttagcaattcccaaaataggttcaagtttctttgtgagcatgtaggcctacttgcaggtaacattgactttgttaacaacgtttgttaacaataacattgtaggcagttaatgtctcagagctcttatagatacaaaagaaaataaacttacaacttccagaaagcatcttctcattgatgagtctaaataatgctcatctattggagaagcaacttgttaatagtgactttttgtcacttttgtagagtggggagagggacatgggagatgaagctcttactttatttgggaagtgagatgtctcaagttctttattctaaaaaaggtaaacatcagttgcctctgaggtagtaatagaagaaggtctgttttactttggaggaacattaaccttagagtaaaacaaacgaaaacacagttcaaagcccaggctgtctgagcccatctcgtcatttgtaaaatgaggataataatacctgccttacttatctcatggtgtttctgttgaggattaaatgataaagcactttggaaattatgtaaaatatctgtattttaagcaggtatgatttcccgaaatccttgagtttttcctctgattccatgattatgacatcacttaaatatgccacccctctgctatcctaataccccaaatctcagtgaaacactggaaaagtccgaaaccaatagagatttctaaagcagatccccttattatgcccctcaattagtgatcattgttagtgggtctgctcagagcatcattgccaagtgctttgataagctgaagaaatctgttgataatttcttgaggcatggtatttcagtgtgtggaatacttgggtactagttcttgggagttttttaaagtaaaatacttatatttgtgttgactttgcaacagcaggtacagcaaatttcacatggtaccttgctacagaaattaattagtaccactcatggtttaaattatgtagaatgatagtatgctcatattcttcttggctgtcttaaaaatgaatagaaacaaaaaggtaaacaaagctcatatttacctctccttggaaagaggttgagtgattgtcatgtagcttctcatttatcaagtatgtgttatgatttcgttaaaggataaattgaaaggattcttaaagcaacaaaggtttggtcctgcattgatgcatattaagtaaagtagagctcctcagttggcattcccaggctgggtgacacagaggtgcctctttctgatactctccttcccagctcctgtgccatcccctcccctctccccttctctctcctctctccccttcttctcctgtaatacttctgctacttgctctgttctacccagagactgaaggaagtgagtggtgatctaattgagactgaataagtccgaacatttattttccttccccttcactccatccaaagtccaatcctgaggaagacatggaggttatgattaaacttgcccaacactcaaactttactgactgcttattcttatgttaatcacttggcctttgctagattaatgactgagtgaccagaagtctcaatgatcccataaatcgtatgattttaaactatttgtgtagcttttgctagttgtaataaaaattttcacatgattttttttccaaatagagaggtttaataaagctaatgtgcttgaccaggttttggagagtttacatactaatttcttaacccctttctaatatggttagtatagctctgtgttttcatcagagagaagcagactgtgaattcctcaccttggggcttccattctccctccaggtggcctcacctttcaggtgaacaacctgacctctctggctcctaaatcccacccttacaagccgcaggagccggtgcatgggggcatagtttcttacctttacctttttcaaacctttccctcctcaccagcttttttttaagactttattttcttagagcagttttagagcaaatttgctgtacctactgtggcaaagtcaatacaaatataaatatttacttaaaacccaagaaccagtacccaaaagcaaaattatctaaagcaaaattgagaggaaggtacagagatttcccacataccccttgtccctatccccacacgcgcatagcctctcccatgatcaatatcccccaccagagtggtacatttgttacaactaataaacctacactgaagtaggggtttggacaaatgtataatgacattgtagtatcatacagaggagtttcactgccctaaataccctatgtgccatcttttcatccttccctcctcactagcctttggcaaccactgatctttttattgtctccataatttcgcctgtttcaaaatgtcatatgcttggactcatatagtatagccttttcagattggcttcttttacttagtaatatgcatttaagtttcctccatgtatcttcatggcttgatagatcatttcttttcaacactgactcgtattccattgtctgagtgtaccacaggttatttatcccctcacctactgaaggacctcttggttcctttcaagttttggcaatgataaataaaaatgtaaatagctgtataatttttatatggacgtaagttttcagtttattttgttaaataacaaggagcttgtttgctggatcatatggcaagagtaggtttagttttgtaagacacttgcaaactgctttccaaattggccattttgcattcccaccagcaatgaatgagagttcctgttgctccacatcctcgccagtatttggtgttgtcagtgttctgaatttttgccattctaataggaatgcattgatatctcattgttgttttaatttgcctttccctgatgacatatgatgtgacatatgatgacatcttttcatatgcttatttgccctctgtttatcttctttggtgaaatgcctgctgtttccatcttttgtccattttttaattgagttgtttattttcttattgttgggttttcagaattctttctgtattttggataactctttcatcagacatgtcttttgcaaacattttctccaagtctgtggcttaccttttcattctcttgatccctccagctttttatttagaaaattttcagtcctatagaaaaaaatacaaaaatagtaaaataagcactcacacattattcatatacatccaccagttgttaatattttgccacatttgctttatctctctcatgagctccatctgttgattttactgaaccattagaagtgataaatggcatgtcacatcatcccaaaaaacaccaatatgcatctcctaagcatgacttcttactgcctaatcatgacacatcattattaaactaaaaataataactcagtaatatccaacaacatactgcatttttaaagttctccagtagttcccagaatcaaatcaagcaaggctcacccatcgtctacagtctcacaatctaggacagttcccctgcctttttttggcattgaccgattcatattgaaccaattttatgtcattggttgattcctaatgaaccatttccttgtctacaagctcttggcttgccctcttacagtgatgagttggagtctctccatgacagcaccagactggaaattcttaacatgctttccaggctcattaacattgagatagtcaaaatctacacgatgtcctcaataattttgagaacaggccatgaaagaaaatgttgtgaaaaatgtgtttatggttaatgattcaacacagttaacagaggtgacttggctttctgccctgccctcatggcaacatgcggcttcccagttcagcactgtcctctgctgttagggcctgggaattctgaatgagattcagtccttggagttgaaaaagtaatttacctgatgcttggtggtgtgaatgtttgtgacagtttttgtgctaatacattttgaaggacatgttctctcaaaatagccccttccactttctgaatccacactccagttttctttttaacttcagtgagtggtagtctatttgacctgatgtgcagatcttctggcacatacatttctgctgtctcttggcataacaaattggcagtctatccctatgttatgtacactgtttatattgaaaatttgtctttaattggtctgatactacatcatctgctagggccagtagtttgtcatcagccaatttgtacacctgaggccctcaaacaaacacgtgcttacaatgtttctggcactatttttaaagcttgtaagaattaaatgagatagcacaacaaccccatgagggtaagtaccgttaatcccataatatggatgaggaaactgattcatttagagggattaagcaatttgcccaataccacatggctagtaagtgacagagctgggttttagctctgacactttgattctggaacctgcacatttcatcattatgtcagatgccctgaagaggatactgtatatcatctcatctcacatgctgtgttcaggcaggtgacgtgctgctcaatgctggttttgatgtctttactaaactactgatctatttttgagatttaaatctcaaaacagtgatactagtgagaagtagtccacctttgttaatccaccaaatgttccggttagggaacctaattttggtaacttcaaggcctctcctgctattgggagctaagcatccttcactctggactctcacttgcttcactttagaatgagagctttttagggtaaaactcaggaagtaggatgactgaaagaaaagcctttcttctccacagtagcttatggggaaactagtaaattaattgccattattccttgccactaaaggatgagttcttatggtagcaataaatagacaatagggctgtgcagacctccaacaaactgtcttttctggggtcaaaaggggtctgaattaacctcttcttaaattacagctctgtgacacctgcaggcactcataacaaataagaacaccaggccaggcacagtggctcatgcccgtaatcctaacatcttgggaggctgaggtgggtggattgcttgagctcaggatttcaagaccagcctagacagcatggcaaaaccccatctctacaaaaaaaaaaaaaaaatacacaaattagccaggcgtagtggtccatgcttgtagtcccagatactcaggaggctgaggtggctgacttgagccctgggaggtcaaggctatagtgagccatgattgcaccactgcattcctgcctggctgacggagtgagaccaatagggcagcaagaaacaaaacctcaacactgaaccggaatgtccatgacatactgtaaaaaaagaaacctcaaatggacaataactgtatagtgctagttgtaatgattgtgcctttttttttttttttttttgaaacggagtctcgctctgtcacccagactggagtgcaatggcacgatctccactcactgcaacctctgcttcccgggttcaagcgattctcctgcccaagcctcctgagtagctgggattacaggcacacaccaccacgcccggctaattttttgtaactttagtagagacgaggtttccccatattggccaggctgctctggaactcctgaccttgtgatctgcccaccttggccaagaaatctctttaagtattcatttgtactttaaggtaatgctcgatctcgctcttagtacagctgaattgtccttcaaaaagatgatctggttatgtttgacctcttcctcaagggaccaaaaagggaagttctcagctttttatagtatgaggtccctagaggttttcactttggggatttaaaaacaagtttcctgtagctatatggaggaaaaaaaaaaaaaaacctaaaggggaacatggaagaattataatgattggggcatgataattatgtccagtttttaaaactccattcttaaaaatgtcttataatttataggttaaaaatttaaatgtttagaggaagcaggacaggtttatgagtctctgacctgggaatggagtgggaggaatagagaaggtggggttgcaagaggagaaaggcagaggaatttcctaccgtcttcctgttttttgttgatggttagtgattaatgagacaagctgttctgtttctctgggagtcttgactgtcttgaagaaaaaaaagaaaatttattgcaacccaatgcagcttcagatttttcctctatttttttttttcaattaaaaacgtaactgtccctaatttaggaactgaaattcccaaacctccccattcacctattcaggaagaaatgaaatggaacctaacatctacatttcttgggtataatatcaaaactttaatactatggggatgaacatgtaagcaaatgcaactctatctccccataatgttggaagaatctaacttgaaaccagacatttggtttggatcttggcactttcttgcatggaaatattccaagaaggtgcattgactcttgatttgatctagaaaactgggttctttccagagcccacccaggatggcacctcatagactaactatggacttttccatcaatactggaaaacagtttcatctaatccccggaccaaaggtgactcggactccaagtgagcttcctcaggtttgtttgttaatttatccaatcatccattcactcagcaaacatttatcaatcatttgctatgtatatgccagacactacaccagattttgcaagcacagagatacaaaatcccttgcttgcaggaaaacctttggtttcaataaatgataggagaggggttgcaggggtactatctatgaaagttcaaaggaagcatctaacttagggtggtaggggatggggctgagcagaaggatcaggaaggtgttggatggcaggaggcttttagctgagccttgaaaaggcaaggggaggttggccgctttgatggggtgggctaaggactatccatgcagaagaaagagcaggtattaaaggtgtcaaggcagggagttacctcctttgggaactacacataaagaagaatggctagggcctggtgtatgggattggggtgggaaacccaaggcaggaagaagacagatcccaagaggtctggtgtgcatgctgaggggatcaggtgccatctcaatgccatggggagtcattgaaggaaaagcagttagagccatgggatccagttcacatatgatcaatcacccaaacaaaggaaagtttactcaacaacatgttttcatttggacttcattttgtcaaagcatgaaagtgatgtcagaaatagaaatgagtgtattcatggcacaccaccacacccagctaatttttgtactttttgcagagaactcctgacctcaaatgatccacctgcctcggcctcccaaagtgctgggattacaggcgtgagccactgtgtctggcctaaaacacattttctaagatttctttacttctgggccacctccacaaaattttatggttctgggaacccctatctgaaaaagcacaggtatcagcaataagtataatgaacactcactagagggaaagtcattttggtttgggttggttatggaagcagtgtcatatgaaaagggctggactgtactgcagaaatagaagacccacaaattgctatggcttataacagaaaaataaagatttagatgtcactcatatgtccattattgaacagttgtgactctgctccctgtcaccttccctccaggaccgaagctgacagagcaccctctatccaatcattgcctgtcttatgtcagagggaaaggagatggcaaatcatgcatcagcccttaaagctctgcccagaagtggtacattaccatttctgcccacatttcactggccagagcaggtcacatgatatgcctgagttcattagggcaccagatgttgggcaaccaataatacaacccaccactgaggtctttactaagaagatgacctgggccttagggaatggccatgatttacctggtagacacagcaggggagcaaaaggaaaatatgacaatatttttatgaaatcaagacttggccacatgaaacttttttttttttttttttttttgagactgagtctcgctctgtcacccaggctggagtgcagcggtgcgatctcggcttactgcaacctccacttcccaggttcaagtgattctcatgcctcagcctcccaagtagctgggattacacgcaccaccatgcccagctaatttttgtatttttagtggtgacagtttcactgtgttagccaggctggtctcaaactcctgaccacaagtgatctgccctcctcagtcttccaaagtgctgggattacaggcatgagccaccacacctggccgtgacacccttagaaaactaacttcaaggcagaatgcttcacagtgacaaatcttaggatgccactttatagaaatattctgaagagagaaaaacccaggtgagtcagagcagcctggggaaacttcttagaaccaggattttgtggaattcagaggattttaaaaggcagaaaatccaatgaagccattttaagctaaaacaatgtaaataaggtggggctgtgcctagggtactagggtgcagaaaggaacctgcctcctgtgggcgcatttgtgttagcaggtagtgggaaattcgggtggagggcaggtgatggaggaccctgaacaccgagggaagactctggatgttatgtgccaatatttatcaagaaaacgcagtcctggagatacaccaataatttttgaaatgttacagtagatactaattgaaacctacagtgcgccaggcaccgttaggttagcagtgaacaaaaccagcaacctaaacaaaatggtgaacacaccaggcagtgcccttgtgggttacattttggtgagacagatagtatatagataaacaaatatacaatctcaaagagtgaaaaagttgtgaagaaagatgacacaggattagagagtgactagggtgtatatggtggcagtggtggtggtggtgcagccaaggggtggggtggaggacaagacagctgtgaagactggtgagcatgaggtagtccctggtaacaaccagcgctccacaccctaccctcagagtgccattgcagggttagcatactccactgagtaaagcttccttgtccaggcaatcagttagaagagccaggaatgctgggcccaaagaggttggccagagagaaaagtgcaggggacatggttcccagatccacgcagaacccctggggaccactgagttccacaacctcaacaaggcccagggttatactaacacagcaggtggcctcattttagaccccacaccagaatctgtgcaacgggaaattccagtgcagcagaagttggagtcaaatgcctgcctatttctcattccattttgggaagcctaaacagggaagccttctgtgttcctctcattcccatattaaactgaactgcaaaactcatggctctaagtagactttagaattgacctaggcagaagaaatagcccagccccttcattacttcagagcagaatagagcacttactcttatcacagcagcacaagacccctgggacacctgactccctgagacccttccttgacaggttcccctgtccataaacaaagtcaggaattcccagcccactacacagaatatgacagttaagcttcattgggatcctgtggctgacctggggcaggctagagggcatcacatctgtacaggctctcagctttgcgagttcagaaacagactgggtgttcatgtggactggcccaaacctgaaactctacagaaatcgcagtgcatgccaggtggtttgccatgaaaaaaggtgtgtgtcccagagacagggtgtgtatggtacaaatggattttgtccatgtctttccttcccttgccagtccagccaccctactgtctttttttttttttgtcagtttttgtttttttttaatttaagttctgggatacgtgtgcagagcatgcaggttcgttacataggtatacatgtgccatggtggtttgctgcaccttatcaacctgtcatctaggttttaagccctgcatgcattaggtatttgtcctaatgctctccctccccttgcccccaaccctccaacaggcccaggtgtgtgatgttcccctccctgtgtccatgtgttctcattgttgaactcccacttatgagtgagaacgtgcttaccctactttcttttcggtttgtttttttgtttgttttgagacgagttttgcttttgttgcccaggctgaagtgcaatggtgcaacctccgcctcctgggttcaagggattcttcagcctcagcctcccgaatagctgggattacaggcatgtaccaccacgcccagctaattttgtatttttagtagagacagggtttcgcgatgttaggcaggctggtctcaaactcccaacctcaggtgatccgcctgccttggcctcccaaagtgctgggattacaggtgtgagccaccacgcccggcctacctaccctactttcttagcctatttgctgactagcattcaaactgagtgcagggagaacacctagcagcctgatcccagaagtgcagctactccacattccacagctctggggcagagtgactaaggctcacctgtagtccttaaatggagagcaatttgggatgtaccagctaatcaaataaaaccaaggcagcaaacaatagccatcacttctcaaaccatcctcattgtgcccctcgactccctccttccatttccagttctccccagaggggagacagacaataacctcaacaacagaagccagtacacagcaagcttgcttcacacgttcacgtttcttttgtttttctttgatgttttttctttgatgttttccattttccatctctgaggtgattagcagtacagcatagtggttaagaacagagcagggactccacggatagactacccagtcttgtcctttgttacagtggttcttaagctttcaggtgactgggaatcacctggagagcttattaaaacgtagatttccagccgcgtgaagtggctcacgcctgtaatcccagcactttgggaggccaaggtgggcagatcacttgaggtcaggagttcgagaccagcctggccaacatggctaaaccccatctctactaaaaatacaaacatgagttggccgtggtggcacacatctgtagtcccagctactctggagactgagacatgagagtcgtttgaacccaggaagtggaggctgcagtgagccgcgattactctaatgcactccagcctgggggacaaaacaacaaagcgagactctgcctcaaaaaaaaacccaaaaaaacaaaacaacacagattactgctccccaaccccagagtttctcattcagcacatccaggatggaacacaaggatgtgcagttctaactagttcccaggtgatactgatactcttggtaccatgaccacactttgagaacctctgccttatgaagtttccaaagactgttgacttgtgtgtgaaaggataaccctatacctaccacttgtggctattagggttaaatgagtgaatatacgtaaaatgctttgagctgtgaataataaaatgcaagcatagctagtctggaaacttcgcccatgccttttgtctctgttttgtttgttaacctccatttgttttgtttgtaataaaccacttagccaggtacctcttcctctccttcaaatacagagggcgtgtgaactttggagaatgagtgtttaaactgacctaaataatatgtgattttcaactcttctgtggattcactcattattcaatgtgggctttgcgtgccatatgtgataaacttcttgtgtgtggggtatagtgggaatgtgcatacgtgaaattgatgtcagatctttggatcgttgttagggaagataaaaggaactcacactacagtgcagccttgccagtagggctgttattcccacttacgtggaagaaactgaaactcagttcattgaggaaactctctcaagcttggacttaggtcagaggtgacttgtaaggatacacacagagaaacatccaagcctgggaaaccagctgatctattactctgtgtaccagaactttatgtatcagaccaaacacacaacaagcctcacgaaaaactggaatgtgcttcacatcactgcagctttgtcccaatgactgggccacccaaggtctctgcttctccctaggcatgtcccattgagactctccacatagagatagtctgatggagttgtgacattaacacccaatgtggaatgtcccggtggggtggcctcggattcagttgtcttgttctgtaatcagtcatagccaggaagaaagcccagtcttgctccaggagcaaaccgtagcagcatgctgctgaaagaactgcctggggactttttccccagagtggggttggctttggcctgtctagtactttcagggacattgaggcagccttagatcctcagaagagcacagatctttggaatcagacagacttggatttgaaccctgtttctgccacttaagtttcctcaactatgcattgtggctatcacacacctcacaggtgtgaagatcaaataacataaagtgcttagcagagtgcctggcacatagtatctgcacttaatgaatgatagggtttggtttttttttttttaaattaaaaaaactggaaagatggaaaggtgaaaataattactcagctttatcatcctatcatttagcctcttatccctgacagtgtgccattttcaatcctgtagggatgcattcattattattaattttttaagagacaggtcttgctgtgtcccaggctggagtgcagtggcacaatcataattcactgtaacctcaaactcctgggatcaagggatccttgcacctcagtctcctgagtgtaaggttcttgtattggttggaaccctgagagcgcgccaacagaaaacacgaggcggtgtgaagcaacatgctgttttaatgagcacctgggtacaggcaggctgaagcctaaaatggcatcagccccaagtgaggacagggcagaggttttatagtctcttgtaaacaggaagtgtcctagtctgacgtaactgctatgttgtacccaggtggcctgtttctcgatcaggggtacatgtcttcgtccagggtaggtgtcttcctgccggctctcttcctgcttctgctatcttgctgacacacgctgctgacacaagtggacttgcgccttgggactgggcctgagaagggaggagttattcatctccttaagctttcaggccccggggagaatcttataccgcgtagctaggattacagacacatgccaccacacccagctaatttttaaagtttttgtagagatggcatcacactgtgttgcccaagctggtctcaaactcctggcctcaagtaatcctcccacctcagcctcccaaagtgctgggattacaggcatgagccaccacacctggcctcatccattatttaatttaaggctttatatgctacgaagctataggtttttaatagaaagtctgttttacatggttgtaattatataattttgcattctttttccatactataaaatattttaatgttataaattctgtacgtaattttagtgaacatgctataatttacataaaattccttatcattggacacctaacaatagagaattgattgaataaatggtagtgcattcatataataaaatattaatcagccatttaaaaaggtggattagaagtatacttcttaacatataaacatgttcacgattatgtataaaatgaaatgagtgtacctaaatatcaactacctctcaagtctgtctggacattttcctacctcagtctcagcaactttcaaactttaatgagcctcccaatcaccaaaggaacttgttaaatgccagtttcacgctttaccccaagagtttgactgagactggggctcaggaattggcacttttacaaggatcccaggtgcctctgatgtgggaaagacacctcacctatttctgcctgttgaagctatacttaattttccaagcttctccttcttctttctcctgaagtcctgtagtattttgtagcacttgtctgctttcttgtcttagagatcttagcaaatgcttctaaattgtaaaacttttcctgatcctccaaccaaacctagttatgcacccatgtcacagccccagaatttgtgttaaaccctgtgtgagttgctgaatataaatactgaaatctctggaatccaaacttcatttactttgtggtggagagagagtggctgagtacttcagaactctttagaacacctgttatagcaggaacttttgggaataaaggtggtctttctaaccttgatttaaaacaaaaacaaaaacaaaaccttgtttagattacttttacttacctgacagtcaggttgtgaaaagtaaatagtttgtcctttgtgcatttgctctggtctaggccagagatagccagtaagctggagagggcagttaaaacccttcaagaggcctgtcattccaaagaatagttttcttcaggtctgttggttggttttcattctcagactgtgtcactgaggttgttcaaggtaagattcttatcttgcagttcacttagggaccacttatgctaaaattgagactgagttactcatcaaagtacttcttcacttagatttttatcagtgtgatttccctccttctttaaataatattggatatccatatcaagtcaggtttatgtcatcttacattatcttttatgtaataggccagcttgcagatgcatagttataaataactattgataaatattatattgagatgacactgaaattttgtccttgcttgtaagagaactagatcatattctgtataattagttaacacaaaagaattcctcagaaacaaactttaaaagccaggtataacagctcactcatgaaaagttccttgtttcatatgaaaatggtaactttgtagaagtaaagctccagacaacaaagaattgacagggttggggaatggaaggttaatgaaattggttaatcaaatgcttctgatggggaatcaccacatgtagtgtacttgtccacatggcaaactcggaatcactcttcagaaccttgtgtagaggcatcatctataaaaccctgcatctgtaaggctttttcatcagccccctccttggaaaaaatttctttttttattctatgcccacaacagtacactacacacacatctatcatatgtcacactctagtatatgcttgtgtgttactattatccaatagatcagaaattcattgggcatagagcatgtggcttatttgtgcaatctgacccaggttcagtgcctggatatagtagtattcattaaatagatgtatgaataagaattctgcactgaacagggtacataaatcatataaactgcattttgtgggtgttttctgagaactcctgcagttaaatttaaagcatcaccttatgacaaatttccataaaatattgttataataaattatgaataaatgttgaaaataacaagcccagtatctgctgttccctgagtccctgatggcaactgcatgctccccagtctgtgggactcctgatttaaagagctagatctgaacttctgcagaaacctgctcaacatttgcccattggttgctgtgaaattcctctcctgggctcttaaattccacagaggcttaattattacagatatttaaactttgtacatacatgacggatatcaaacatacccacatctctaaggtaaactgtattaaaagtgccagacaattttaaaattgaaagggacttcgtcatttttactggttaggaaaccaagcctcttaagagacaagcagtttttgttagtgggaggagcactagaattgaagtcaaatagaccagagttcagttcttggctcaggggctcaaatcacagcctctgatcggcagtgtgatcataagccctttacttaatatttttgaagatcagttttttcatttgtaaagtttggttaataatccgtctcagtgggtcacgacaagggattacttgagattacctgagccagagcagcacacataatatctgcacaaagcaaatcctcagtgagcttttgtctctgccctttcttgcccagatcacacagagctaagacttagacgctttctttgggttgtggttcccagttcacctgacaggactcacacatatcaaggatgctcccaaggggctgtgtcacatcagcatttaaatacagaattcaggatctcctgctttaaaaacaatctcccttctgagttactctttttaaattttatttatttatttatttatttttgagacggagtctcgctctgtcgccagggctggaatgcagtggcgcgatcttggctcactgcaagctccgcctccggggttcacaccattctcctgcctcagcctcccgagtagctgggactacaggcgcccgccaccacgcccggctaattttttgtatatttagtagagacgggatttcactgtgttagccaggatggtctcgatctcctgacctcgtgatctgcccgcctcggcctcctagagtgctgggattacaggtgtgagccaccgtgcctggccctgagttacttttattgctgttgtttttttttctttccttgtactgcgagttatgacaccctcccagtcaaccatcaactataatttaactttatataattgtgtgaattagcaagatcctaggaggctccaggatctcaaaggctccaggatctcagggtaatgtatatacacattttagaagagtaagatctacatcgcctaataagtcttcagcttttaaaaatcacattctaaaataataagtgaaatatttgtgctgaattgaaagggtttccataaattctgacggtaaacgatgagtgttttaagcatggagatgttagtcatacaaacttaagtcaccatgaaacaggcgatcaagtgggggaagcagcatcctgtttcctagtcttaccagagttcatttgtcattttaagagacaacttacttttccatcttttcttcttttcctgtaaaggtagaaacctgtgggttcttgttgtggggcggtttccaaaggaacacagaattgggattccagagttcaaatacgtggcaaatatgcatggagatgaggtacgtatgtggcttgaatttctgaaatgtcaccagagaagcttcccctagggtctcttgagctctgtataaatgctaccgaggaagcctggagaagtctccagcatgcattgtacaaagaagcaaggcccagagaggtcttcctgtgaggcctgtgggaggttaaggaatcagggtccaacaaccaccacagctgtatggttgtgtacccagcaccctgtcagagtagctggagcttgttttgtgtttggggccggaagaacaacagttccccagccctgaacttctgccagccaatccctgcatctcctttctgggttaagttttcccacctcctggtcagcatgaaggtgacccagcaaaggagctgtattgtatccgaacccacaaccatcagaaactcccaaatagctacccaaattcctgagatctggcttttcaaatgcttttgttactctctcttaaatctaacactcattgtcttcagtgctccagtttagacaatcacacttatgattctctcctactcaccattcaacaaacacttggctgggtgcagtggctcacacctataatcccagcaatttgggaggccaaggcaggtagatcacttgaggtcagtagttcaagaccagcctggccaacatggtgaaaccttgtctctactaaaaatgcaaaaaattagccaggtgtggtggcgcatacctgtaatctcagctagtcgggaggctgaggcaggagaattgcttgaacccaggaggtggaggctgcagtgagccaagatcgtgccactgctctccagcctaggcgacacagtgagactccatctaaaaaaacaaaacaaaacacaattttaaattccttaataatatcttgcctcttttccaacttagcagggataaactctccttttatttttaggttctacaaaataccatttaccactgttacctacccagccattcttgccaggcagttgaagatgttcacctctgtttctcaccttgcttcctcagaatattttgagaccatgacaactgaaatattttctgtttaccaggactctataaaactgagcgatcaaagagtccccagccatcccagtaaggaaactttgcacaggaatgtgggtattaccctgtaaaacacaacttataactttagggactttctcatttacatacatattccaataagtactacctgctgacttgttaaaacacttctggatttgcaatagtatgggtggcatgctctaatcagtgctgagcttcctgttctggcttaagccctccccaaactctataggaactggatctacccttcatggtacactccgcctgcccttgccaggcatgctgcccaacctgtcctgctgagagaggatacttcttgcagctgcagctaagatgcaagcacctgcccctagcaaaggaataagtttttgaacccgattttggggtgggtgcaagtttagcccatctgtgactttttgagcatcacgggcggcttctttaaaaaagactacgttgcaaggagtctgaccaaagttagttttaataaaacaactgttcgttatagacagcagctcagactgcgtttcccttttgctatcttgtctattgatcgaggtcccttgatcaaggtccctcagaatgcttttttttttttttttttttttccgatggaatttcgctcttgtctcccaggctggagtgcaatggcatgatctcggctcactgcaacctccgcctacaaggttcaagcaattctcctgcctccgcctcctgagtagttgggactacaggcatgcaccactatgcccagctaatttttttttgtatttttttttttttttagtagagatgggggtttcaccattttggccaagctggtctcgaacccctgacctcaggtgatccgcccgcctcagcctcccaaagtgctgggattacaggtgtgagccaccgcgcctgactcagaatgcatttgtaacaagagacatatggcattcattgtctttagtagtttttttattgctggcatttcagaggttccagctatctactcagaaattagtcctcagaactgaaactcccaaagataagcaagagtcctttccgtcccctacccccgaatttgtttattctttccatgcactttcctaaatttctggcatcttgttgtctggtgtatcgttcaaatcagggctcgctagtgcgctctgattctttgagaaatgctgagggctgagactaggcagcggggaaaagtcccagtgtattttggggtgggaatctgaagcacttttacccccttatgtgacccagctcgtggcaatgtctgggggctctatggggctagtaagaaatttattattctgaatttgagaccttatctattctgtcctccccatgccgctaggagctgaagaaagtgatggcttaacattggagcagagaagtccttctgaatacaggatataacaaccccctttttcctcccatagatcttttgaaattgaaagcatttttaagaagcaacagagctaacattttagggcagtgattcttaaccttttttggtgtattccttgctattctgttataaatttgacctgacttcagggtctgtggattacctaggagtttatggaccttaggtggagaatcccagcagggaacacatacacactgagtggcagggtggacagaattggccacactatttttaaaatgggaccccacccccactgtgcgtgtgtgtgtgtttgtgtgtgtgtttccacacttaatactatggctagatgacaggaagcatcagctgcatcagggagactcagctctgctgattacacctgccattttcccccatgtatttttattttacttatttatgccttgttttagaattgggtctttttttaaattagaaattgtctggtggccaaaaagcatatgaaaaagtgtctaacaacactaatgatcagagaaatgcaaatcaaaaaccacaatgagatatcatctcataccagtcagaatggctattaataaaaagtcaaaaaataacagatgctgatgaggctgcagagaaaaaggatcacttacacactgctggtgagaatgtaaattagttcatccactgtggaaagcagtgtggtgatttctcaaagaacttgaaacagaactacgattcaacccagcaatcccaatatatacccaaaggaatataaattggtctgccataaagacacattcacacgtatgttcattgcagcgctattcacaatagcaaagacatagggttagtctagatgcccaccaatggtagactgggtaaagaaaacatggtacatatacatcgtggaatactatgcagccatgaaaaaagaacaagatcatgcacttgcttatagaacaagatctataagcaaactaaacagaaaatcaaaaaccacatgttctcacttataagtgggaactaaacattggatacacatgggcacaaagaagggaacaatagctaccagcatctacttgaggatggagggtgggaggatggtgaggataaaaacctacctgttagatactatgcttattaactgggtgatgaaataatccatacaccaaatccccacaacacacaatttacctatagaaccaatctgcacttgtacccctgcacttgtaacatttacctatagaaccaatctgcacttgtaacatttatttttaaaataaatgttaaaaaaaaaaaaaaaaaaaaaagcaggccgggcgtggtggctcacgcctgtaatcccagcattttgggaggctgaggtgggtggatcacctgagtttaggagttcaagaccagcctggccaacatggtgaaaccccatctctactaaaaatacaaaaaattagctgggtgcagttgtgggtgcctgtaatcccagctacttggtaggctaaggcaggagaatcacttgaacccagaaggcagaggttgcagtgagccaagatcatgccactgcactccagcctgggcgacagagtgagactgtctcaaaaaaaaaaaaagaaaaaaaaattattacaaaatcaacatatgttcatgttagaaaaagtataaacaaaacattatatactgaccttcccaaaattagtgctcttaatttcttatttgtttttccagatatttgtgtgtgcatgtacttttaccaaaagagatatgctatttgcaacacttttaagtaaatactagctacctttttgtaccaataaatctttatcctatctttatcttatcccccactttctagtttctccaattgtcctcaaatgtctctaaaattacccaaatcaggatccagtcctggctcatgcatcgcatttagtggatatgttggatctcttggatctcatttaatccagtatctttttattatgatactaggcttgataaagagcccaatcagttgtctgccctgtagaatgccacatattctggatttttggtttgcttctttatagtatcactgcagttgtacctctagtccctgactttacttcaaactggaaattaaatctaaaggtttgttgaatttaatgtggctaatacacatcttaggagttgtgacgataggttcatttgattgatgctgagggttcaggctaattcacctggctacactcaggaatgccaaaagcaaactccgggtagcaaaatcaacttaaaatggcccattttcagccaagtattgttacaaaataagtaaagttaaactcactcctcattttgcatgaatttcacgtattctcttattcttgcaaaggtcattgttctactaggatcatggctcatactgtagatatttttcttgtcttcagtgaccttccattgtctcacatgctttctatggcacaggctcactatgccacattaatcaggctggcaagttgcctcctcaaacagtgctttacaagaaaataataacaatagctaacatttatggagcacagatgacaataagtgcattttaggcctcgtttctttggatcacctctgcagaaggcatgtttattagtcccatgtaccatgaagggggcccaggtttatgcttggtcaccagctgtgggaacccggagcctgaacaccaagctttgcccagctgtggatccactcctttactctctcttctctgtttttaaaatgttctgttttatggttttcattcttaagtatagatctatgatctatctcaaattaatttcactgggatggatactaagttgttgcagcaccatttggtgagaggatttgggcttgctgttatgtaaaagagtaacaagctcttggagggcaacactggaataagtatcttccagtcacctacctgtccctttctttcccctactcttcacttctctctccttgactgctggggagctgacagacatagcactcgtggtgagcctttgtcaccgatgtttattcattttttggagcagcatgggagaaacatttctggggttctttctcattttaataagactagtaggtgtttttctggttcatccaggcacacacattatttgcacacatattggcatgttggattgaagcctcaattctaggtttaatttacgcaagctcctaattggcatcacttggcatacctacagttgaatcttttttttttaattggaagggttgatgccagtgcaggctgaatggggttctctgccattcctgtatgctacagatattcagattgcctgggaacaggatccttgtcccctcaccttcccccatcacctcattctgctcctggcttggtgtgtagtaaactataaccaatactctaaaatcagagctatactgaaaactgggaccatgccctgaaaccaggagcatctaacatcctcagcctaaatgtggatgcagaagagaagcctgggaaaatcttccccagccctccctactctttgttttgtgcttatcttctatcccatgtttttcaaattttgcagaaaaaatacttttcttgggtaatctctaggttggtaagacatctttaattcctgcctaatggaaatattgaagcaaggcatgactgtgtgcttaaagaattgggtgcccaggccaggcatggtggctcatacttataatcccatcactttgggaggtcaagctggggagattgcttgaggccaggagttcaagactagcctgagaaacatagtaagaccttgtctctaaaaaaaaatttaaaaattagctaggtggggtggtgcatacctgtggtcccagctactcaggaggctgaggtggaaggattgcttgagcctgggaggtcgaggctgcagtgagccatgatcacaccactgtacttcagcctgggtgacaaagcaagaccctgtcttaaaaaaagaattgaatgcctagagttttaagccaaccctagtaacattaagcaaagtatcataggtcagagcctgggttcaaacccaggtttccttgacctcagtgccaagggtcttaaatactgtactgtaggagtaactattgaatatgcttgtaaaataatttaactaaattgcaattattttttattttagagttgggatctcgctctgtaacgcaggctagaatgcattggtgtgatcatggctcactgtaacctcaaacacctgggtccaagcaatcctcctgcctcagcctcccacatagctaggtctagaggtgtgtgccaccacaccaggctaagttttttattttttgtagagatggggtcccacagtgttgctcagactgttctcaaactcctggcctcaagcgatcctctggctttggccttccaaagtgttgggattacaggcttgagccattgcgcccagcctaaattgcaattctgcttttttggggagatggggggtaggaatttttttaagccttagtttcttaaagagcaatgaagtatttttactaagatagacttaatatgggcttttgtaactgcccaacaggttcattttgcctgttgtccagatagagcagatttatcaagacaggggaattgcgatagagaaagagtttaattcatgcaaagccaactaaacaggagaccggagttttactattactcaagtcagtctccccaaaaattcagagactgggagtttttaaggataattttgtgggttgggggagagacagtggggagtggtgattggtcaggtcggagacgaaatcatagggtgtcaaagctgtcctcttgtgctgagtcagttcctgggtgggggccacaagaccagatgagccagtttatcgatgtgggtggtgccagcagatccatccagtgcagggtctaaaaaatatcttaggttttacaatagtgatattatccctctgagcaattggggaggcttggaatcttgtggcctctggctgcataactcctaagccataatttctaatcttgtggctaatttgttagtcctacattcaggaaaaggctattatcatctttgtttcaaagttaaactatgaactatgttagtttagcctatgcccaggaatgaacaaggacagcttgaaggttagacgcaagatggagttggtttcatcagatctctttcattgccataattttctcactgttatgatttttgcaaaggcagtttcacttttgaaaaattcgcatcacatttagaattttatgattgtggcattggtttatagtttattgtattccagaaatataggttgaaaagagaaaacattccctgggtaatagtggccatatttgtcaacctgaaaataaagagataaaggataaatgactttcacacaccttctaagtataagagacagttgatgagatgtagtttgcatgtctaaatgttttacttagggggtattttaatggtttacgcagacagtgggacacaatatctgaaattatggccgttctggaaaatctgggaagtacagtcaacatgcagtagaggttcccaacttatcattaaaccaaaacacaacattaaagcttgtctttctaaatgccgctgcccaagctccttttcctaccactatcctcaggtgatagtaaaatgtcctcagtaacgctctgtggtttgaataattaaattctttctttttagatttaggcagagctcattgttttccaggtgaaatatctaattcattttaagcatgttttaaattaatgaactgtttggtgaccagatatcccaagtccctgtcatgagcgtaattgttagcctgtgcctctataaaatgtgttcggtatttaaaaatccttcagataaaatagcttgatcatttgtacatctccccttacaaagcaccttaagtcctcatgtgaatttcagaaagttcttcctcaggatagtcttgatcttataatgaattttcaacagtagtttattagcaattatttattgaatacatgatataccaggagctggacaagctacaccaagaacacagggatacagagaaaaaccgtgaaggtccctgacttcggggcttcgatggtggagttagagaaagggaggtcagtcaaggtcagccaagtgattgtaacgtgtgtgacccgcattagataacacaggtgtcatggtgaacccagacttgggaggtcaagaaaagtatgctagataaatgtcatgtttaggctgatatttgaagaagaaggattagctaggcaggtcagacaaataacttaaatctataacacacacaccactgtggagccccacagcccgatgactttccccccagaagctgcatcacagggtagcatttcaaaaacagattccattgttaggatagctgaagattctctctctctctctctctcacacacacacacacacacacacacacgcatgcgcgtgcacacacacacacaccacacaacactgcctgggttgtggattgttccttcaaaaatttttttctgttttttttaataaacattctgtgaagaaccagaacactcatttgtatctgtgtggcaaattccaacttgactgaattgaactgcagctgatagagaatgtattttctgctttctgggtgactgccattttaaccaccggatgaaggagatggagtgagagtctccggaggccggtgtgtccatcaggcccccgtttcttcatgagggcttctccctgaagtctgtgctctcacaggaaggaagccagcatgctgggtgaaaggctgcctgggcaattggagactcttttgaccacattcttttttaaaatttggactctccagggtttcctgtcaaagacttaattttcaatgaagggaggtttatacataaaacatgaatgagtgtttgaaacatttatattaaggttgggaagaattaatttgaataatatttggcataaatctgctgttacagaggcaggaaaagatggcccaaaaagaaaggaggattttgtttaactgcctctgaaatttcatctgtttatctcagcatttaaaaaattatctgatgcttagttggttctttatcttattttcaagatttttatttacccttgcaattgagaacttgtgatttgttgtggactattgagacacacaaaaaatactttggttacatacttgtttccctgaaagaatcatgattttattatttttgtaaaaatgacataggttttctttaaaaagaataagaggaaataaaaatcattcagaatactgtacccagaaatagccatcattaatatttgtcagacatcattgtagacatctatatatttctgtagtaagagaatgagaggaattaaaagaatataaaataaaatgtctcatatgttatattgtatgaaattttattttatttgaattaacagaagaataaaactgaagtgaaactaaaataactggtgaaattgatgctttctcaaaataagaaattgattatcacatttgtctttcttttttttttttttttgagacagagtctcgctgttgcccaggctagagtgcagtggtataatctcggctcactgcaacctccaactcccaggttcaagcgattctcctgcctcagcctcccgagtagctgggattacaggcacctgccactacacctggctaatttttatgtttttagtagagacagggtttcaccatgctggccaggctcgtctcgaactccctacctcaggcgatctgcctgcctcagccttccaaagtgctgggattataggaatgagccaccgcgcccagcttgatgatcagatttttctaaagttaagaaaaaagattattaaaaactttgaaattgtagtcattttatgtgtatatattttaacttttgatagtattttatgtccccttactatgaaatgtgaagtaattaacactttgaaaatttctccctcaacttcttttttttttgaggtggagtcctgctctgttgcctaggctggatggagtgcaatggcacaatctcggctcactgcaacctctgcttcccaggttcaagcgattctcctgcctcagcctcccgagtagctgggactacaggtgcccaccaccatgcccggctaatttttgtatttttagtagagacgaggttttaccatgttgcccaggctggtctccaactcctgacctcaggtgatctgcccacctcagcctcccaaagtgcttggattacaggcatgagccaccgtgcccggcctcaacttttatattttgttctatacccatactaccaagactgcttaatctaattctgtatctaacagaataccaactcaacctagcctcctaatcatggtttctttactcttccttttcactttctttcggttgggtgaatttcattgccaactcgtgtcgtgattgtttgcatgctggagagtgtatgattcagatagctaagagacaaattcacatttagagtcacatggggattctgatatcacttcctctctgttcttgacttgggactcagataggccagggatttttgccgattgaaccatactatggcctctaaccagcatttagacatttaaggaactatgggactcctggtcacttcctcctcaccttcctgtacctattcctccccaaacccttctgagaaagcttcttaaaccaacgatctttttcacatttttttggttttttttcgagatggtgtgtctcactctgtcacccaagctggtggcgcgatctcggctcattgcaacctccgcctcctaggttcaagcgattcttgtgcctgagcctcctgagtagtggggattacagtcacctgccaccatgcccagctaatttttgtatttttagtagagatggggtttcaccatgttggccaggctggtctcaaactcctgacttcgggtgatccacccacctcggcctcccaaagtgctgggattacaggcttaagcctccacgcccagccccttttcacatttaaagttactgtcacagttttatgttaccagctcctccccactggctttaggggaggtcataagtagctcatcaaggttacttccaaaggtgctggaccttcaaaaacctattatatcttaaaattggaacccagtggggtgtacaagtgacttttttggttattagcttgtaaggactttttccagtgacaattttgactataaaaacaaaaatctggccgggcgcggtggctcacacagtaatcccggcactttgggaggctgaggcaggcagatcacctgaggtcaggagttcgagaccagcctggccaacatggtgaaaccctgtctctactaaaaatatcaaaattagccagacatgctggtgggcacctgtaatctcagctacttgggagggtgaggcaggagaattgcttgaatccaggagacggaggttgtagtgagccaacatggtgccactgcactctagcctgggtgacagagtgagactctgtctcaaaaaaaaaggtagtggaagaggaagataaaaaatgagtaggaaaaaaagttgaagtcaggattggacataatctgactctaaattttatggttgcctatgaatctataattcatatatcccaaattttctttctttcttttttttttttttttttgagacagggtctcactctgtcacccatgctggaatgcagtggtgcgatctcttctcactgctgcctcaacctcctgggcagcacaagcgatcctcctacctcagcctcctgagtagttggggccataggtctgtgtcaccatgcctggctaatttcttattttatgtagtgatgggatctcgctatattgcccaggctggtctcaaactcctgggctccgccttagcctcccaaagtgctgagattacaggcatgagccactgccaccagccccaaattttcttagtcccaatttcaattattctgtgttcattaggataacaaatgtttaaaatgtggtctctttatgtgccagtgagggaatcaagtgagaagtggtcatccaaggaccgcttatcctttgtcacaatgttgaagtcctacagtgaaatcatgactggaaattcttctgaggctccatgaaatcttttcttgcacagtgtctacatgaatgtgcctgcagcactctcctgattttctcacctgctgcccctgagttctcatttactaacccctcaacaacatctgttcttctgaagcagattccttgaacctaaaatgatagggagaatttgatgtagtctaagcagatcttcctatgataaggctgacatttaaattactttttttaaataagaaaaataatgactctctctcctggggagggattataaagcaagttctctcacaggccttcagtttcccaagccttattgatactgcaagctaatttaggtggatatgacagcttttaacattttaatagtcatgcttttacttaatatatattagaaatatatatctagaaaagtgataatgatatgaagtttctcaggagttggaagccagccttagcaacatagcaagaccctgtcttaaaaaaaaaaaaatctacaatgtgatgattttaagtctgttatccaccaatacatacatgataagcttcatatgcaccatgcattctcatggaaatacgtgattcctgtgcttctctgtaactcaacctcttgctctcccactccagaagatactttggaaggcaaccaaatgaaaaatgttgtaagaatcattattgcggccgggcgcagtgtctcatgcctgtaatcccagcactttgggtgtctgaggcaggtggatcacttgaggttaggagttcaagaccagcctggccaacatagtgaaaccccgtctctactaaaaatacaagaattagctgggcgtggtggcacacgcctgtaatcccagctactcaggaagctgaggcaagagaatcgcttgaacccaggaggcggaggttgcaatgagccaagatcgcgccaatgcactccagcctgggtgacggagttgagactgtctcaaaaaaaaaaaaaaaaaaaggaagcagcagcagcagcagcattattccactctaattcatttttgcaatatgtaaactatttacaaataggtactttcactcttactagcatttttcagcatacctcaggactgatcgccacctgatggccacttggcagagcataagcatgcttgagaaagagtgatcttacaaactagtttgggtctgagatatcatgtgtagagacccctattggggaatttgtaccgtagggagtgctttccttattgcctctgacctaataatgtcctcttttctctttaacacatatagactgttgggcgggagctgctgctccatctgattgactatctcgtaaccagtgatggcaaagaccctgaaatcacaaatctgatcaatagtacccggatacacatcatgccttccatgaacccagatggatttgaagccgtcaaaaagcctgactgttattacagcatcggaaggtaaagaggggctggtctatctttacttgaaaacaacacaacacaaaggctcccgacaggcacctgttggccttggcaagaggagatgtgtcatggtgagagccctcagagccggtgtcatgtcgctgatgtgccaaagctcaaggcacatcagggctgcctccggcttgcaggaagaaatgcaaataaggctactttgccccggtgcccacctagcctctccatcttcatttgccactccttctctctcccctgcctcctcccctctaggcctccttcctggaagtaccaggtgctttcttacctcagcattttacacacaccgtttccctgcctaaatagcatttcctccaagactctttctctcgacctgtcatacactagatcccctgataaactctcacatcacctggcactttactgtcagagcacaacttttaatatctaatttcttgcttcatgtctctccccccactacactgcaagctacctgcaggcaggaatcctgtccattgtgtttgtcgttgttagatccgcagtgcctggcagagcacccaggcccttggtaatgaccggttgatttattaggccagtagtccaagaactaaccataagcaagaacgggtcttgaaggagctctgatttaaacagtttattttgtttcaagctgccttgggaggtttggaatttctcagatgtctaatatacattcatatgtatgcaatttacatatatgtgtttgctttaccaaagctgaacaaaatctcaccacttgattccctccaattttaagtttttcaaatatatttaaacatggctgttccacgtttcacaagtacttctgtgtaatgtgtttagtgttgtttctgttatcagttgctacttaacgaaccaccccaaaattagcgacttaaagcaacagcctttttatttactgttgattccataggtcaggaatttgggcagggcagagcagggatggctactgtccgtgccacaggtctggggctcagctctggtctttctgagacaatttacctggagccatggactctccgtggactctccacgtggcgaccattgggatctcaaggtcccaaaagggagcatctaagagcagaagtcccaaatacaaacacttatcaaacctctgcctgcatcacaatagctagtatctcattggtgagagcagatcacgaggcaggggatgccatgggatgtaagtgccaggtgtgggtcatggcaggccacaagggcagccatccaccacacccatactcacgtttggaaagacacctggagcctaaaccaaagggcaagacactgtaagaatccactccctcatgccctatcaataagccctaaaatattctttcttttaaagggaaaattataaccagtatgacttgaatcgaaatttccccgatgcttttgaatataataatgtctcaaggcagcctgaaactgtggcagtcatgaagtggctgaaaacagagacgtttgtcctctctgcaaacctccatggtggtgccctcgtggccagttacccatttgataatggtgttcaaggtaagcaggtgcgggtccagttctggcttcttaagtccagagtggggctgaaaactctctgcctctggatggggatcagctctcccttcccctcttaacttctctggcagggtgaaaagagcttcatgttcccaactctagccatccttcctgtgattcttcaacagcagatgggcagtgtggctgaactgacaacccacagctggacatgcatcagtgaattagtgaaatttagattctagaaaatacaatctaaatagtcagattttgattctctgacaagagacaacatggctaaaataacataaaactggaacaactcacttttttttttgctaatcatatatgaacaataattgttgactcttcttaaaactctgtgggatgaggacccaaaatattacagtagctttattcacccctataatacctaaagaaattgtccttacctccagaaattagcaagagtgactgagaggacacttaatttttaagctgatttaggagtttggatttgtatctgacttatttgggggctatcaccttgcatatgtttattataaagtagaaagaagaatagaggaggtggatgaaggatttctctctagggaaattagagcatgtgtgtgtgatgcgattatgtctttgctaatatggtgtttgtgtttcctcttactctcaagtcagtttaaaggtcttggttcatcttttaaatgcagcaactggggcattatactcccgaagcttaacgcctgatgatgatgtttttcaatatcttgcacatacctatgcttcaagaaatcccaacatgaagaaaggagacgagtgtaaaaacaaaatgaactttcctaatggtgttacaaatggatactcttggtatccactccaaggtgagtttctcttcatttcttccattctccttattgccttcacccagaagtgccagctggtttattttgatccagcagttgttaaaagaactttaggcacaataggcccttcactctgtccttatcagctaatatcataagagcagtggagatgactgattgtttgagagatgctcagacatgttcctcattaccaagggccttcttcattcattcaggtacttattctgtgtctgcctactgtgagccaggaactgaaagatgaacaagacacacacctcaccctggagttgaataggggagacagacacgcagataagtaattgtgatagcagtgcaattagaataaaaacagatttagagaaggtgcagtgtaccccaagggtgcacagagccaaaatacaatagggagtagtgaagagcttggagaaatgtgatgcttacatcccatctaacagggacagctgctactagatctagctaattattgtcatgcagccttggggagccaatactgccagatcttgcagtttgtaaagagaagctgaatttgtacatgaagtatcatgattttaaagccattttgcgggctcaacaaaagagctcttcagacaggatacagtgggaggagggcccccagttctccaatcttggaataagacagccgggtaagggacaggatgagattgtcatgtaggcaacatggaaggagagatattcttattagagggaataatataaacagaaacccggggtaggagggacctagggtggaaggacaggaggagagacggactggaactggatttccatgcctcaggggaaaacattcccttttagactcgttagcctgaccccaccaacagcaagttgcggcatgcatttctgcgtgcaggccacttccaaaggtgccttccctaattgtcactttggatgcacaggctttcaggtaatctttcacaagctggtatttttatgcctgggtggctctctgtcagttttcctggtaatataaataagcatagaccacaactgataggcaacaggtccaggcagcattccaaacctctctctggtgtccaagatacagccccctctcctaccttagggcttctgcatcgtccctgctctccacaatttgtagctaagaaagggcccatcctgtccagtggcagagctgtccttcatgttcactgtctaactttcgaaggcaaatccagatgtgtaggaaattagctagaaacggttgctgctgggaattgttccccagtgtgcctgtgtgtgagctgtgtatccttctcagacaaaaaacaggtgaagccagctgccttgaggagcccagaagaatgtgcctggcctggcctggatgttttgttggccaggcctgacccgccttatccagaactgccccctccacgcttggcattctcagttctggctatctgctagggatccataatgcctgcctgttttgctatttaaaacaaaccctttgaaagtaagggaccagaggagagaactggaaagtcagcatgagcagtggcagcctgggctccacagggggccgggccgttcacctctgagaggcagtgcagcactctttctttgatccccaggagcactctggcatattggggaagcccacaggtgctggcggaaggtggcctgcactccagtgtctgtcatttactggccaaaacccctgagcacttttctttaacatctgtgatcatgtttcctcatctgtaaagtaggggcaattgctgtgaggattaaatgagctgatacaaagcacttcatatggtacctggcaatagtgaatgttggcccatgattcccccaaattagcatgcttagctttgcttagtaagtgtatttataaatgatttgtagaaatattttaaaggaatcttattctagcttatatccatgtaaaatgtaatttaagaaagaaatgaaattcaaagaatcatttttgtaatgtaggatttcaaaaaataaaaacaaaaaaggacccttccttcacccgtcacttaattttgatgcacagttgaacttcagtcagctctgatccagttacccatatgggaatatttaggattgtctagtcacgcctgggtaatagaatgtcaagccctgattttacaagctaatatgtcaaattcattttttcctgtttacatgtagctgtctgattcatttgtccccgaggcacgtgatacttggctccactccaattttagaccctaacaaaaattaaatatgcttgtgtttaggtggaatgcaagattacaactacatctgggcccagtgttttgaaattacgttggagctgtcatgctgtaaatatcctcgtgaggagaagcttccatccttttggaataataacaaagcctcattaattgaatatataaagcaggtgcacctaggtttgtaaaattttcttattaattccctattaatacaaaatagagcatctggcaagacctctgggttgactaaacgcaagcctttatttatgctttgtagttatagcctcatttcagtgccagatctgatggttaagaattctctctgcatgagtatctgcagtgtgtgagaaatgcagtgcccactcattcatagaaaaggaagcatgatgcatgttcctttaatatgagggtataaaaatccagagtaccaggtggtcgtggtggctcatgcctgtaatcccagcactttgggaggccgaggcaggtgtatcacctgaggtcaggagttcgagaccagcctggccaacaaggcgaaacctcatctctactgaaaatacaaaaattagccaggcgtggtggcacacgcctgtagtcccagttacttgggaggctgaggcaggagaatcacttgaacccgggaggcagaagttgctccctccgccaaggagccaagatggtgccaatgtactccagactgggtgacagagtaagactccatctcaaaaacaaacaaacaaacaaacaaacatccagagtccccctaattttacatgttgaatgatctagaaatctggcaaaatatcaggaaaataggctgctactctgttacatcatctcccatttagaaaaatactatgtttgcttgtcactcaccacgcagtaccaaggaccctgagaacactggacataccactttgcattttttccagaattggggtggtgagctagcaccattaccttcaacccctctcacctccgaactctgccagatgtcctggtgctagaaatcttgccagcctgtttgctgaaggctggctggcccttatcacagatagacagactaaatgtggcagagagtgatagctttcaaacgtgcagtggactcaccgggagcgcttgctaaaacagattgccaggccccaacccggagtttctgtttggaccaccttaccacgtgatgctgatgctgctggtccagcggctatacttagaaagccattgcactagagaaacacactgctagagatgatgatggaatcttgtacagttcaagtttattaaccaggtggtgtctctttgggcaaggtgtggaaggctcttctatatttacagaggtgaagttatctttctccattcagaatggcttggggagagaaacatatcaggaattggcataatagctatgataccacatggagagagagagagagagagtgtgagtgtgtgtgtgtgtgggtgtgtgtgggtgttgaaaaggtttgctgcatgggcctactgcataactgcataattcccggaattttctgcatgattcacagcaaagctttcctcctgctacaaagaagatggagaaggatgagggaaggtagcacagggccagagggctgagtgcaaggatgattaggacccttcctcggcacacatccctaaaagggatgcccctgccctctttcatacctgtatccccagcctccatcccctgacctgaagagaagtacacaaagattactggtaaactcacagggctatgtctaactggctgagtcgttcatggactaggttgactccctgtgataggggatgttatgaaatatcgttctttctcaccagcatcttaataaagattataaacttattattgggactttcaccttcttcattatgtcatcaaacgttgtcttgggttctctcttgcttagtattctggtaattctttctccactagattttcctcatgaggcatgtcatgtattagtctaacatttctattatatttctacctctattgatcctttagtttgttaatctattactattattatcattatcatcattttagagacagggtctcactctgtcacccaggctggagtacagtggcacagtcattgcccactgtaccttgaactcctgggctcaagtgatccttctgcctcagtgtcccaagtaagtaggactacaggtgcacagcaccacatccagctaattttttaaacaattttatatagagacagaatcttgctatgttgtccaggtgagtcccaaactcctgggctcaagcgatccttctgcctcagcctcccaaagtgctgggatcccaggtgtgagccaccgtgactggctctgcctatccttttctgaaattcattcttcaccagtatcaacatgggtatgggcgtgcaagtgaacatcaaatatgctctgtgtaactgcactactattttcagaacctcaatctagctgtaaagattatttaccaagcactgaattaaggtgggctttgaagtatcatgttgatgtaatattgccagggaaagggcaatataaattgcagtatacctattattatttttaataatttggaaggcttaccagtccatttgcactaggttttgtttttttgtttttgagacggagtctcgctctgtcatctaggctggagtgcaatggtgtgatgatctcggctcactgtaacctccgcctcccaggttcatgtgattctcccactcagcctcccaatttgctggaattacagacacccaccatcatgcccggctaattttgtatttttgtagagacagggtttcaccatattgcccaggctggtcttgaactcctgacctcaggtgatccgccggcctcggcctcccagagtgctgggattacaggcatgagccaccatgcccagcccatttgcattaggttttataaagaatgtgtatctgcctgtctctataatcagatgcaaacaactcactcaaaaaatacatatattggcacatcaaccctgcccccttgtggtttaagacagatgcataacatggtttaataatgaaaccatatttcaaaataccaatacagtgtggttattactacttaatagaaaggttctctccctactagtgcccaataagaaactaatgaatattttgtttgtgaagaatggcagcaaacacccctttattggtattgctctggtttaaagacattattgatattcgtcaaactgcattgcatttactggttccattttaccaattgctaggatgcttctgagtttctgaggttttgacccatctggaagtctctgagccaccttgtctgggaaggaaaggccttctgctttagtggaagggccttgccaagagggtagaggcttaggtagagcccaagctgttttgtcatctggcgatgtttgcaatcttgagcaagcacttgtctgaatctcagtgtagtcaacagaaagttgagagtaatagcatcagccttgcctcccaccagcctgttctaaggcttcagtggtgttattccttcaattagaactcactgcagacctcaactgaaactcgggccccttggtgctgtgttgtcctgcttagaggatgatttactaggttcaagttgagatgagggtgtcggcagacattaaaaccaaagtagcaaaggagggcaagtctgaattctagaggcttaaaatgtcttgcttgtcccggtctctgaggagaagcaaagatgagccagacacggtgttacctgcctgctgcggccctgtctttcccctggactcctcaaagcagatctgaacctagagagcaagggaatggctcacagcatccagaaacctaagcaacctgggcataaaagaatctggtatgtgctgagttccagaagcctgtgagccacagatgtggatctgttatcacatccaaaataggaggcaactgtgaccatgcggtggggacatgggcacaaacaagcagtctcctaagtactgtcccagctccgactctaaattgtggccaacagatgcagaattctagtgcttgcccagccaagacttttcattcatgaagctctaatccatttccaagggaaaaagagctttacatttctcccatgtatctccccatctggccacagaatttatatctcagattttatgtcttctcatttgtattgtatctgagcatttttcaaattttcctttttttttttttaatatagtgttggctctctctgcgtctcttagggtctaccagtctttttttcaatgtttcaacttcagcatatagaaataaatcacattttctggtaaaacaattacttccctcttaagtaaaaggtttggtggtatgtagacaaaatattgtaaagacatatacaagctaaagcacgcttttatttggctggtgggaggggttttcctttgaatataaattccatacataagcatggtctgtgtttgcccagtaacagtgatattcgcataccccaggcttccatagctggaagaaccatctttaggtttaggtaagagtcatatgaaagtgagtctttgggcctgtaatcccagcactttgggaggccaaggtgggcggatcacttgagatcaggagttcgagaccagcctggccaacgtggtgaaacccatctctactaaaaatacaaaaattagccaggtgtggtggtgggcacctgtaatcccagctacttggggtgctgaggcaggagaatcgcttgaacccgggagatgaaagttgcagtgagccgaactggtgccactgcactccagcctgggcaacagagggagacttcaatttaaaaaaaaagaaagtgaatctttgggttattaggggatgacgaatgagggtcaaactggaatatgaagattttcagacatttcttcaaatgcaaattgttcttcctttttctatctttgagggtaggcagaccgcaggttgactggagccttgattcagctgcagcacacactgatacgtaggtgttgttcaagtccctgaggccatccaaaatcactgtcatgtgactgtcaaaaaagtcaaatctgttctattaaagtgtaactgcttctagccaagaagaaatttgctgcctttttttaaagggtaccatgacttttttttttttttttttttttttttggtgtcttctgccaactactcattactagtaccctgaattctatttcatcattatctccaatgttaaagaatggtgtaatgttagccgggcgcgatggctcacgcctgtaatcccagcactttgggaggctgaggcgggcggatcatttgaggtcaggagttcaagaccagcctgaccaacatggagaaaccctgtctctactaaaaatacaaaataagatgggcgtgatggtgcgtgcctgtaatcccagctacttaggaggctgaggcaggagattgcttgaacccgggaggcagaggttgcagtgagctgagatcgcgccattgcagcctgggcaacaacagcaaaattccatctcaaaaaaaaaaacaaaaaattgtgtaatgtcagtttcaatgatagctctgcttcattttttatgcacttgattttcttcgatttggttggttttggggaagtcaacaaaaaatacaaaagatgccaacagacacaacaccatccagcacaagttaccttgctgaaacgcatggattttctaagtggcatgaagactgtaaactagctcagagccctggaaaaggaaataatatgcatagcttcttccctcacatattcctgctttgtggaacaaagttgaattaagactccagaaattcatctaatatattctccccccgccacaccacatagtttttcttaatccaaataagaggaaaggaaagaaagccaggcctggtggctcacacctataatccctgcactccagcactttgggaggccaaggtagatcatgtgagctcaggagttcaagactagcctgtgcaacatggcgaaaccccacctctacaaaaaaatacaaaaattagccaggtgtggtggtgtgtgcctgtagtcccacctacttgggaggctgaggtgggaggactgcttgagcatgggaagtcaaggctgcagtaagccctgatcacaccactgcactccagcctgggtgacagagcaagaccctgtctaaaaaaaaaaaaagaagaagaaaggaaagcaagaattaatgtttgttgatcctcctgttctgtgttacttacatttaatcttcacaaccatcctgggtggtggtatattatccccatttcataggtgataaaattgaggcttgggaatgttcagtgacttgagaactagaattcaaatcaaaacctgactaggttctttctgtcacaccaagctatgatgatgggtacacgctatatttatcacatatcaaaggacctcctaaggggggcacagtgtaaatagctcttcaaaataatgccattgaagctgagtgtggtgcctcacacctgtaatcccagcactttgggaagcttaggcaggtggattgcttgagcccaggagttcaagacaagcctgggcaacatggtgaaaccccatctctacaaaaagttaattaattaattaaataaaacaaaataatgccactgaaacccaaggaataaatgcgtaatcaggttaccaaattattaccaatttatgattgggtactacctaaacatcaaaaggatatgtatcaagcagtaggaataaatataaatggaactgtgtttaaaaaagagagggcaaagaggaacacacgaagtgaaaatagaagtttacacagttgtatagagaaagggagaaggaaatgtggcattttcctcctcaggagacaaaaaatgaagagtcaggaactaaataggacagaaagtataataaaaggcaacctaggtcagatagaagtttgttgaagttcaagataaacattgttttgctaaatgccaaaatttttatttttcactttaaccgtttctgggggaaactgttacgtgtgcctcgtatttttctgccctaataaataattattgagcataactgtttggggagagttcaagatcatcttactattgtagctcttcattctcatttatgttattggggacttaggcagcttcaccttaaggtaatatgatttgacgctggagtaaacaaactagatgtgacacgtaggatctaaaataagaaaggtcttaaaatataaatggctttttaaaaattgtactcctgaaattttgagaggggctgtcgagactatcatgggttgacggctaggctgggccacttcgttggctgtgtgagtttgaggaggttattttaataagccagagccttagtttttttcatctgtaaaatcatgataataattgatgacacagagctgatatgagaatttaatgagaaaatgctcatttggtagttagtacagagcctggaatatactaagtgctcaataaatattggctgctgttactggccaatcgattccatgcttccaagaagccttgtgattataattttgcttcccatgtagttgcactacaagacaaaactattgagtccctcgcacacgtaaatattttgttgtaactaatacattgacaccgtttttatttaggattttatggaatccaccaatggttgtagtacagtttggtgactgagtaaataacttggaagtgacaggaatggatcttaggttgtcatctgtgttctctcactgtgataatacgtactaatataaatgggctattcaacaacgaacaaatttaagctataaatcagattagtaattttgactgtattttaagttacatcaaaaataagttttttccctctctaacacttaatattaactcacaacattgagttagctaataaatattgcatatattgttcttaaatatttataataatttttatatgccataaaatatggtattaatatttaattttatttttgtcttgcaggtgtaaagggtcaagtttttgatcagaatggaaatccattacccaatgtaattgtggaagtccaagacagaaaacatatctgcccctatagaaccaacaaatatggagagtattatctccttctcttgcctgggtcttatataataaatgtaagtatgcaatgctagttattgttattaaaatattatagaactcataatacttattcacccagaaggaatccaaaataagtctaggaagttcaaaagtagatccatcgagacagaaagaaaggatagtgtcagacttgcaattggcaggaggtggaagaggtggaaattatatgaaaaaaaaaaaaaccacaaaaattcatattttttccctgatggcaatttttaaaaaatggaagccaaatcctatctcttgtgatatcttttatgattaaaatgtaacccgattaataataaagaataagcaatgtagcaaaggtagtttatagtttcccaggatacgacacaacacccattccacggcatacactttctactataaaaaatgaattggataaagttccttagaattcattttataagtgaaatctgatccacaaattttaacactatattcagcaaatgataaacatattttgcagcccttttttcatcgatgcaagtaaaatttcagtctttaattccataaaatatatatttctgagtcattttatccgaagacaggaaggcatggactaatttgagcctgagtggatttatgtgaaagaactaaatgaataagtattgatatagttggccagattttgcctctttctctttgatgtgaatttctctgagaaattcaggattcttctattttgcttagtggggcttatgccaaccatagcagtcattctatatagagctaatcctgggagaaggtagtcatctcttctgtagtgaaaactgagttggtattttattatttcatcttgaggacatcatggaaaaaacatggtttttagtttataaaactatagaattcagagcctccatgctccatgggttctccccaaggtgcctagatgtgaggcttatcaattgctaatccttttaggaatttctactcctgccgagaaaatggatagagcttgaaaaatctcaactcactgtgaatctttgtctaaaaaggccctttattttcctcctatttactgtgatatttctattctatttaaaaatatgattttccctgtagtgaatctaaacttatatgcaacctcataaataagccacacctttagaataaagttatgaattgttcatttcccattagttagactaacacagtacacattgaccctagatattagttctaggataatatttgaaggtaagactctggacattgaaatgaatgtgtaaaatacataccaatgagtggttatgtaaatgtcattccccattttttcccttctccaccatatataataaaagcatttctcagtagacattgcctgtagttagtttagcatttgtcttgtcctgatcatttcctccactaaaaaaaaaaagaaagcctaaccaaagattcaggctgatatgaacaaaaccaggtaaaatcaaagcttttaaaggagggtggatgtggtggctcatgactgtaatctcagcactttgggaggctgagaggcaggtggatcacttgaggtcaggagttcaagaccagcctggccaatgtggtgaaaccctgtctctactaaaaatacaaaaaattacctgggcatggtggtatgcacctgtaatcccagctacttgggaggctgaggtaggagaatcgcttgaacccgggaggcggaggttgcaatgagccaagattgagccactgtactccaggctgggtgacagagcaagactctatctcaaaaaaaaaaaaagaaaaaagaaaagaaagaaagaaaagcttttaaaagaagcaataggcttgtaggtcagctgaaaagaaattagtaagttgagaaaataattctacttgaaaataatcttgatatccaaggaggatgttaaatacacacttgggacaaagggaaagagttatctctttacccttctgccccacgaaaaggatggtggcagaaacatctgctgcttccttctcttgacttacattgccagatgaggtacccatctgtccttatttcattttgtaattcttggcaacagcattcacaacgctggtctctgtcaacaggcattggataactcagcctgcaggaccaaatctgttgctggcccagaggtctggtagattgttacatgcattgcacaaaggctgcattttagtgatggatatcagtgttttcagtgtgggcaccacgaaccatcttaagtcactcatataattgtctcttgtttcttctcaggttacagtccctggacatgatccacacatcacaaaggtgattattccggagaaatcccagaacttcagtgctcttaaaaaggatattctacttccattccaagggcaattggattctatcccagtatcaaatccttcatgcccaatgattcctctatacagaaatttgccagaccactcagctgcaacaaagcctagtttgttcttatttttagtgagtcttttgcacatattcttcaaataaagtaaaatgtgaaactcaacccacatcaccacctggaatcagggattgctcactccaggttactgcaaccctaactcactctagtgggaccttgactggagaaactccacgatcttcctgaagaagagaaatggatgtttccaaattccacaataagcaatatgtggtgataatgaaaagaatgattcagtcttgacggtgaatggaagacacttacctaacaagtactgctcatttacactcaaattaatcttgaagtagtcttaaaatgtgtaagaagttaaaacttgagaagcaaaaaaatgcctgcaaaaagaagatcattttgtatacagagaaccggatgaatataagcaatgaagatgaacatttattgatcttctacatacaagacttcaccataaggccaggagcagtggctcacaccttgtaatcccagcactttgggaggccaaggtgggcggatcaccctgaggtcaggagttcaaaaccagcctgaccaacatggtgaaaccctgtctctactaaatattagcggggtgtggtggcgggcacctgtaatcgcagcctttcaggaggctgagacaggagaatcgcttgaaccctagaggcggagtttgcagtgagccgagatagtgccattgtactccagcttgggcaacagagtaagactctgtctcaaaaaaaaaaaaacaaaaacaaacaaacaaaaaaaacacctcaccatgagtgctacatgtgaatagatattaagtgccatatataattagttctcagaagaagggagaaatgatcataggactgggaattgttttgcaaacgttctaggagatgtgagagaaaatatgtaaccacatcttagtggcccaagaaaatacaggcctgaagggataagattgtgtctctatagagcttcaaagcatacaggtcaattaagaaagcccctctctctccagagccgtttccctagcttttggcacctggatgccacagtcctccattaggctgatgactccaaagatgtaactctagcctcttgcctgagcttcagactcgcgtcccactgcccacaggacacatccacctggatgtgactcacaggtacctccaacccatcatgtggagatactcatcctgttccccctagagctgctcttcctgctgcattctctctctcaattactgggaccaccaagctaggaacctgggagtcatccttgatactttctcttcctccttaatcctgtgtattcagcaagtaactaaaggttggtgttggccaggcatggtggctcatgcctgtaatcccagcattttgggaggccaaggcgggcggatcacttgaggtcaggagctcaagaccagcctggccaacatggtgaaaccccatctctactaaaaaaaaaaaaaaaattagtcgggcgtggtggtgcatgcctgtaatcccagctactggggaggctgaggcaggagaatcgcttgaacctgggaggcagaggttgcagtgagccgggattgcgccattgtactccagcctgggtgaagaagtgagactctgtcttaaaaaaaaaaattggtgctgataaatattgatgaattctgctctctgctctctatggttgtcaacactgcagagttgaggcctcatatctcacctgcactgctgcaacagcttactggtcccttgctcccagccttctcctcttcagtccatcgtccacacagcactggggaaggggagccacttgaaacaaaagtcaacaactggttgtagttcataaacacagagctgtttgtgtcccctgtatctggaatgccattatgacccactacattttttctttcctacccctcttaaaactcagttcaggtagcagctccactaggaagccttggctgaccataatcccattcaattccatttcacctcttcgcaggcagtctggggttagggaccctttctctttgctccccaaaataaactggttatctctactattggatttacaacattgtattataatcttctccatgtgtgccttctctagtagaatgtgagctctttgaggccaaggtctatttaatttgtttgaaaaattcattgttatatcctcaaagcctagcacatagtaggtactgaatgaatgaatgaacaaggggtgccaggagactgctactcccagtccttcccagaaactgcctagggctttgagtcattttatgaagctaggtcttaatgcgtaggcaacctcccagctcactatgaacgctgacagaagagtgttttcatgtctataatcaagaattccagatacattccttttactgaaccttgaattgatcctaagattggtagtaaaggtattatgttacctcctaacagcactacaaagtacctttttttatcagaaaaaaattttaccattaggactcaatttgaagtactaatgcttctcaagttctccactatgagagttaccctgtattagaccgttacctataagaattaaggggtaaagcactaaacagaaaagaaaaaaaaaatagcaactctggtgagcagatttctttcctttcttccttccttctcctcttcctaccttcctccctcctttccctctcctccccttctctccctttccctccccttcccttccttttcttctttcctccgctcccctccccttccctccccttcccatccttctttctcttttttttacttaatccccagtgtgacagtaatataggctgatttctagaagtgtggtgtattactcatggaaagtgagttgccttggttattactttcaattgaaagttctatgggatctagaaatgagacatactggcatggagagtgagaacgacaaaggaatgaagagctacaggagcatttaggccatttctatgccaagcttattctacatgcacaaaatcatacatgttaataaatataaacaaattggaggcttatttaaaccaattatgaaatctggtaatttgtgcagcagcaatagatgataaccaaaaaaaactcataataatctgaatatcttgatcatttgtatttaaagaagcagtaattatatacttgaaagtacataatatagtattgcaaaaatgactttggtatattacaaattaaaagtatataagatgaaacttgatttgctatcaagccccaagcaatttttcaactgggcattgaattctaacttttctaagatagcaatttttgaagagacacgaacaaaaatctgaattagttcatgagccttaatgtaaatctcttgctgaaatagtttttaaaatcagaatttagttatctatcagactcaaaatcatttaaagactaacaaaacacaatcatgatattctaactgtggtcaaaccaggtacccaagccacctccctgcccaacgcctttccggcttttcccctccctcttgggctggtggttatgctcctccagctctagttcagctataattccttttatagagaaaccaacctgatacacactttcatgatgggagaaaaatgtgggagtgaaatggtatttagaaagcagcagtcaggcacggtggctcatgcctgtaatcccagcactttgggaggctgaggcaggcggatcacttgaggtcaggagctcgagaccagcctggccaacacggtgaaaccccatctctactaaaaaaaaatacaaaaattagccgggcgtggtggcaggcacctgtaatcccagctacttgggaggctgaggcaggagaaatcgcctgaacccagaaggcagaggttgcagtgagccaagatcacatcactgcactgcactccagccggggtgacagagcgaacctctgtctcaaaaaaaaaaaaagaaaaaagaaagaaagaaaaaaggcagaagccctggattcaaatccgccacacattcagtttctttatctgtaaaatggagaccaccccccgccacgctgaacggtgattctgtgactggtaagagatgctacatttttggtgcttgttcaggtggaggaaagatgatagttaacactcaggtaataagtattttgaaggcagtataatataccttcttaaagagtatacctactcaaatgttggtaaatgttgacatgattgaatctaaatggcaaagagtattttagaaaaacattaagtccctgcagataaatgacagtgttgatttggatgcttaattacattcagacatgaactgttggatgtatctgaaatgttaaaagctttttctcaacatttccaaaagtctttccaagaaatcaatgttatgttttgttccagaagcaaatttgcatttgtgatctgtttctaaaaatggtacaagttagctctgtttagaaagtaaaaatatctgatgttagattggaagtatctcttcctggggaatccagaaagataagcatagcatattgtcttactgcaatagataagttgcttattgagaagtctggttgttattctatatggtaacaatacagttgatgtatattttatgatagatcctttatattttcctcatgactttagaagggggaagggggagaaaattatgatgaccagactagttaaagagcattgaaagtccacagtactgtagctaaagtagaagtttgggtttgttatagactttacattatatcaactaataagcagatactgtacagtattgctcaccattttatcatacttttgcatatgaactactccattgccttttatagatgttttatagctgatcttaccagttttcctggtaactttttttatttcttttttttttttttgagacggagtctcgccctaacacccaggttggagtgcagtgccgtgatctcggctcactgcaacctctgcctcccgggttcaagcaattctcctgtctcagcctcccgagtacctgggactaccggtgcctgtctccacgcccggctaattttttgtatttgtagtagagacggggtttcaccgtgttagccaggatggtctcgatctcctgacctcatgatctgcctgcctctgcctggacctcccaaagtgctgggattacaggcgtgagcccccgcgcccagccactttctttaatactataactaagaatttattaaaatgcacaaattgtctaagactgtaaagtttattggggagaggccatgactacctctgaatttagtaaatttaaaatatttctgattctcaataaagaactaatatccatataaataatgcttttttcccattatgttacctgaaaataagtacttatgcaagtataacaaagtccactaaaaataactgattaccaccaaataaagcttgggaaagaccaaacttaatgaccttttatgaggcaataacattgcaacaactcttcaaagtccagatagttcttccagaacaagttacatatgctatatgttatatatattatatataatacattccaaattaatttgtgttgtggggcagtgtgttccatggacaagatgatggatggaaagtatgccttctggtcagaaaaaatatttgaaaattcacaatttatattaatgtaataaagaatctgagaaatgcagaaaagaaatggatttcccaaacatgctaagctatgggaccatttccttaaataatacagcctcgtaccatccctttggattaacatacctatatttccaaacacattttgggaaatactgatatatagagaaggcttttgttctgaataacaaattttattgatttccaggtgcttttgaaatacagagaacagtggtaaacaaagaatttgcctccagtaggaactggaaaactaacagtcctaacccctgctaatatcgacttagtcataggacagaggatgggctcaagcttacatctgctctttgaaacacgctaaacaaataatagtttaaatgagacattgctgagtaggaaatggctaaattacaggtaccaatttttaaaaagtgacgtctcaatttagaaaataaacaggaaatagtttctctgttttcaagagaatttcattacatagaagcctcttaagcagaagttccctggtatatttacctagacttcaacgtttaaatttgcagcttttttttttttttttgggacgaagtctcgctctgtcacccaggctggagtgcagtggtgggatctcggctcactgcaacctccacctcccaggttcaagtaattctcatgcctcagcctctcgagcagctggaattaacaggcacatgccatgacgcctggctaatttttgtatttttagttaagacagggttgcaccatgttgcccaggttggtcttgaactcctggcctcaagtgatccacccacctcagcctcccaaagtgctgggattacaggggtgagccatcaccccccagccaagggttttttgtttgctgtttgacaactgagaatagaactattatttctctgctctcttggagtggtctctcagcgctgttaagagtctaccaagcgtagtgactcacatctgtaatcccagcactttgggaggccgaggcgactggatcacctgaggtcaggagttcgagactagcctggctaacatagcaaaaccccatctctactgaaaatacaaaaatttgccaggcatggtggctcatgtctgtaatcccagcactttgggaggccgaggcaggcagatcacgaggtcaggagttcaaggctagcatggtggctcatgtctgtaatcccagcactttgggaggccgaggcaggcagatcacaaggtcaggagttcaaggctagcatggtgaaaccccgtctctactaaaaatacaaaaaattagccatgcatggtggcatgcgcctgtaattccaactactgggaggctgaggcaggagaatcatttgaccttgggaggcagagtttgcagtgagctgagatagtgccactgcactccaacctggagtgagagactgtctcaaaacaaacaaacgaacaaacaacaacaacaacaaaaaaaaaaacggccaggcgcagtggctcacacctgtaatcccagcactttgggaggccaaagcaggtgggtcacctgaggtcaggagttcgagaccagcctggccaacatggtgaaaccccgtctctactgaaaatacaaaaactagccaggtgtggtggtggacccctgtaatcctagctactctagaggctgaggcaggagaatcacttgaacctggggggcagaggttgcagtgagccgagatcgcgccacttcagtctagtctgggcgacagtgaaactccatctcaaaaaaaaaaaaaaaagggtctaccgttagtggacacctttagtcttccaacgagatacttccacctcccaccttgtggttaaaaaatgcttaactttgggctgggtgcggtggctcatgcctgtaatcccaacactttgggaggcagaggcaggcggatcatgaggtcaggagttcgagaccagcctggccaatatagtgaaaccctgcctctattaaaaatacaaaaattagctgggcatggtggcaggcgcctgaatttccagctactcgggaggctgaggcaggagaattgcttgaacccaggaggcagaggttgcagtgagccgagatcatgccactacactccagcctgggtgacagaacgagacttcgtcccccccaaaaaaacaaaaagcttaactttgaagagatttggtcttctcagatgcctcctataaaaagaaacaaatgtgagaaaaggtagaaaaggccttttttgtagggagcaattttttctaaaaaggcttttcagccaagaccctctctcttacaattctgacaccatatcaacttttaagactacttttttcttagaatgcttcttttttgccatttattgcacaaacaataatttggggggggactttaaaaaatcataatcaggccaggcacagtggctcaatgcctgtaatcccagcactttgggaggccgaggcaggtggaccacatgaggtcaggaattcgagaccagcctggccaacatggcaaaaccccatctccactaaaaatgaaaaaattagctgaaataacacagctacttgggaggctaaagcaggagaatcacttgaacccaggaggtggaggctgcagtgagccaagatcacgccattgcactccaccctgggcaacagagcgagacgccatctcaaaaaaacaaacaaaaaatcacaatcagtgagattaatgtttaatgaacatactgttattttttatttttttaagagacaagtctccatctgtctcctaagcagagtgtagtggcgcaatcatagctcattgtaacattggactcctgggctcaagtgatcctcccacctcagtctcccatgcatgccaccacaattttttggatacagggtgtcattatgttgcccaggctgatctcaaactcctggcctcaagtgatcctccttccttggcctcccaaagtgttgagattacaggcgtgagtcacagagcctggcccaggatgttattttaaaattgtctttttgtcttctaaatcaacaagaacttgatagttgctttcaatgccaatcaacatcctttactactgtatacacaatgtatttatttgacatttgaaaggagatacggctgggcgcggtggctcacgcctgtaatcccagcactttgggaggccgaggcgggcggatcacaaggtcaggagatcgagaccatcttggctaacacggtgaaaccccgtctctactaaaaatacaaaaaattagccaggcgcggtggcgggcgcctgtagtcccagctactcgggaggctgaggcaggagaatggcgtgaacctgggaggcggagcttgcagtgagccgagattgcgccactgcaatccggcctgggctaaacagcgggactccgtctcaaaaaaaaaaaaaaaaaaagaaaggagatacaaaaggatgttacaacctgctatggcaagaagatacaaaggaacatattggtatgaacagaatacctcagagttgagtgtataaaaaaggcttaattcaccagatgcagtggctcgcacctgtaatcccagcattttgagaggtcaaggtcaagacacgaggattgcttgagcccaggagttcaaggccagcctgggcaacatagcaggactctgcctctaaaaaaagtatatatatatatataatgtacacacacatacatacataaacacatatgtattatatatatatatgtaatatatgtatattatatataatatatatattagccaggcatggtggcaacaggcctgtgttcccagctactcaggaggctgcagtgagtcatgtttgcgccactatactccagcctgggtgacagaatgagaccctgtctcagcaaaaaacaaataaaaaacttcaaggtggagtaggggttaattcaaggctacctaagctggatttggggtgattatggtcgagtggatgcaaacagaatattaaacttccattcattaaaagtgcttactacctgccagaccccatactaggctctatagatttattgtctctaaggtcactaggcgagtaagtaccagatctgtgactttgaacttcccactacaataagcttatgaactttgtttaagcaaaaaaggtttgaaaagtgaaaagcaagcacccatttcatagtgttctaaaagtctaaaataatccagtagaacatcagagataaaatccaaaaagcaagtttttcccccaatatttaaatcagggaagcaacatgatggtatctgtaaactataactgaaccaaaaataggaccaaacgtagtgaaatccatttagggagatattactgtgatcttgaaggaaggcctacttaatacaggacagtgggctggggaggtgtgaaccaaaaatagacacaggcaaaagcgctaaaatttaaccctgagaaataaatgaaattcacctacaaaataaatggaataaatttaaaaggtgaaattttgggcttggcgtggtggcttacacctgtaatctcagcactttgggaagccaagacgggcagatcacttgaccccaggagtttgagaccagcctgggcaacatggtgaaactgtctctacaaaaaatacaaaaattaggccgggcacggtggctcacgcctgtaatcccagtactttgggaggccgaggtgggcggatcatgaggtcaggagttcgagaccagcctggacaacatgctgaaaccccatctctactaaaaatacaaaaaaaattagccaggtgtggttggcgagcacctataattccagctactcaggaggctgaggcagaattgcttgaacctgggaggtggaggttgcaatgagccgagattgcaccactgcactccagtctgggtgaaagagcaagactctgtctcagggcgggtggcagcggggtcgggggaggtggggggaaggttagctggacctggtggcttgcacctgtggtccccagctacttgggaggctgaggtgggaggattgcttgagcccaggaggttgaggctgtagtgagtcatgtttgcagcactgcattccagcctgggcgacagagcaagaccgcatctcaaaacaaaacaaacaaaaggtgaaattttggaattaggaaagatgctatttttataaattggctttaagctgttggctggacatctaagttgtagcattctgaaggcagcagagatgtgggattgtaggactgaaacatgaaaatgcctatcgaattttttttaaagtctttaaaggagagctttaaaggaaagcaatacgaattcaagtatgtttcagtaccactcctctctctaaagacaatcaactatggttttcattcaaaatactattactctaacgttaaatatttgagtacagcaatcatttcagatgcattatgaataagttactgaacacgcctcccatctgcttgctttacggttttattttgcctttcgtttgttagctcattttataatttgttacttctgaacaccttccaagtgctggtgctttcagatatctacctcaaagtattatttgtaaatgtcaaaaagtccctcttacatataattgaaagctggctacatggtagacaatatgatcacaaacttttaaacaattttttaagctgaagaaatactttttctttttataagtatcaaatcaaaatgtaattcagcatccacccataaagcgcaactaaaaacttttcacaatgccattaacaacttgtggttaccatcataagcctacagacctacacactaattatctttaaaacccttattaggctgggcgtggcggctcacgcctgtaatcacagcactttggggggccaaggcgggcagatcacttgaggtcaggagtttgagcccagcctggccaacatagtgaaacttcatctctgctagaaatacaaaaattagcggggcgtggtgacagggtgctctaaccccagctacttgggaggctgaagcagaaccacttgaacacagccaggaggcagaggttgcagtgagccaagattgcaccactgtactccagcctgagccacagagcaagactccgtctcaaaaaataaataaaaataaaataaaacccttattaaggatttaaaaaatcttaattatataatgccaaaagctagtccccgtctggcttaggggcccacaagctcctgctttaaagccagtttttttgtttttttctgatgtacttacatttgtgcctcacaatcaagaggttcccagcttgggggaactttccaagaagaggccgaaaactaaacaggccagtacaatcttacttttcacgctgacaagtggtacgggggttaacccaaactcccctccctgtgccaggtacctcccttatagaccaatcacgaacacttaggccaggctggccagggacccaaaaaaaaaagggagaaccagcctttcttactctactaactgggaccacattcttcaggtggtctcattgaggctccactgcttcaagctgcccaagtgatatttgtatttctacagtgggcaggcatggccattccagaaaaagaaacacattcagacttgtgccttttgttacccaaatatatgatattcaaataatttctattttaacaactcataaaaatttaagatcaaataattgcattcttgaaacaattcttaatcatttattttcaacacgtgtactataaagaacctaagaaatcagacaattttaataacccataaacatgttgaatccatttgcagatttaaattttgtaaaaatagctgtcactgcctccatatatcaagtgtactatgtttataatcacatttatgctaccgatactcctcagaaaaaaacagattctgcttggttctagcttcagtattatgaactccaataatgctttgaggacctccaaaggaaaaaaacagattctactaggttctagctgaaatattatcaactccaaattgaagctgaagtattatcaactccaaataatgcttcgaggacctccaaaaaaaagagattctgcttggttgtagctgaagtattatcaactccaaataatgcttggaggacctccacaggtaaactactaatccctttggccatttattgagacagacagagagagagagagagagttttgaagcaacaatgtaccattagtaaagttgctgtgcagaattacctcagtcctattctaagcttacagttcagttgattttattgtcttcacctaagtatatacaattcacatatgggagaaaaacactaaatcaagatggttattttcactgttttgcttaagattcatatttaaatataaatcaagaagttaatccacagtttgagagatacttatattagaaattttaaatgttaaatacataattgtaaatatggtgtatgtactgtttcacatacaatgggtattgatcaaatcagtgtaattagcacacccatcagctcaaatatcatttatttgtagcaagaacattcaatacattaactatagtcaccctactctctctctctctctctctcaataaatggccaaagggattagtacttttacctttggaggtcctcaaagcattatttggagttcataatacttcagctagaacttattccttcaaatttaactctgtacccattaaaagtggttttgtgtgcaattaacagacacatgttctacccatacattgttttccaaaattattgtgtggctttaaaaaaaaaaaaacccacacaacaaattgcaaaaggcactgagataacatctgcttctagatcattgctaggctcgaaaaataaagcttgttctaccaggaatgacaagttagaacttagtatttgccaaagcagaaattatatagtgtcagttatttcaggcaaaccttattcggctctcatccccaactatctgtcagaacaattaaaagagatcaaaacagtccagcataactaggcttcattatataaggccattttgttctaagacactaataaaccaaaataagaaatattaaaatcaaaataaaagatattatttgagctattttcatacaaactgttggttccttatatcctcccttctataataaagggcatattttactgcaaagaaaattttactttatatatatcactagccataaatttttgaatgtcattaattacatgttgtctagtaccattaaccaaatagcgtaactattttatgtccacatttcacttctgtatttacaaacatatcagtaaagagttaacaatgagatgcgatcaaacatccatattatctgttttgtagacagcaatgtagatgattttgtaatcacctttcatcggagtgaccttatataaaaaataagtcaataatttagaggttctaagtctccaaaggagattttcaaatgtaaatatagaaatggttatagataatgagatttttaggaaacctctgccatgtctgcatcctgttaactgttatatcatcttttcttccagctgcgttcctttgcctgcaacaggggtcaagatgagttttgcctgacttctttgatgtcctgaactttccgtagtcctttttcttgaatttgttcattataaatatagcttggcatttgtttgatcttttcaactgtcttcactgcatcagtagttttattccatagttcttgcagatatttgacaggcttgttactatatttttcaaattcaaatccactgtaagctcattattagcagttgctttacagaatgctttagtccacctaaccttttgagaattgcacttcttttaaagtttttgtgacatttatgtttatacaatctgaacaccttgcaacagctgcagatgaacatcatgatgtggtcagggtagatgggtcccaaagaaactaacacttctcagtgctgagctcggatgggcctccactgaccaaacacggagcttgagaggaagtcaagaggtatcttggaattccacatgctgaccctgtcattcttgaaggaaaatgatgcataatttctgaataattcagaaagaacttaacaatctttccagttagtttttaaataacaattctgtttatcaaatttctgaattaacttttctgaattcacgggtttctaaaactggccttaagcaaaagtctgaaacctaggctgggaaccatgtaacccaggccaagaaggtactttaaagtgtcttagagttgtttttcaacttagggggaaacaacagattccattaaatcccataaaggatttttttgtgtgtgaaaaagggcctgatgtaatctaggttagactcaggaggctttaacaagttttgtcttacgggtaaatggtggctattttcacagataacatcattactcccatcccttactatggtttatacaaaagaggctggagaataagtacatttttacagccgggtgtggtggctaacgcctgtaatcctacttagcactttgcgaggccaagacaggaggatctcttgagcccaggagttcgagaccagcctgggcaacacagggagaccctgtctctattgttaaatcaagaaaacctaaaaaacattttcatttacatagcaccaaatataagagcctttttttttttaacctagaaagagtat

SEQ ID NO: 1131 - DNA, 2752 bp, Homo sapiens
catttcttccttctgcgtatgggacaggaccctttctggaatgggggtcttatgacctacaatcaaacaagaacatggacttcccgtgcctctggctagggctgttgctgcctttggtagctgcgctggatttcaactaccaccgccaggaagggatggaagcgtttttgaagactgttgcccaaaactacagttctgtcactcacttacacagtattgggaaatctgtgaaaggtagaaacctgtgggttcttgttgtggggcggtttccaaaggaacacagaattgggattccagagttcaaatacgtggcaaatatgcatggagatgagactgttgggcgggagctgctgctccatctgattgactatctcgtaaccagtgatggcaaagaccctgaaatcacaaatctgatcaatagtacccggatacacatcatgccttccatgaacccagatggatttgaagccgtcaaaaagcctgactgttattacagcatcggaagggaaaattataaccagtatgacttgaatcgaaatttccccgatgcttttgaatataataatgtctcaaggcagcctgaaactgtggcagtcatgaagtggctgaaaacagagacgtttgtcctctctgcaaacctccatggtggtgccctcgtggccagttacccatttgataatggtgttcaagcaactggggcattatactcccgaagcttaacgcctgatgatgatgtttttcaatatcttgcacatacctatgcttcaagaaatcccaacatgaagaaaggagacgagtgtaaaaacaaaatgaactttcctaatggtgttacaaatggatactcttggtatccactccaaggtggaatgcaagattacaactacatctgggcccagtgttttgaaattacgttggagctgtcatgctgtaaatatcctcgtgaggagaagcttccatccttttggaataataacaaagcctcattaattgaatatataaagcaggtgcacctaggtgtaaagggtcaagtttttgatcagaatggaaatccattacccaatgtaattgtggaagtccaagacagaaaacatatctgcccctatagaaccaacaaatatggagagtattatctccttctcttgcctgggtcttatataataaatgttacagtccctggacatgatccacacatcacaaaggtgattattccggagaaatcccagaacttcagtgctcttaaaaaggatattctacttccattccaagggcaattggattctatcccagtatcaaatccttcatgcccaatgattcctctatacagaaatttgccagaccactcagctgcaacaaagcctagtttgttcttatttttagtgagtcttttgcacatattcttcaaataaagtaaaatgtgaaactcaacccacatcaccacctggaatcagggattgctcactccaggttactgcaaccctaactcactctagtgggaccttgactggagaaactccacgatcttcctgaagaagagaaatggatgtttccaaattccacaataagcaatatgtggtgataatgaaaagaatgattcagtcttgacggtgaatggaagacacttacctaacaagtactgctcatttacactcaaattaatcttgaagtagtcttaaaatgtgtaagaagttaaaacttgagaagcaaaaaaatgcctgcaaaaagaagatcattttgtatacagagaaccggatgaatataagcaatgaagatgaacatttattgatcttctacatacaagacttcaccataaggccaggagcagtggctcacaccttgtaatcccagcactttgggaggccaaggtgggcggatcaccctgaggtcaggagttcaaaaccagcctgaccaacatggtgaaaccctgtctctactaaatattagcggggtgtggtggcgggcacctgtaatcgcagcctttcaggaggctgagacaggagaatcgcttgaaccctagaggcggagtttgcagtgagccgagatagtgccattgtactccagcttgggcaacagagtaagactctgtctcaaaaaaaaaaaaacaaaaacaaacaaacaaaaaaaacacctcaccatgagtgctacatgtgaatagatattaagtgccatatataattagttctcagaagaagggagaaatgatcataggactgggaattgttttgcaaacgttctaggagatgtgagagaaaatatgtaaccacatcttagtggcccaagaaaatacaggcctgaagggataagattgtgtctctatagagcttcaaagcatacaggtcaattaagaaagcccctctctctccagagccgtttccctagcttttggcacctggatgccacagtcctccattaggctgatgactccaaagatgtaactctagcctcttgcctgagcttcagactcgcgtcccactgcccacaggacacatccacctggatgtgactcacaggtacctccaacccatcatgtggagatactcatcctgttccccctagagctgctcttcctgctgcattctctctctcaattactgggaccaccaagctaggaacctgggagtcatccttgatactttctcttcctccttaatcctgtgtattcagcaagtaactaaaggttggtgttggccaggcatggtggctcatgcctgtaatcccagcattttgggaggccaaggcgggcggatcacttgag

SEQ ID NO: 1132 - protein, 441 aa, Homo sapiens
MDFPCLWLGLLLPLVAALDFNYHRQEGMEAFLKTVAQNYSSVTHLHSIGKSVKGRNLWVLVVGRFPKEHRIGIPEFKYVANMHGDETVGRELLLHLIDYLVTSDGKDPEITNLINSTRIHIMPSMNPDGFEAVKKPDCYYSIGRENYNQYDLNRNFPDAFEYNNVSRQPETVAVMKWLKTETFVLSANLHGGALVASYPFDNGVQATGAKRSLTPDDDVFQYLAHTYASRNPNMKKGDECKNKMNFPNGVTNGYSWYPLQGGMQDYNYIWAQCFEITLELSCCKYPREEKLPSFWNNNKASLIEYIKQVHLGVKGQVFDQNGNPLPNVIVEVQDRKHICPYRTNKYGEYYLLLLPGSYIINVTVPGHDPHITKVIIPEKSQNFSALKKDILLPFQGQLDSIPVSNPSCPMIPLYRNLPDHSAATKPSLFLFLVSLLHIFFK

SEQ ID NO: 1133 - DNA, 3281 bp, Homo sapiens
gtgtgcaatggcgtgctctcaactcactgcaacctccacttctccggttcaagtgattctcctgcctcaacctgctgaatagctggtattacagcgacacgccaccgcgcccagctaatttttgttatttttagtagagatggggtttcaccatattggcctggctggtcttcgaactcctggcctcctgtgatccgcccacctcagcctcccaaagtattgggattacaggtgtgagccactgctcccagtcttttttttttgtttaatgaactagaatggaagggaaaagaaaagagcattgcaagcatttcttccttctgcgtatgggacaggaccctttctggaatgggggtcttatgacctacaatcaaacaagaacatggacttcccgtgcctctggctagggctgttgctgcctttggtagctgcgctggatttcaactaccaccgccaggaagggatggaagcgtttttgaagactgttgcccaaaactacagttctgtcactcacttacacagtattgggaaatctgtgaaaggtagaaacctgtgggttcttgttgtggggcggtttccaaaggaacacagaattgggattccagagttcaaatacgtggcaaatatgcatggagatgagactgttgggcgggagctgctgctccatctgattgactatctcgtaaccagtgatggcaaagaccctgaaatcacaaatctgatcaatagtacccggatacacatcatgccttccatgaacccagatggatttgaagccgtcaaaaagcctgactgttattacagcatcggaagggaaaattataaccagtatgacttgaatcgaaatttccccgatgcttttgaatataataatgtctcaaggcagcctgaaactgtggcagtcatgaagtggctgaaaacagagacgtttgtcctctctgcaaacctccatggtggtgccctcgtggccagttacccatttgataatggtgttcaagcaactggggcattatactcccgaagcttaacgcctgatgatgatgtttttcaatatcttgcacatacctatgcttcaagaaatcccaacatgaagaaaggagacgagtgtaaaaacaaaatgaactttcctaatggtgttacaaatggatactcttggtatccactccaaggtggaatgcaagattacaactacatctgggcccagtgttttgaaattacgttggagctgtcatgctgtaaatatcctcgtgaggagaagcttccatccttttggaataataacaaagcctcattaattgaatatataaagcaggtgcacctaggtgtaaagggtcaagtttttgatcagaatggaaatccattacccaatgtaattgtggaagtccaagacagaaaacatatctgcccctatagaaccaacaaatatggagagtattatctccttctcttgcctgggtcttatataataaatgttacagtccctggacatgatccacacatcacaaaggtgattattccggagaaatcccagaacttcagtgctcttaaaaaggatattctacttccattccaagggcaattggattctatcccagtatcaaatccttcatgcccaatgattcctctatacagaaatttgccagaccactcagctgcaacaaagcctagtttgttcttatttttagtgagtcttttgcacatattcttcaaataaagtaaaatgtgaaactcaacccacatcaccacctggaatcagggattgctcactccaggttactgcaaccctaactcactctagtgggaccttgactggagaaactccacgatcttcctgaagaagagaaatggatgtttccaaattccacaataagcaatatgtggtgataatgaaaagaatgattcagtcttgacggtgaatggaagacacttacctaacaagtactgctcatttacactcaaattaatcttgaagtagtcttaaaatgtgtaagaagttaaaacttgagaagcaaaaaaatgcctgcaaaaagaagatcattttgtatacagagaaccggatgaatataagcaatgaagatgaacatttattgatcttctacatacaagacttcaccataaggccaggagcagtggctcacaccttgtaatcccagcactttgggaggccaaggtgggcggatcaccctgaggtcaggagttcaaaaccagcctgaccaacatggtgaaaccctgtctctactaaatattagcggggtgtggtggcgggcacctgtaatcgcagcctttcaggaggctgagacaggagaatcgcttgaaccctagaggcggagtttgcagtgagccgagatagtgccattgtactccagcttgggcaacagagtaagactctgtctcaaaaaaaaaaaaacaaaaacaaacaaacaaaaaaaacacctcaccatgagtgctacatgtgaatagatattaagtgccatatataattagttctcagaagaagggagaaatgatcataggactgggaattgttttgcaaacgttctaggagatgtgagagaaaatatgtaaccacatcttagtggcccaagaaaatacaggcctgaagggataagattgtgtctctatagagcttcaaagcatacaggtcaattaagaaagcccctctctctccagagccgtttccctagcttttggcacctggatgccacagtcctccattaggctgatgactccaaagatgtaactctagcctcttgcctgagcttcagactcgcgtcccactgcccacaggacacatccacctggatgtgactcacaggtacctccaacccatcatgtggagatactcatcctgttccccctagagctgctcttcctgctgcattctctctctcaattactgggaccaccaagctaggaacctgggagtcatccttgatactttctcttcctccttaatcctgtgtattcagcaagtaactaaaggttggtgttggccaggcatggtggctcatgcctgtaatcccagcattttgggaggccaaggcgggcggatcacttgagccaggatggtctcgatctcctgacctcatgatctgcctgcctctgcctggacctcccaaagtgctgggattacaggcgtgagcccccgcgcccagccactttctttaatactataactaagaatttattaaaatgcacaaattgtctaagactgtaaagtttattggggagaggccatgactacctctgaatttagtaaatttaaaatatttctgattctc

SEQ ID NO: 1134 - protein, 441 aa, Homo sapiens; identical to SEQ ID NO: 1132

SEQ ID NO: 1135 - DNA, 3060 bp, Homo sapiens
gtgtgcaatggcgtgctctcaactcactgcaacctccacttctccggttcaagtgattctcctgcctcaacctgctgaatagctggtattacagcgacacgccaccgcgcccagctaatttttgttatttttagtagagatggggtttcaccatattggcctggctggtcttcgaactcctggcctcctgtgatccgcccacctcagcctcccaaagtattgggattacaggtgtgagccactgctcccagtcttttttttttgtttaatgaactagaatggaagggaaaagaaaagagcattgcaagcatttcttccttctgcgtatgggacaggaccctttctggaatgggggtcttatgacctacaatcaaacaagaacatggacttcccgtgcctctggctagggctgttgctgcctttggtagctgcgctggatttcaactaccaccgccaggaagggatggaagcgtttttgaagactgttgcccaaaactacagttctgtcactcacttacacagtattgggaaatctgtgaaaggtagaaacctgtgggttcttgttgtggggcggtttccaaaggaacacagaattgggattccagagttcaaatacgtggcaaatatgcatggagatgagactgttgggcgggagctgctgctccatctgattgactatctcgtaaccagtgatggcaaagaccctgaaatcacaaatctgatcaatagtacccggatacacatcatgccttccatgaacccagatggatttgaagccgtcaaaaagcctgactgttattacagcatcggaagggaaaattataaccagtatgacttgaatcgaaatttccccgatgcttttgaatataataatgtctcaaggcagcctgaaactgtggcagtcatgaagtggctgaaaacagagacgtttgtcctctctgcaaacctccatggtggtgccctcgtggccagttacccatttgataatggtgttcaagcaactggggcattatactcccgaagcttaacgcctgatgatgatgtttttcaatatcttgcacatacctatgcttcaagaaatcccaacatgaagaaaggagacgagtgtaaaaacaaaatgaactttcctaatggtgttacaaatggatactcttggtatccactccaaggtggaatgcaagattacaactacatctgggcccagtgttttgaaattacgttggagctgtcatgctgtaaatatcctcgtgaggagaagcttccatccttttggaataataacaaagcctcattaattgaatatataaagcaggtgcacctaggtgtaaagggtcaagtttttgatcagaatggaaatccattacccaatgtaattgtggaagtccaagacagaaaacatatctgcccctatagaaccaacaaatatggagagtattatctccttctcttgcctgggtcttatataataaatgttacagtccctggacatgatccacacatcacaaaggtgattattccggagaaatcccagaacttcagtgctcttaaaaaggatattctacttccattccaagggcaattggattctatcccagtatcaaatccttcatgcccaatgattcctctatacagaaatttgccagaccactcagctgcaacaaagcctagtttgttcttatttttagtgagtcttttgcacatattcttcaaataaagtaaaatgtgaaactcaacccacatcaccacctggaatcagggattgctcactccaggttactgcaaccctaactcactctagtgggaccttgactggagaaactccacgatcttcctgaagaagagaaatggatgtttccaaattccacaataagcaatatgtggtgataatgaaaagaatgattcagtcttgacggtgaatggaagacacttacctaacaagtactgctcatttacactcaaattaatcttgaagtagtcttaaaatgtgtaagaagttaaaacttgagaagcaaaaaaatgcctgcaaaaagaagatcattttgtatacagagaaccggatgaatataagcaatgaagatgaacatttattgatcttctacatacaagacttcaccataaggccaggagcagtggctcacaccttgtaatcccagcactttgggaggccaaggtgggcggatcaccctgaggtcaggagttcaaaaccagcctgaccaacatggtgaaaccctgtctctactaaatattagcggggtgtggtggcgggcacctgtaatcgcagcctttcaggaggctgagacaggagaatcgcttgaaccctagaggcggagtttgcagtgagccgagatagtgccattgtactccagcttgggcaacagagtaagactctgtctcaaaaaaaaaaaaacaaaaacaaacaaacaaaaaaaacacctcaccatgagtgctacatgtgaatagatattaagtgccatatataattagttctcagaagaagggagaaatgatcataggactgggaattgttttgcaaacgttctaggagatgtgagagaaaatatgtaaccacatcttagtggcccaagaaaatacaggcctgaagggataagattgtgtctctatagagcttcaaagcatacaggtcaattaagaaagcccctctctctccagagccgtttccctagcttttggcacctggatgccacagtcctccattaggctgatgactccaaagatgtaactctagcctcttgcctgagcttcagactcgcgtcccactgcccacaggacacatccacctggatgtgactcacaggtacctccaacccatcatgtggagatactcatcctgttccccctagagctgctcttcctgctgcattctctctctcaattactgggaccaccaagctaggaacctgggagtcatccttgatactttctcttcctccttaatcctgtgtattcagcaagtaactaaaggttggtgttggccaggcatggtggctcatgcctgtaatcccagcattttgggaggccaaggcgggcggatcacttgag

SEQ ID NO: 1136 - protein, 441 aa, Homo sapiens; identical to SEQ ID NO: 1132

SEQ ID NO: 1137 - DNA, 225734 bp, Mus musculus
  misc_feature (1)...(225734): n = A,T,C or G
actgaatctatagatgaagtataatactctagtctagaaataaaacacataaatgacaacatgtacggagacagggtatgtcaacttgacacaccaactagagttatctgaaaggagggaacctcaattgagaaattgcctccataagatccagctgtaaggtattttcctaattagttattgatggaggagggcccagaccattgtgggtggtgccatccctgggatggtagtcctgggttctataagaaagcaagctaagcaagacatgggaagcaaggcagtaagcagcatccctccatagccctgcatcagttcctgctcccagggttcttcccgccctgttggagttcctgtcctgacttctttggtgatgagcagccatgtggaagtgcaagctgaataaatccctttcttccccaacttgcttttttcccccctgtcttatggcaacaatagaaatagtaagatacagttcttagatacatttgtaaaacatcaacaataatacaaacacttccagagaagaaaaatcaggttaaaagttgttaaaggatggaagaggcaaggcaggtcagccatatcctgacctgcagccccattcagagtcacaagacactgtgctatcaatgttgaaacagctaagggaaagcccaaaccactcccctataatgagcattgaaactcaaagtaatttgaatatgtgaaaaaagggctggggcatagctcagtgacagagctatggtttggctcactagccatatgtgttctctggaattataatgatggtggtgatggcggtgatggtgaaggtggtgatggtaataatgatatataataatgaacaatgataatatacaataagaaatgagccaaggtacgattcatcatgagaaagaggatgtaattgctctttctttttccttaatacataccacgttataactatcactctaagtactgttttcatgatgtacatacagacaaatttgattttcatttaatttagtgtagtgttttttaaagtttcttgagacttttttacatgagtgtagacagccagcgcctaaaagatggcgctggtctccagtacaccgtcactgtaaacaacaccactgcgcaggtgctagcctgaacctggggccaacccctcccgagcaagtgcatgcaaattaaggtgccagcagactgaccaatcccaggaggacacaaagcttttccctgtgctgggtgcccgggagcatcgaggcgttcctgcaataaagctgttgagaagaatcgaccttgttgcgttttccttgccggacgaggtgggcgtgacacatgagtgttatttggaggaatattactaaatctctcattgctttgtcatttcatccctatctttgtttgttgtttccaactttgatagtctcgtggttcagtttgatttctattttcagaattctgcaaggtgtgttttattgccaagggtgactaccatggtgggtacggtcatgggaagaatgtgtattgtgtgactgttgaatgattaaaatttcccaaaatgtgacactaaatattaccattcctattcaataatcctagtaaatcataaacacagtaagcctaattaaatggatatcaagattcatcacagagtaactcaagtcaaacataagaataccctgaactcttgaaaatatcttgaaagccagagaattgactttacccattggagacaagccattgagttagagaaactattctgtaaaattcaactagatcaagttgattggtgatgatgttcagtccaatccttttcggtttggaacttctacccatcggatctgtccatttctaataagaggccactcacagctctaacaattatcaagatcttgccattttattttatttattaataggaagcaatgtctctgcttcacgttgacaagatgggtgagtttgagtcactaattctaaagggatttctctatatattatgtattgcttacttatttatcatgtgtgggatggtagtggtgtgggcatttacatggcatgatgctcccatggaggccagaggacaacctgcagaaattgatatcctccttccacaagacaagtcctgatggtcaaactcagtgcttcagacttggcagaaaatactaaactatctctataataccattttcttttgagcataaatttacaaaaagttaaaacgacaatgaagagaaactatgtgttcttctcccaggtttcctcaatacctatttctcagatacataggaaacctaggacattgacatgtgaagattgggtaaaaattttctggagaaaaattatttttgttcttcatcagtgtgatggtttgaatattcttggttatggtgacttggtcatggtatctgctatagaagtaaaacccttactaagacagaaatacccaaactaagacaatctgaaaatgtcttattcgttcgtaaaatgttaggtgataacttcttccatctctgtcatttccccaaaaaaaggctgctatcagctgtaacccaatagcttttctccactgggtaaagtcaaatctctgactaagttcaatatatgcttctgtttgatttatttaattatgtttactgtgtttatgatttactaggactcttaaattcacatgtttatatttattgccaattttaaccatgatctcttcaggcagtttatcattactctttcgtctcctgagattctgataacaattttgctttttagtctcctggacccctggcaccttttttatattccctaaatttttagtttcagtaattttattcttcaaacagcaaatttcattgattgctagctccttcacagcctgagcaactcagcaagattctatctgaaaaagaaaaatcaaaataattggacagaggctcaggggcagactgcttgcctagcttcagtctgcagcattgccaacaagtaataccattttactacatttttattgctgtgtgtttaagtttaattttttcagttctttcttccttgtacctttttttttttttaatctcttctcacaaatactcactgaagcatttttatcatgtctgccttgaaaacactgtcaggcaaatctggtattcatgccatcttgatgttgatatatatgcattttcatttcttatttgtgtttacgatttcctgagctttgcaaagtgagggattctcagttgagtcttggaccctctggcctttaagttatgagatttttctatatttaaacagtctattttaatcagccttcctggcaccagactgatgggcagttgagagggaactcactcattattgtttggtagtggtagaagttcaatttccatactcagcttctgttgacattcttcaagaagaggaacacactatcattgccaaacaagagcagaactcaggattctctttgtagcttttcaatatcctcctagctgggaaagatgggagctctttactattgctccccaggatggcaccatgattgagttatccacatagtcagaatcctctactgaagtgtctcaaatgtcatctaatcagataggtgcatttcatgaccgagactgaatgcatgatgattcttctggatgatgtcagtgtgaatggattgaggcatacctagaaaactagctgagcacgacttcggtttgttgaagagattactagtgtggcaatcattggactgatggaacaaattcagtatggctgagcaccatttaattagctggagatccaaggcacaagaaggaagaggagcctagccttctgcctcttccttctgaagcaagataaacaatcttttccagtttgtcacgtgtagtgctatcaacccaacacaatctagaatcacccgagaaggaaggctctgttcgagactgagttcacctatgagtatgtctaacgggaattttcttaattgggttaactgaggtaagaatggccaccctgaatgttaataacaccatttcgtgggctgaactgtggactacatgaaacagagtgcaagctgaacactagcaggcatgcgttcattcattgatctctgctcttgattgtggatgtggtgtgatcagctgctcaaagttcctgccaccttcacttccctccaacgatggtctgtgaccaggaatggagattttaatgcatcctttctcccctatcctactgcttttgtctgggcactttattgcagcaacatgagacaaaactaagatacaattgctgaacctgtctgtctgtctgtctgtctatctatctgtctatctatttgtctatgtatgtatgtatgtatatatgtatgtatgtatgtatgtatgtatgtatgtatgtatctatcctctctctctctctctctctctctctctctctctctccctctctctctctctctctctctctccctctctctctgtaacttttcattctggtctggcaatattagtcctttcaggatccaaagcctttgacctcaacctcctttgttctgtgacttctggcttcctgggttgaatcaagcttttgagttctctggattttcagattgcagaaaaagtcttttcagtctgtgctttgcaagccatccctctgttaaatacatatccacatctataccactattggttttgtttctctggagaacctgactaacacaggtttaaagcctagcttctctgttgacttggttgctccttattccacagaaggattggcagtcatactacccactgggtcttctcagatgctacttgggggggggggtgagggggggagaggtcaccttgttacagcccagagtgggtgtcagtttcccgcctgacttctgatgaggtgggaatcacagttggttctgtgatgttttgtttatagaatagctattatctacagctttggtcctgctaggctaccctttactggagacagcacatgttcttagaggctttcattagtcgtgatgttggcatttccaagcagccaaaagtaatttaatttaaatttgaagtatcataacctatcaaaaaaaaaaaaacattttagttggtgtaatattaacaactatgttacttaaatcaaatatgccagtaatcaaatatgccaataacccccattcaaaatgaaaaaatcattaattcataataattttcagatattctcctgactataaaaaatatagttttgtacttctcatgcatgtctagaattcctcagtgtcttaggattttactgctgtgaacagacaccatgaccaaggcaactctaataaggatgacatttaattgaggatggcttacagtttcagaggttccatccattatcctcaagtcaagagcatggcagccttcaagcaagcatggtgcaggaagagctgagagttctacatcttcctctgaaggctgctagtgaaagaccgacttccaggaagctagggtgggggtcttaagcccacatacacagcaacacacctactccaacaaggccacacctcctaatagtgccacttcctgggccaagcatatacagatcatcacactcagtactaataattattaggtaatattatttttagttgttgaaccaaaacagttctcctctttcctctatgcctgttacttagttgaagaaacttggtcatctggtatacctcatctcctagctatggttatgttatgttttatgacactctctaatagtcctgcaatctagaagttaagtaaatatctatgaatacattcaggttcaatgttttctatgtttacttaaacaaacaaacacaatcaaaaacagaaaacaccaaagatatcgccctccctactgtaccacatagagagacccactctgaatagttaaatcagttttcagaaatttgtaactattattctgtaaaatgctcccctgttctctttcccagagtgccagacttctagaaggcgatattctggtattgatactgaagttgacacagctcccactttgttatgggacactttggctcccacaccactatacactgtcttgttgttacaacaacaatcataattaaaaagacctaacagttttcacagccattagtttgtggatcaacctttcagagaagtttgccaagtactgttgctttctttcttacttcctttctaacattcctatgtttactgtttatctttcttagaataaacactttcacctttcccagtgaaggtagagtaattgtttatctttttttcccaacattttgaaagtaatgacctgtagggttatagcttccaaactgactggctaaccattttgagcatcctttggggctcttgaatatgtttatacttcatacatctatatttctccccctgtaaatctgagtaaatacagtgagcagtaaccatgccgaagcctaacgccttgccatttcctccatcagaaaaagtagcccatcactttagaattcagcttgacgcagacctgaggaacacggacaattacttgccggataaaacctgaatgatttctactccagttcccaataaagccctgtccctatgacatcacatgacctaggcctctgcatgtgtgcacacatgcaggccacagtgtaagtgtggggtccagctttaggctgcccggggcatgagtgtctgggtgattctcccatctctccctctcagctctccataacaatgctgtgattgcagatgtgcaccaccacacctggcctatcaattttcgtgcttgagtgcaggttcacacatctatccacctttcttcctttctctctcacattgttcccactggatgaaatttgagacatctttttgtgctttcattcttaaatgagatttactcctccaaatacggttttgactaacttcttactctgtgcctgtgttataggtgtcaccaatttattttgctttgcttttagttcttttacattttaattatttttaattacatagataaatggatggcttcaaaactctaagagtcggtgtagcttccacaagattctctcctgcattctctttgccttgcatttttgttaggtttgacttattcttctattacagaacaatgcatagtgcaaacacacagacaaaaggcagcatgcaatgcgaaatcacatatcttgcatttaaaataatcatgataaggtggtatatgatataaacttaccatcttaatcattttgagagtagagttcactgggatcgcttgtacccaaacttttcaaaatctggaactctgcaaccagggagcaatagctagctcattgatcctctcctccctagttcctgctaacctgcatgctactttttgactcaatagctgattttgtcaacacctggctgattttcctcgaaccctctttgttagacaccactctgtaggaacacagtgctcctaattattttttctttcatctgcgtagtattccatagaacgaatgaagcatgtgtgcagccagttctttattgaggaaatgtttacaaaactagtccttggctatcacaacagtgctgcaatgaatagtttaatggatccctcattttctattttttccaagtattttttatgcaggttcctaaaagcggtattagggaatgtgagaatacagacatatgcgattttagaacatttgagcttaatgtaataagcagaaatgaaatcatttaagtattagatgagaaatcgcaggtaagattaaaattctgctttaactcatgaggtcacttatttacttctttaattatttgttccactcaaaacttgggggaaggggggaaatacctctactgctgtcagattcccctcccctaaactgaggtgactcctactttttcttctgctccaaggatgctgttagaagggctacttactacctgagagtctttgtctgccaactacaactacactggggaaataaaggagggaggtgtgccaactctccaagaattttttggctgtcaaatagcacatctggacaatccgggctaggaaaaacaagcatgcacactcatttcttttaaagtcaagctctctaggctggaatgagccggacactgctctcaagaaccatttcctaaaccgtgcctgctcattcccagtcttcagaggtgtgtggtcccctggcccattacttccactaagagatggcaagggattcatagagacctcctgaaagcaaggtcacaaaagaccccagaatctggccaagagacgccctaaatttacaaaccattcattgcaccatttgtcaggtttaatcattaatcagaaggggtccaagacaaaaactaaagccacgcccagtcccatttaccagctatgttgacaagtgaccgcccccacccctgacccccaacaaaccatcctgttcaaggacccaggcagagttctgccaggggtcacacctgaacacatctcctctaagaactccttgagactgtggcgccagcgcgtggcctagtctccatccccatgatatgaattccttctggacaaggcagttgtagttcaatctagaaacatccagcctctgttcctgccgatggaaggaaggcgttcctggtggggatagccgggcgggcgattcgacttctaggacagaggttgccatccagtgggagggtctgtgcctggccatctataaatcccccaccttgcatcagagtcctggagcctgctggagtactgggtctcttctaccacgctgcctctgtgccactgggaagttcagtagcactctcagggacccttgtctccagtcctcaagacctggagctctcaggaaaagagtcaggggccgctgtggggtcttttcccaaactggcctttgactgcccccctcccccgccgtctgctagctttgtaaggcagtcaaaacagagctagaggccaaggagccggacgggaagcccggccgcctcgcccctccagcgggccctggccccctcctctccgccaggcctgccctcctctttcccacttctctcctcaccctcacctcccccatccccctctcatttcctctggcacccgggctcgcaaatccctcatccgaagcccggtttccaaccaagagtgggcactccaactcacttcctcctccccactactctccaatctcaatctcctctgctcccttcgccctgccccccttcctgnnnnnnnnnnnnnnnnnnnnnnnnnnnnnnnnnnnnnnnnnnnnnnnnnnnnnnnnnnnnnnnnnnnnnnnnnnnnnnnnnnnnnnnnnnnnnnnnnnnnnnnnnnnnnnnnnnnnnnnnnnnnnnnnnnnnnnnnnnnnnnnnnnnnnnnnnnnnnnnnnnnnnnnnnnnnnnnnnnnnnnnnnnnnnnnnnnnnnnnnnnnnnnnnnnnnnnnnnnnnnnnnnnnnnnnnnnnnnnnnnnnnnnnnnnnnnnnnnnnnnnnnnnnnnnnnnnnnnnnnnnnnnnnnnnnnnnnnnnnnnnnnnnnnnnnnnnnnnnnnnnnnnnnnnnnnnnnnnnnnnnnnnnnnnnnnnnnnnnnnnnnnnnnnnnnnnnnnnnnnnnnnnnnnnnnnnnnnnnnnnnnnnnnnnnnnnnnnnnnnnnnnnnnnnnnnnnnnnnnnnnnnnnnnnnnnnnnnnnnnnnnnnnnnnnnnnnnnnnnnnnnnnnnnnnnnnnnnnnnnnnnnnnnnnncgctggcggtcctggagtcgctcggggcagtggcccgggggatgcaacgtggaccgcgcgggactgccgtctgcatcgccgccgcgcctcgctgccccctgcgctagatccagcgccccggtgcgctgcctatcaggagctgacgctgcgtcccgctacaccaggacaccgcaagcctagggagccccgcgagctgacgaagggtggtcagaccctgactttatttttagtgggccgtgcggatttggtctccgacagtgctctctccgcgggcctccttctgtgcgctcttggcgccggcgatggggagacggcggcggttgtgtctccagccctacttcgtgtggctgggttgcgtggcgctctgggcgcagggcacagatggccagccccagcctcctccaccaaagacgctccggccccagccgcccccgcaacaggtccgacccgcagtagcgggctccgaaggtggcttcatggggcctgagtatcgggacgagggcgcggtagcagcgagccgggtccgcaggcgaggacagcaggaaatactccgagggtaggtgggcggcgggctggctggttcgtgcggggacctaggtttccctttactccacgccctccctgactgtcctgctggccggtagagccgctgccctctccacgaaaacgcttaaagaccccaagagctccaggagtgcccctcgttttactcccgagcgcctcaattcctctgcggaaaaccctccctgggggcttctgctggctggcgatggggaatcgggcccttggttgtggatggcagagcatgtgcaacgtctgtggctctgggaaagtttctcagtgtcaggccgaaggcggacatgggtctgccctgctctggggccccccccagagcctgcctgctccccaccatcgggggcgcagctctagagccttttgtttgaggacgtgtgcgagggtagcggcttgttctgtaatcgccagctccagcactccaccttctgagtagccttccttgacacttaagagccagggacaaagttaatcaaggaggaatggatttgggaacaagggcaaggatttttgaacggagtgccgctattgttctcagcatccagatgctagaatagcagcaaattatgtgtttctcttcttttcccagtttaaaaaggcaagcaaaagagagcagatgaaaggccgtgtttagatgttccggaccctcccccattccagcttctaacccatctgcttcccaaaccccccaaatgtgaagtagagctttgatttgttcgttgtcctgaagtctactcgctctggctttgcttaccaaggcatgtgtgtgtgtgtgtgtgtgtgtgtgtgtgtgtgtgtgtgtgttgctgcacccaactttacatgtatcaatcaccatgtttgtcctctacaggcccaacgtgtgcggttctagattccactcctattgctgcccaggatggaagacgctccctggaggaaatcaatgcattgtccgtgagtgttgggcagggcacacaggctaaggcagcgcagcatactccgagtggctccatttcagggctgaccttatactcagtgcttgaacactagcttgcctgtacaaagacattggtcacaccaccctggtaatgagacctcagtggtgggagggacgctgcatcagctgagacttcattaacagaaacctggaaggcagatatcgatgaatgttttataatgctccgtctccgttaggtggtttaccatttgtgtagagacacaaacgggggcggggggccttagtgttcaaacaattccctagataacagaacataacctcttgaaaattccaggtatgaccatagtgctactatggtcatgcttggactcctaggttggccatcagaagatcagtcttaagtctttgtaccacattctcatctgtgggttgttcttagcagccacatggcaaaggttttaaaggagtactcacagatttttctgaactgacctaaagtttaaagaactgttttgttttcaagagaaataatctaagttgcttgactctttttgtgtgtgaggggacagtcaagcttagaatccccacagaccagatcttatagtggacagtatgttttctcagacgtgactcttacacctcgataatgtcagtgtgtcagaacgtacaggctggaattatgagcagtaatagtaatatttttaaaaacaatattccaaaatgtatatatggaggtctccaagttctaagtggacagacagctcattagtttcttgggttatgatcaaggacccagggaggtcttatttcagtctcctgaggtgaagtatgataggtctttcccctgtgtgtttttgtagcccagacacatttgtccgttctggaggatagccaggtcacaggcagcacatgcatttacagtccgtcttgactttagactgaccttggtgttctggagcggaaagataattatgtcactgtgaacaccaaaaaggcaagctaccctagccaagggtattgtgggtatggtggcatctccagctctgtatttattggttttgtgggtttgagacagaccctaaatgctattttctgttctttaaaaggacagaagtctgaagttttattgtgaagattggttttctctttcccttctatccaaaaatcccacaacctctagtaatcaagcaaaaaaaaagaaagaagaaagacaaaaggaaggaaggaaggaaggaaggaagaaagaaaggaaggaggaaagaaagaaagaaagaaagaaagaaagaaagaaagaaaggaaggaaggaaggaaggaagnnnnnnnnnnnnnnnnnnnnnnnnnnnnnnnnnnnnnnnnnnnnaaggaaggaagactgggtcctttcagatgatcaattcataaatattttaaatacaccttccatgaaagtagggctttggctttatttaaaaaaaaaaaaaaagatagtcacttgtcttctatccaacatctcctatgtgaagtatttatagaaggtgtgttactctttcaggccactggggcattactgtggctgtctcacactagcaaggtctcccagactctggaaacagctcccatcactcaccacacacctgccacactagctgggaatgacttaggccctgtggaaagtctgactcactcaacataatgaatgtgactgccattattgagttggagagcagccgaggagaagggataggtttatggtacgcactgaaaatctgtagagtcaggttttattggactagtcaggaatgggaattccagagagcaaagcctttcagcatagttgtggtaggagtgtatgtatggcccagtgagtgtccactttagctgctctgggtctttgactatcactgtgccatttccttctttaaaagatcaactttgagtacctcacagtgagtattgtcacccgtgtttcttctacttgaaatatttgggtgctaatgggttgcattaggcaaaccttgcctgagattatgttatatctccaagaaaatacttacgatatttatgtcaagtgttgctaagtaatatttattattaacacctttggaaaataactggcacacttgagagtataaaacttaggcataaaatggacagagaggatgtgctgtgaggtgcccttcctcttttcgcatatcttaagaaggtcacatgtgaggaattaaggaaattaaaaccattgcagatttaaaactaggaattttaatcactgtattttttttttgatagcaagtatttctttgttgaattcacttatatttcattatgaagcaaagacaaactctgaggtaatttataaataatgataatcatatgaggaccaatggttgttttctcatacatttatatctctgcattctttttagtcaggccaaacacgcttcaaagtttaatgttcgttcaactcttagcaggcttcacacaggaagacactaatgagatatgtctattattgttaaagcatgatgccttacgactctattctcttgttccttatgaatatttaattagtagtatttaaagacaggatctctagctagtcccctggaatggaatgaactgtgtcacccaagttggccttgaactcccaggttctctttctggcattcaagtgctgagattacaggcttgagccaccatgcccagctgttattattcttaattgtggcttgagatgtcattgaagttcttccaagtttccatgtttgtttccaaactgactttctagctttccgtaaaaaacaaaacaaaacaaaaaaaaaacttaagaaaattatcttagaacatgaaataattgaagaagagttgcttgtgtatttatttatgaagaaactatgccatagtgtaaagcaatgggctgggattggctcagcatcatagcctttgagaactgaaaaagacagctacagtatactcgtgtaaataaaataaatagatctttaaaaaaagaaccttttaatataacccctttaatatatgttctgatgagaacactgagcctgtagaagttttgagtgtttcctgggctcattggtgggtcattggcagcatgagcactcaacctcacagtgctcatgtatcctattttaaataccagctcactcatcttctcctaacatgctcacactctcagagtggacatcctgtctgccattctaatcccaacactgctaggctcaatcatttcagttaaaatggaacacctataatgagacctcagactgaaatgaacacagggaagaaggagtccattagtcttgctttctcctgtcctgtgtgcagtacacacactgaagccatgacagacaattaattggccaggctccaccccctttaattctattttggtttgggacctaagtgaggccacttcatctaagcctagattctcaagcctgctaagaagacacctttgaaataaaactatctttttttttctttttttttattacgtattttcttcaattacatttccaatgctatcccaaaatgagcatatttcattgaaaaaattagtgatcagaaacaaatacattttaagtattctgtgatggaagccattttcttgtcccctccctgtttttttttttttttaagtcttaagaacataatattttcgcagtgttttcgttcaggaaaacttgttgaagccctgtccgtatcttacagatgctaaaggggatctaagaaagggaaagcaattactaaatcggtttgctcctggaaagagtgttcctcacattattggaggtcccaggtctctttgaaagtgttgagacctctctcgagattcatgtgcatgttgctgtaaatacttagatgtagtttcagggcattcccaggtcgttctcctatttcctgcatacagagacagagcaagtcagcacacagcctttgtgctcaaagagggaattcaactgaggatagagataaatctttcagctccttaatggcctggctaaatttgggagacagttcccattccagagcacttgactgtaggttttgagtatctgtggtatgtgctatgtcagtgagcctcatattcttgaccctccaatgaccctctttttcactagaggtcacagctgtaggaagcttcgatccccacccctgtcataagggctttttggaacagcagaaacggactaggttgcattgatgacgtagcaggagactagaggaaggagagaaattatgaagggggatagaataaagattgatgacagagtagggcagaagccatctgggatggactgtgcagggaacctgatatttggccaactcaggagggcctggggtttcttgtttctaccaattttacattcttacacagtgggctatattttctacgatgttcagtctctctgggtttcctccccactgccagctccctgaggatctagacttcctccttcagtaaatcgtgaattcaaaagattttagttttgaattaaaaaaaaaaaaagaaaaagcaactttcattgataatcaagttaaagaaattggtgctaattagtatgatagaattgaagagagttacactgatatatcatcacaaggaaattgtaaaatgtagtgccatgtctttactgggtgattttgtttcatgctgaaaaaccagacttttgcaacattaattccatatccttatctccccatcctatggcttgaaaatatggctttcatactgtgaagcacgacggagggtgttgacagtcattgcctcttgtgttgtgttgtctgcagccatttgcaggaacagttgtggagatggattctgttcccgccccaacatgtgtacttgttccagtggacaaatatccccgacatgcggagccaaatcaagtacgttccctctctggggctatacttgccacatttttcttaaacccacgaaccagtgacaagtgtcctcctcaaagaagatagggattggtgattgttctcactcaccaggactttgttaagttttgaactaagaccatcttagtgcctcagctgttgcctaatcctcaacagaaactgtgtgtaggtagtgggactgttcagagtccatgaagtcattcatcacaatagctgtaacttcctgagcttttggtactcacacggttctatgtgcagcgtttcaagcctctcatcaacattatttgatactgatgtggacccattttgcagaggagggaagcgaggcacataatatattaaatgactactgtcctgctttgatgtctagtgctataataaacatcatgaccagaagcgacttggggggggggaggatttattttatcttacacctcctaggcaaccttctatcaccaagggaagtcagaatagggactcaaggcaggaacctggagtgagaaactgaagtgcaggccatagtggaatgctgccggccagcttgctcacatggcttttctatctcttttctttaccacctggaaccatctgcctaggtagtagagcccatcatgggttgggcccttccacatcaacaattaattaatcaagaacatgccctgtaaggttttcccatggacacagtaccccagatgactagttcgtatcaaattgacaaaaagctaaccagctcatttatgcaaggcaacacagacttgaatctactgactaagaatgactcggcagggagtcccaaacactaacctgtatttactgccttttgtgtacagcctcaatttagtcttagctatgggaagagaagaagattagaacaacagatatttactgaaatactgaccaactactttatatgtaccaagccactttgctacgcatacaaatttttaacagttccatgaagataactatagcagtagacgaaaagtgtatttttttaatgatgctttctgttgagactcccaagtccaagactgattgtctgtgttaagtgtttaagatcacactagataagacagaagtgaccctaggtaaggcagaaatgatattgcttctttaactgctcaatatctaaacgagggctttaaatctgcctcttaaaatgagcatcgtaatagttccctccacaagtttatgttccacaagggtgatatagagcatgtctgatccaggaataagagtcaaacaatgcacaccggtgtgtgtgtgtactctgatggaccatcgacaagagcctctgggtccactgcttccaatagtctatgttttacctgtgatttgaaacttaacgtccaaacacacaaagactttgaatgccctcaggagtgcacttcctcctgccccggttgtctgccagagacctttcctctgtgccttcatgatttctcgatttgctcacacctacccttggcactacaacaaagcataaaccagagcaatactgctttttttttccaacttaataatcttgttgattatttggggatttcacacaatgcaccctggccacattcacttagcagtcttcccagacctcctcccacccttgtgacctctcctcaagaataaaaaaaaaaaatacaaagtgcaatattgcttcttaaaacccagacctgaacaagaaacactatacaaggtactgggttatgtctggaacacacacacacacacacacacacacacacacacacgcacatacacacactcatttggactttagagaacacctacttccttaccaccagaaacttttctagcccttccaaccttcaccctacttgaacttgctaaagcttttttagcagtatttatcactaattgcctgaaacactttcttgtgtgtttgtgtgtggggggtgtgtgttcgagcacatgactgcacactcatttggaggccacaagttaacctagggcatcattcctcaggtgcagcttatctctaaagtgagacttaattcatggctgaccacagtctccatgtctgcaggtgcttcagcctcggcaggtggccacgtcatccactcagtgcttacatgactacagctttcctttttccactttccttaaagtaactccttaagtatgtgggttctactacacaatgtatttcaactctaccattttacattctgtgcggttcgaaccatcctcatctttcaccagactgccttgcacctgacatctttcaatcccttctctacagagcagtttctcctttaaaatcaaatatcttcactttcattgaaatcctttccttctctctgcaactggaacaaaccaagcctttggtggacaagaaacccaccttacctgactggcctggcctgcctctccaagacaccgtctatatcagttctttggaggaaaccctaaaagcatcctaagatcgttagaggttgagttgttaaccctaaaagtgactccttgcctgactgcttctcatctttcaaagttcagtccacacgtcacataaaattgggnnnnnnnnnnnnnnnnnnnnnnnnnnnnnnnnnnnnnnnnnnnnnnnnnnnnnnnnnnnnnnnnnnnnnnnnnnnnnnnnnnnnnnnnnnnnnnnnnnnnnnnnnnnnnnnnnnnnnnnnnnnnnnnnnnnnnnnnnnnnnnnnnnnnnnnnnnnnnnnnnnnnnnnnnnnnnnnnnnnnnnnnnnnnnnnnnnnnnnnnnnnnnnnnnnnnnnnnnnnnnnnnnnnnnnnnnnnnnnnnnnnnnnnnnnnnnnnnnnnnnnnnnnnnnnnnnnnnnnnnnnnnnnnnnnnnnnnnnnnnnnnnnnnnnnnnnnnnnnnnnnnnnnnnnnnnnnnnnnnnnnnnnnnnnnnnnnnnnnnnnnnnnnnnnnnnnnnnnnnnnnnnnnnnnnnnnnnnnnnnnnnnnnnnnnnnnnnnnnnnnnnnnnnnnnnnnnnnnnnnnnnnnnnnnnnnnnnnnnnnnnnnnnnnnnnnnnnnnnnnnnnnnnnnnnnnnnnnnnnnnnnnnnnnnnnnnnnnnnnnnnnnnnnnnnnnnnnnnnnnnnnnnnnnnnnnnnnnnnnnnnnnnnnnnnnnnnnnnnnnnnnnnnnnnnnnnnnnnnnnnnnnnnnnnnnnnnnnnnnnnnnnnnnnnnnnnnnnnnnnnnnnnnnnnnnnnnnnnnnnnnnnnnnnnnnnnnnnnnnnnnnnnnnnnnnnnnnnnnnnnnnnnnnnnnnnnnnnnnnnnnnnnnnnnnnnnnnnnnnnnnnnnnnnnnnnnnnnnnnnnnnnnnnnnnnnnnnnnnnnnnnnnnnnnnnnnnnnnnnnnnnnnnnnnnnnnnnnnnnnnnnnnnnnnnnnnnnnnnnnnnnnnnnnnnnnnnnnnnnnnnnnnnnnnnnnnnnnnnnnnnnnnnnnnnnnnnnnnnnnnnnnnnnnnnnnnnnnnnnnnnnnnnnnnnnnnnnnnnnnnnnnnnnnnnnnnnnnnnnnnnnnnnnnnnnnnnnnnnnnnnnnnnnnnnnnnnnnnnnnnnnnnnnnnnnnnnnnnnnnnnnnnnnnnnnnnnnnnnnnnnnnnnnnnnnnnnnnnnnnnnnnnnnnnnnnnnnnnnnnnnnnnnnnnnnnnnnnnnnnnnnnnnnnnnnnnnnnnnnnnnnnnnnnnnnnnnnnnnnnnnnnnnnnnnnnnnnnnnnnnnnnnnnnnnnnnnnnnnnnnnnnnnnnnnnnnnnnnnnnnnnnnnnnnnnnnnnnnnnnnnnnnnnnnnnnnnnnnnnnnnnnnnnnnnnnnnnnnnnnnnnnnnnnnnnnnnnnnnnnnnnnnnnnnnnnnnnnnnnnnnnnnnnnnnnnnnnnnnnnnnnnnnnnnnnnnnnnnnnnnnnnnnnnnnnnnnnnnnnnnnnnnnnnnnnnnnnnnnnnnnnnnnnnnnnnnnnnnnnnnnnnnnnnnnnnnnnnnnnnnnnnnnnnnnnnnnnnnnnnnnnnnnnnnnnnnnnnnnnnnnnnnnnnnnnnnnnnnnnnnnnnnnnnnnnnnnnnnnnnnnnnnnnnnnnnnnnnnnnnnnnnnnnnnnnnnnnnnnnnnnnnnnnnnnnnnnnnnnnnnnnnnnnnnnnnnnnnnnnnnnnnnnnnnnnnnnnnnnnnnnnnnnnnnnnnnnnnnnnnnnnnnnnnnnnnnnnnnnnnnnnnnnnnnnnnnnnnnnnnnnnnnnnnnnnnnnnnnnnnnnnnnnnnnnnnnnnnnnnnnnnnnnnnnnnnnnnnnnnnnnnnnnnnnnnnnnnnnnnnnnnnnnnnnnnnnnnnnnnnnnnnnnnnnnnnnnnnnnnnnnnnnnnnnnnnnnnnnnnnnnnnnnnnnnnnnnnnnnnnnnnnnnnnnnnnnnnnnnnnnnnnnnnnnnnnnnnnnnnnnnnnnnnnnnnnnnnnnnnnnnnnnnnnnnnnnnnnnnnnnnnnnnnnnnnnnnnnnnnnnnnnnnnnnnnnnnnnnnnnnnnnnnnnnnnnnnnnnnnnnnnnnnnnnnnnnnnnnnnnnnnnnnnnnnnnnnnnnnnnnnnnnnnnnnnnnnnnnnnnnnnnnnnnnnnnnnnnnnnnnnnnnnnnnnnnnnnnnnnnnnnnnnnnnnnnnnnnnnnnnnnnnnnnnnnnnnnnnnnnnnnnnnnnnnnnnnnnnnnnnnnnnnnnnnnnnnnnnnnnnnnnnnnnnnnnnnnnnnnnnnnnnnnnnnnnnnnnnnnnnnnnnnnnnnnnnnnnnnnnnnnnnnnnnnnnnnnnnnnnnnnnnnnnnnnnnnnnnnnnnnnnnnnnnnnnnnnnnnnnnnnnnnnnnnnnnnnnnnnnnnnnnnnnnnnnnnnnnnnnnnnnnnnnnnnnnnnnnnnnnnnnnnnnnnnnnnnnnnnnnnnnnnnnnnnnnnnnnnnnnnnnnnnnnnnnnnnnnnnnnnnnnnnnnnnnnnnnnnnnnnnnnnnnnnnnnnnnnnnnnnnnnnnnnnnnnnnnnnnnnnnnnnnnnnnnnnnnnnnnnnnnnnnnnnnnnnnnnnnnnnnnnnnnnnnnnnnnnnnnnnnnnnnnnnnnnnnnnnnnnnnnnnnnnnnnnnnnnnnnnnnnnnnnnnnnnnnnnnnnnnnnnnnnnnnnnnnnnnnnnnnnnnnnnnnnnnnnnnnnnnnnnnnnnnnnnnnnnnnnnnnnnnnnnnnnnnnnnnnnnnnnnnnnnnnnnnnnnnnnnnnnnnnnnnnnnnnnnnnnnnnnnnnnnnnnnnnnnnnnnnnnnnnnnnnnnnnnnnnnnnnnnnnnnnnnnnnnnnnnnnnnnnnnnnnnnnnnnnnnnnnnnnnnnnnnnnnnnnnnnnnnnnnnnnnnnnnnnnnnnnnnnnnnnnnnnnnnnnnnnnnnnnnnnnnnnnnnnnnnnnnnnnnnnnnnnnnnnnnnnnnnnnnnnnnnnnnnnnnnnnnnnnnnnnnnnnnnnnnnnnnnnnnnnnnnnnnnnnnnnnnnnnnnnnnnnnnnnnnnnnnnnnnnnnnnnnnnnnnnnnnnnnnnnnnnnnnnnnnnnnnnnnnnnnnnnnnnnnnnnnnnnnnnnnnnnnnnnnnnnnnnnnnnnnnnnnnnnnnnnnnnnnnnnnnnnnnnnnnnnnnnnnnnnnnnnnnnnnnnnnnnnnnnnnnnnnnnnnnnnnnnnnnnnnnnnnnnnnnnnnnnnnnnnnnnnnnnnnnnnnnnnnnnnnnnnnnnnnnnnnnnnnnnnnnnnnnnnnnnnnnnnnnnnnnnnnnnnnnnnnnnnnnnnnnnnnnnnnnnnnnnnnnnnnnnnnnnnnnnnnnnnnnnnnnnnnnnnnnnnnnnnnnnnnnnnnnnnnnnnnnnnnnnnnnnnnnnnnnnnnnnnnnnnnnnnnnnnnnnnnnnnnnnnnnnnnnnnnnnnnnnnnnnnnnnnnnnnnnnnnnnnnnnnnnnnnnnnnnnnnnnnnnnnnnnnnnnnnnnnnnnnnnnnnnnnnnnnnnnnnnnnnnnnnnnnnnnnnnnnnnnnnnnnnnnnnnnnnnnnnnnnnnnnnnnnnnnnnnnnnnnnnnnnnnnnnnnnnnnnnnnnnnnnnnnnnnnnnnnnnnnnnnnnnnnnnnnnnnnnnnnnnnnnnnnnnnnnnnnnnnnnnnnnnnnnnnnnnnnnnnnnnnnnnnnnnnnnnnnnnnnnnnnnnnnnnnnnnnnnnnnnnnnnnnnnnnnnnnnnnnnnnnnnnnnnnnnnnnnnnnnnnnnnnnnnnnnnnnnnnnnnnnnnnnnnnncattactatgagaaattcatcctgtctgtctgtctgtctgtctatctatctatctacctatctctgtctttcctctctctctctctctctctctctctctgtgtgtgtgtgtgtgtgtgtgtgtgtgtgtgtctcgtgtctatgggtctcattgtttacacatctgttgatgaactttaagttcattcgtctcttggctgttgtgagtgattctgttgcaaacaccattttataaaaacctgtttgagtcctgatttccattcttagaatatctactcagaaatggaatctctgttttcagagtttttgaggaaatgctatattgttttctgttacagctgcaggagttattcctgacacgaagcaaaagggcccaggttgccttgctaaccctgggtgctttttttttcttttttaatgaaaaccactctcataggcatgaagcagtattacactgtggttgttctagttatttttttaaatactgtcttctaggtgtagttgtcgcttcctgaacaatgctacaaagatgttagacaatctgaagaaaggcaaacagtctatattctgctaaaggcaggaatagaccaactcgaagattagaaaatacatattttagtgtctacttttgtgttgttacaaagactggactctgtgtaaagatggccacaggcttgtgttttctaaaggaaagttagggggacataggtagatgggaaagccagacccttgtgatggtggcttcttgttcccagaatacattgcaagcagaacctgcttggagccattatctaaactggaccaataaggggaaaggaaggaaccaggggcccttccttaatcaccttagacatccagcccagaatctgttcagcagaacccaggcctagggttcctcccatccagaagggatgcttttgctttcaaaggcagctcagtgttctatctttcctggatgttcaattctttgtccaccccccagggaatgagcaattccccattgatgatcaatgacaccccattacaatacatgggaactctcactcaaggttgcatacctgcccaaaattcagagactcagaagtggctgctctttgaggacctcttctgagagggcaaagcacctacacacataactaccaaggacggagctgccactcagtcatcacgaaggctagcattggagtagacagagtaggggattgggtgcttttgtatcaaggagttttgatctcttatggctagacagatatttctcccaggagatagtagaggcttctgatgctgcccctaagccaagagatagggcatgccaaaccccaaggacccaattgttgtccaaagaggaaggctggggaggacctttcactccatatgcttgggaaagaccatggagaaggtcacagtgctcaatggcttcttacttcatacacagctcttaggtccctctgctgtgagtaactcaagggtcagcatctggttgtagggggatgggaagacttggtcggttctattttgaacaattgcagtgtgtaggcaaaacctgaagtaatttttaagtttctgatgtcaagtaaaaaggtattgcccagcttgctgtaagttgaggtggagcatgcctgaaattcaaatcgaggctctgagtgagctagggggagtgttctgtccttgtgtagtcaacgttgtctgagggatgacagctctttcaaatacccccctgcatgcacacaccccttcttctgcccaggacctcccccgccacacccatgttgtatacacaaagctctttgctggccttgtagaaaaccctggctcctggagatccccaagctgatggaggagtcaggaaagagaacaaagaggcactgactgtggagatgtgggtggggtccagaggcagaaagcttgtctagacagacagggtcctctggtccatccctagcaacagagcagtcagttatggaagaaagacgttggaatttaagagttttccccatctgtgtgtttctatcactaacatggcctggtaagttcatgggaattggcagaagcccaggttcaggtgctagacaagctatcatctgtagcagcttggggcaaagaaggaaaagactccttggctagagatgaggactccacaggccttaatacctggcctttctgcccggaatcttcaagtctccctttctctctctctctctctctctctctctctctctctctctctctctctctctctctctccctctccctctcccccctctctgtctcgcgagcgcgcatgtgcgctctctcacgatctctctccttaagatagaaacattctttccctcctgtttttcttgtctctttctgcttgttgtggcattaacagtcaaagggggaaaaagcatcctggtgttctctagagacagggcgcctgcggtaaattgcttgccctgagtatttttcaatggtatatcttacccaggctagataagattaaggttttattaaggtcacagggtgccaaagagtcatatcatatcagcaaaggcaaatgtgaacaggccctgccttcttcatgatcactaatgaggaaggtgtccatgcccaggttggtaatgaactgtgttctcagacaggcacctactgttctcatgatcgctcgggataagaggagcaggagatggtacatctctggagcaggctctggagaaggagaccaaggggaacatctggaagatgttctaacatacatcgttttgtcttttgttatccagtgctgactgttttagcatatctaaccagatgaaagctctggagagggagaccaaggggaacatctggaagatgttctaacatacatccttttgtcttttgttatccagtgctgactgtttagcatatataaccaggtgaaagtcacaggtacttctcctaattcaactttctgttctgaaagggagagcgtgacgtcttctttagaaccattgagcagagcagagcatcaaagtgattgtttagagcacttcttaggactgtctttgccctgtttgcagcctgaattcagtacccaggtatacttggggtgtctagaacaatcagagggtgtcttgtctgtttctaacccacaaaggagcagctatggagtgaaaagcccctccctggtagaagagtattctgagcctcgcccagcccactgtcaaccttactgatgctatgctgtctagttggaggaatccattaggtactgagttgccagccaggatacatgcaaacagctctttcctgagtctcataggatggatccttctgtctgcctttgtcacagggacaatagaacctatggtacaagcaatgccttagcctataaatccagtagttagcaaataaggtgagggtggtagctggtagacaagagggacaggaagagtttaatgttttcttctaagttgtcttatatggctgagagtgaagatggagatgacaatttgcagtttctgaacccagaaaaacccttgaaatatgatgtttggtgacaggagggccaggaaaacatttaaactctgttaaagcattgcctaaaatgtcagcagcgatttttagggacgtcactgtgtgtccttccctctacagggcacagcaatattgctcatttagggaagaggactaataggtaaatgaacaggtgagagtctatgctggctagtttcttgtcagcttgacataggctggactcatcagggaagagggaacttcaactggggggttgctttcatcaaatgctgtaggagaatctgtggggattggtgactgataggaagggtccagctcactgtcataagtgccactccccagggctgaaggtcctatgctgtataagaaagcaggctgagcaaggcagtaagcagagttccttgatggtctctgctttggtacctgcctccaggttcctgtcccagctgtgtctcattgtgaactatgagggtctataagccactttccccaagtttgttttggtcagtgttttactatagcaacagaaacctaagttgggtgtaatccagtgtaaatttaggtagtgagaaggtctagggtgggaagacagggaatgagaatttgcacacaggtcgcagtctctgtgagcgtgtgagaaaagcattctgggtccttgatatagctgtctcttgtgagactaggccggggcctagcaaacacagaagtggatgctcacagtcaactattggatgggtcacacggccaccaatggaggagctagagaaagtacccaagtagctaaagggaactgcagccctatatgtggaacaacaatatgaactaaccagtaccccggagctcttgtctctagttgcatatgtatcaaaagatggcctagtcggccatcactggaaagagaggccctttagacttgcaaacttaatatgccccagtacaggggaatgccagggccaaaaagtggaagtgggtgggtaggggattggggggtggggtgagtatggaggacttttgggatagcattggaaatataaacggggaaaatacctaatttaaaaaaaaagaaaaaaagaaagaaaagcattctggacacaaggaaaagcaaattccaagacgtggcagaaacagactccatggactgtgaagacagtgatgggacctctgtggctggagtgagacagagacaaagggacaatggcaggagacagatctagacaggaaggtttggcttagtagaccaagggaagaaacttgaatgatctctcaagcatgatgggaaaacaatgatttttctatggtcaagtgtctcagttagggtttctgttgctgtgatgaaacactgtgaccaaattgcggatgaaagggtttatcggactgaagctcccaactcacaattcatcactgaaggaagtcaggacagaaactcaagcagggaaggagcctggaggcaggagttgatgcagagaccatggaagggttctgttcactggcttgctcagcctgctttcttatagaacccaggaccagcagcccagatatagcactacccacaatggactggaccctcccccccatcgattaccaattaataaaatatccttcaagcttctctgaagcctgatcttgagacattttctcagttgaggttccgtctcctcagatgactttagtgtctgtcaagttgacttaagactgcccagcgcatcaagtgctgtgatctgattgacattgtttacaaagtcaccatggataccttgttgacactgcttggcttgtgaggggggcaggaaggaagcagaggaggggatggacacaggccaccatggccgcaaaagcactggtgacatggtgacagtgcaggccacacttgtggtctggaagtcatttgtggtccaggtgtgatgagttgaaaaaaagaaaaagaaaaaaaattacagattgagaattatcagtggagcctggctggctgatataccatttgatgatgtgggaacagctgacagggaggctagatgggcagagactaatggagatcaatcactgtgttaggtctagagatctgttggacttctaagtgcactcgcctgtgaacacagttcaaaggacagacgtcaagacagggccataaattggatgtatttggattaaaattccagctctaatattttaatcataagtatagacaataattaggatgttatagacaaaaaaaacagacttgaagtcagagccttaggtgacctcaacattttgatatagtcaaaggaaaggggtctgaaactttgaccgggaaaataggttgagaatggacagccctgataccctggaggcaaagtccccatatcaccttatgctgtcctgcatcagggaagtttatttcttcttttaggcatcttaacatggctgagaatgttatttttatgtgagatgtctgtagaagtcacagccacaatttcagactcaactggagcggtacaggagtctggctcacgagaaaatgtgcctgtcatgtgtcctcgcacagagcaggtgctggggccatgtctgacatgaagtgttctttaagcaaccaagctcctccggtaggcgagcgtgctctgctcgtcaggctgacaccaagcagtgctcttgctgcagatgtcatgttcctgttgcagaggtcgctggcaggtcagacagcagcttctgttcctgtggagtctgatctaccctccctgccctcccctttgcacccatgctaggcacaggcagtttcttcttagtgagtggccagaatttcttgcagggtagaaatctgaatgcattcaagtgtcttccaagcagtgtttcaactgtaaagtactatttccagattcatttgttaccaaaaaaatattaatctatagaatcatacctccctcaaaagaagaaaatgaccctgttttatgttgtgagtgtctatgctccatttggactttctgcttctcttttgttgtttctcttcagtgtaacaagtctcctatgtcatgcttgtgttctataccaaaataaaatggcagttaagaatacagaaaaagaagccacgtgtggtatgcatgctcttaactccagcacttgggaggagaggtaggcagatctctgtgactttgaggctaggcaggactataaagagagaccttatctctaagcaaataaacaaacaaaccagcctccattaaaaaaaaaatcaccctagggatataaagaagccgtattatatctttggccttgcttgcaggtttacataattctcacaatactgtgggctgggaaccacccactgttgtgagcaggcgtgctgagaatcagggaatttaagtgctggagtggaggagagggcttattgctcatacacccgtatgcctggcaatgtggcagaaaaaggtgttgagaggggctgtcacagggcagggttacatcagtaaccctggtgcatggaaggagggacttaaatccagctaactcttcctcttatgtgattgacaggctcaggagcaaatgacttgcagtgcaatgggcccaagtctttctgttcccaggacccttatcacagtgttagaaatttgacatgggaaatgtaagaactatttgctaacccttttttttttggcgtcatgttatttggtgtcaacccatgtcatatgtccacataaatattttatgagcaataattctactttctcaccctccaaatatactgtgaagaaatacagaggtattagtctaaccctgataaaatttaggctagtgttacattgtaagtggccagtcttggcaggagaagctgaaccttcatcagcactatcttcctgtctgggtttggagaactcaaaaacagctagcttatgacttccttataggtcctaagcatggacagacagattgtccccatttgtctttgtgatttgagggaatgttgcagatgtgcctgcacctggaggatggagattgtcaaatgcctttcctagatcatttacattttggggggggggggtggtgtctcactgaagctgaagccgccattcagctacggtggctggccagggagctccaggaatctgtctgtctccatctccacagtgctaagatcacaggggcaccaaacttttttgtatggatgctaaagtccaaagtctggtcgtcgcacagcaagtattcctggctgagccatctcccctgccccaactgtatcttttccaaagactgatacagtaacaagaggctgggtctgggaaagtggctgtcctttaagctttcttccacttgatacatttaaagaagattccttgcattttcattaatcacattcaattagagttatccttctgcaaagtatgcgttgggcagttgggacatcctccatccaaatctagtaattgtttacaattgagccttcaagtactggccgttggttccaagaattacacactccttagagatctctgggaagtttctgttccatttgacattcctgtccacccccatctttattcccccttttcctgacctttatgtttacccatctaactgttggccagctttggttttcaatgtgatggcgtgtcagaagtgccgcttagaaacataatgtgttatgtatggataaagaagcagggggcgtggttcctggggagacacacttctccagagccgtagagcatcatgccttgcaggaaaaggacaactgcaagaagtcaccccgaggttactgacactgatgctttaacagggagaaaatattttcttcccaatgattgggaggcagcaatcacaccatatgctctggacagtggtgatgggtgaggaaggagctgggtggctgcaccttcagcctgtgcctgcacttcttgagagtcttattttcgacgggtacctcactggaaaagcatgtgaatgattttgtccccttatgttccagtagaaaaagtgatcaagcagtgaatagtgatcttctgactctgtgagcatcagacccagccaatctgatgcattgttgaagcatctccatccgaccaatcagatacattcgcttgtgttttagagaagcgactggatataagatgtcttcttgacagtatcgttgcaggatcttgctgtgcatggattaaaggtgctgtttaataagctgtctcttggtgatcttttttttttttttaatgtgtctgcagctgtctgtgagaatggatgccagaacggggggcgttgtatcggccctaaccgctgtgcttgcgtttatggattcaccgggccgcagtgcgaaagaggtaagagggaaggagagactgcgggagttaaagtttcaaactttattctgtaacttttaatattataatgacgaatgcacgtttttgctatccagtgagaactggtctagtgaaatgtctattgttttgctccagtagcttgaatggtaagatttggggcagcaagcatatcagtggttttcatgacaatgaccctagtctgagaagccagttgagaagtagtcgcttcagggtgatgttagcttactgacccatggtagattctcatcatgttcatttattctctggacactgttgggaatacaccctctactgtagatgatgatgatggtggtggtggtggcagcaatatgtccctggctgaactccacaaaatccgacacaagttgtcctaataataagaacacacattatactccataacactagtccagaagtctccggattatatgcttctgttggtccttactggagaggatgctggagtgttttcttttttattggttggttgtctggtgatcgtatgagaactttaatcattactgaggcaacccacatccttgatccatctgtagagagaaccttctcctatcaccgagtctgggtcagttagagtcttcagagatatttcatgctaaagggattaatcttaggttccgcacagtagtccgcagtgaaagtaaagtgttctgtgttgtctgtgggttcagcagcctttcccgcagcatggtatgggaataagccttcccaacgccacttgcaaggaagagctaggtatggaaacccagcagaacttcctttaggcaagacagctaagaaagtatcctgtgctgggcactgtatctctgtaagcagtcatgaaagccattataaaatcagctgacagtaatttccatagcaactaaacctgtttcctctcagctgctgagaacagccggcattgatgctctggcaatgtagtcatatagcctaatagcaggtgtggccaccatgatccaccaaagaagttaaaccttagaaaatgtaataaataactgcttagtgctgagtcatgagagcaaacctaagtttagattaaaagtaatattacagtatcatattattgctagatacatcttcaattttttttgccccatgggctgtggtgacatctaaagacacatggaacttcactggaaattaaagtgtacggtgttaatgtcagtgagatgattgcaggtatatgtgcagagaatgcttaaattgtgaatataccttgcactttcaaactgagactcactatcctcagaaaaatttcatcttggcatttagtgtaagtcttgagaaaaaaatgggaaatttgaataatatggtgaagtctgagaagttagacttatgccaacttttaacatatgtctgtgtgtatgcacattgagatatttatgctatccctaatgtaattgagatttcttgggacagaagtacattccacagatgacagagtttatcattattcttcggataaattctaaagcttttaccagatgttcttactggggaaaggaaaatgagttgtgacatgttagcacagattgttggaatggagtgatacagattccctaagccatgtgatgtaaagaccacagaatataagatggcaaacctaaaaaggcaaacgcagtcctgaccagtggaaacgatgctcgaaactctacagctctctcatctctaagcaggattcaaatcagtttctaactggcacagagagggttgtgtccttcagcctagacttccattgcagctctgcaacagttactcctttgctgcaggtgatttgactcctccggtagagctgtctacattgtacatgcacagtaacatgtttgcagaagaaattataaaattaatccgttaatgaattgaccttaaggatactttaaaaaaaaaaacttgtttaaaaataagcttttaatcactgcccttctgtattgaaagtataaaagctttgtttctttctaagaagcagccaggaatttccactcctaaattgcagccgtgaactttaatctttcaaggacacatttctttttccgttgatttttttttacataaacatgataatttttataaaactggagttcctattcttccttcaaaactatcgtaactattatatacaagaggaatgacccatttatgttgagtaaataggttaatttgcctgtttatagttaaagtccatgttcttactcaattactgatttcagaatacatgttctttattatataagaaaaaaaaaggagttttataaagtcaaggaaaatttccctgtttaatgtgaaatacatagaatttccctttaaactggcctcctgggctcaggggccccgtagagcaggtctgcttttccagcgatctgggttctggtagactactctctggaaccaggcagagactgtgtgtagctaatgactggcatgattaagcgatttaacttgagtcttggagctgtaatctgaaactctggagtctcttgtctttatgatacacacaatgaccttttatagttagcagaagaagagggagaggccttgtggtcacgtgctaaagtgcagaatgctcagttctgtccaaagcacatacaagtttttcattagttttgcttttttcaccaaatagatgaaaaaaaatatttcctatgcacctgaggggggggggaacaagaacagaaatcagtattatagagtaggcctcaatgttcccccaagcagaccttatttcttaccaacagaaatttcaaggagacagagaggaagtaaaggagtctgcctaaaggatgtttagacacactaaaatgattatgtgattcccaaagtgttttcccacagtcctttctaaaaacttctttgacttcagtgaaaaacttacttaatgattgcatttctcttgaaatgttccctgaagagcgtctggtaaaaacatatgtcacaccttcttagttgcatacaaactgtgactgcagattgtttttgtcatgtaaaatatgtttttcttacaaaagcctttaattctataaaacttcaacgaccctgatatctagtgacattgcctttcattttttaagtcttgtcaacactaccagaagaaggtgctttttaaaaagcgggtctagaagattagtttttgaatcaacgtttgcaagataaacctttccaagatgtgcatttgcaagggcatgggattgtgggtcagttgtgtggcttgtaacagcaaagattagggaaggtgtatgaaatcatacagttgtgtagacttaaacctgaactcattgtccaaagggatgttgaggcagagtcctctagtgttcccggagccctggagccacagggctctcatgtctacctgcagcaatttccttgtcactatcctgattggttgaatctcctacatggtttcactcctactcaactgggacatttaaagcacaaacacacacacacacacacacacacacacacaccatattacctggttcagtatgaatgtggcatcagcaccttctccaacagatccaatcatagttgccactagagtagttcatgattgcaacctcaagtctcattagaaaaatttgaattgtctggatgtttgttcgcctctgcatatgtcaagagctaagataactgtgatagtcagtaaaccacttagacctcatctatattccccaaaacaggaggagagccaccttagagtttctctgaaatctgggaataacgtagaccaactccaagttgtaaatcactcatacacttgttatcctgtattgatttccagggcttggaatttattataatggatgcacggcggcgggcttctgtagtattttagtaacacggagaataaataatatgtgcagagatacaggaatgtgtgatgggagaagcaaaccagtatcctacagatctctgtgggcagtagatttgatactttcaaggaatgtcgatgcaatactttttatttaaactatattttattgtactttttaaatgaacagaaatatgcatataatacaaggtaattgagaaaataatacaaggtaaaagagaagttgcagatattcatatttccaggctcagagttaattactatttatttactagataattttagcctcttgtttttattggacataaagtattttcagagaaggggaccttgccattcttcctagaacctgctcctccgcaatcggaaacactcttatgcgtccgttctcctttggcactgtcagatacaccgtgggcttcaatggctgcattacaccctatagttacaaggatgaatctgcatctgttgaccaagcctctgctctttataaagccattctccaatctcacagacagggaagttttgctcagatcagacatgtagcactgtgactatgaaaatcggcagacatatactgcagtccaactcaaggccccagccttagtccctccgtcacaggtatacggccaggctgttttatgtcacttgacatttaagtgacacttggttttgttttggattcagctctgtgcaataaacatatctgtggataaatctatatcctgagctatattcttaatctatatcatataaatataacaagaagtttgcaggatgtttgagaacaatggagactttgacacattcttctcatttccgtggaaaagcccaccgtgattcattccgtggtcactgtgtttggaaaatcctttcttattctaaaatcttatgagtgactatttattttcaagctctggtattttatttcttttaatctcttcagccataaattagaatatacgactactgctaaactacttttatttagaatatttaacttttactcctcactcaaatatttgttaagaacttatcaagtattgatcttgggaatctagttatgaagaaatagtgtatactccattcaagagaagctaattgtgtatttagggaccaggactggaaatcttcttccaatacaaaggtacagtttccgtggtagacgccataataggaatggaaagaagtcatgagctcagagatgcttctcagctgtgggcaatcagaacagtgctcctgtcagcaatgaaaatctagactgaaaaacagaacgtatagctttccaccacagtaaaacgccattagactatcgcctgtacttgatattacaaatgatattatggctcagtctaactctatttaagcttcataattagttatattactgtaatgtgactatgccagttctccccagaagtacatttcccttttctttcacactgaagatttagtagaatggaaattgcaaagaagaggtagtatggagtataaatgttaaacccacatatgcttatgtgcctgtgagcacacacatcttagcacttacacacacatgcttacacacacacacacacacacacacacacacacacacacacacacattctgctccagcaaagtcattaagaagaacattttataaccttgtacgctttaagctaaacttagccttaaatgggcatcagagaaataccagaagatctgtgagaactttatgtctttggcactggctcagatggcatctttatcttgaatgccattgagaagacaaggggggaggggggatggagcagactctaagaagcagaagcaaaggaagagaagaaaaaataaaagaggacagagatggaagaatcagtggtcatcagggcatgtgatgctggtgtgtgtcgagggaggatttgggatttggagaaaatcaattcttgaataggtttatctagaaaaaggccatgactccacctctctatttttaacttaagcctctctgcttacatctgcagaatacgacatttccccacttcaacatcagatcagatggcactatattaacatgtctggaagctaggcaatgctgccataccatatataaactcataaaaaacttaattgtcataaaatattgctatgtaggagtttgttgaaaggaattaaatacatatatgtagagtgagcatgaagtaacaaatgcagttttagcccaaagatccaaaacaaataatacttgtctctaggagtgactataaccttgtaattctcccttagaattattgagaggattaacagtcatgtaacctgacatataattagtgtgcccacggaacggcaggcatccaatgctatctattgtgtcttaggaatgttgggtacggtaaaacttcagaagttggtattaccctggttagcattgcccgccttctctgacaactgcttctatacagataataagtttctgtgggaattaaatgacaataataaagcttgacagcgcatagatgatgatactgatagtttccacagctccctaagttatcaaaaagatggatgcaatggttacttgttcaaacgtaagtctcatgtggaccaggttgtagaggtactgtttaatgctgcttctcttgacaggaagggcttacaatacatgggaacattttagagaatttcatcttcataaaaggagcattaacggaggaagttcctagctgctgtttggcacagagaaggtgctatagctataaaaaccatgaagccaagtcagagagctgcacacttagacatgatgatcttaataggtgtggtgagacggggctgatgagttaggattctgggctctcactccttgctctggttcatggtacatgaacagttagcgacaggacaccagttcctatccttgttattttgtaacaatataaggttggctagaaaacgttctgtagcatcctcaccatcttgcttgttacacagtttaatgatcggacaatgtagtgtaacttactttaacagatttattttaccctaaatatctgaattgctgttactcatttctgattatttgacccctttaaaacccatcactgtccacagagtatggttcttagatttttcacaaagaagggtctttggacagttcaggagtccaataatctgcaaaactatttcttccccacttcttacttctctatgacaattagacacacaccctttattttatctgccacttatccatttctgtagaatagccgtgtttatccttgtgttatgtgcacattagcggcagaggatttttctctcctccagcttcacattatacagtgtagctgaagccatggcatagctgcactgtgagcctgtaggattccaaacagaaggagccagagaagaaatgcacagtaaaggtccttgagtgttctgggggcacattcataagtgtgaccataatacacagtcgatgaaaggaaggacaaggctgcaagaaaagactcagacctccatgtacagtgtcagggaagtcaaagccaaaagactgctctttattcactccacattgagggaggggctctgagtgacttctggacttgaaagtaattaccacaaaggtcagtctagggtgacaagatggaatgttgactgggaagagagagagcgcaccaagaagactttggagaattcacatatatcaaagtgtagcaactgagtatcgaggttatatggtatatccactggaataacagtgtttatgtacctaagttagactattagtataactattaagttaaaaaaggtatgtaatattacgaaataatacttactgaacatttgctatgattgatgctttaaagtatttaaagtattgtactaacacaaagaaaacatattttaacttaattcattttaaaaattgtaactatagggggccatgggagtttgctccccttgaagtgcatctgtgggagcctgtgcttggtattgggtgtcttctcctcactcttccaccttagatttctgaaacggcatctcccatctcccactgaacttagagctcacctgttggctagatgggctggatccgcttgttagtacttcactgctggggttacacacatccaccactacatccagctttcatgcggatgacatcgacctcaactccagtcattattcttgggtagcaatcactttacccactgtattatctcccaaggcccaaagatagcacttttaaatttttcttacaaaaataaaaacggtggtccacaagaaggtaatttatccaaattccccaaagctaataggtgggggggggggggcacttgaacacaggagtcatagcctcagaacctgcaggtttgggcacaccttcaggtggagcccatatgctgtctccttagaaatgcactgtgacaaccagtcagtgtgtgtaagaataacggatgtgctactgaagtcaataaaacagctaacgctggaatttccttattttgctatctgccataaatgagtttatttttgcatataatttcagattatatttctggactcatataatcaaagtttggggttttttttgtttttgttttttgttttttgtttttttgtcctaaaatgatcaaaattcctcatcttaaaagaaagttgagacttttatctgagaccaggataaaccagtggaaggccatattgatcctcctgattgaaaaggaaaagtaaaatgtttaagacaattctgaaaaatattggacacctagctttatggattggatcataaatgtccctaagcacccatgacagtttgatcctcagtaaagcagtgtttcactaggcagcagacaatagaatgctgatgcattctccagcttcctccatgtgactccattaatgggtttggaggaggtgctctttctcttcttcctagtggcagtaaggtgggtggccttgttcctctccctgctgtgaggttttgccttagcacagacacagaaacagtgaaacccagcgacctccaattgaaaccctgagtcaaaataagacttttcttctttggctgatttccttggatgcttgattgtgaggaattcaaaaagcaatgaacatactatgcagcaaatcccggctattgatgagagaaaggaaaatggacaggatgagccatccgactttccagttagctgctggagtctcccatgctgtgttacagttagaaaggacacaggcccagcctcacagactccctgagatgcagtaaggcagttgagatcccagaagaccacgatggctagaattcttaggacaaagcactaaggaggagttgaacttctataaagaactgtacatacgggatcacaccattcacctctgtaaaatgtgatgaggccatgaggtgcttgagccgtcatcctaaaactggagaaggaacagcacaacccaggagcctcaaaatgaatctcggggcgtgctcttccatcagactaagatgtaaaatcacataggtatggactttaacaatcaggaaagtatttaaagcacagggtgttaaaaaaataaaagcaactaattagccatagaataaattttattctggtcccgactattgactcagaactactgtaaatactcaagaggatcaaatatcccttatctaaattatgtgattacgaaagttccaaatagtcaggcaagcactggcaacactcggcatctagtaagttattaacaatcaaaagttccccgtggtcagccacagtggaatcatagtcactcagaactcatgcaaacattagggttgtagaggagacaatgtaagattgcttcaatgatattttgtttgtccataacactagagaaaacattagcagcattggtaccaaacagaacatttagacatgcgctattgagtactatagatgaaaatattagtaaagctaaggacacatcaagagaaatattaaaaatatattacagaggcagaggccatcgaatgcaagggtacagtattgagctttgtgtcaaattctagcaaatttaaatacaagcagttggagttatcagaggggcagatgaaagaaaaaataatagttgaaaataccccaaattctttcatgttgttaactgacataaccaagaataccaatgaggcctaagccaagaaacatttaaaatatcaaggaacatgatagtcacatttcttaaaaggcaaggatgttgagaaactcttcctagcagccagaggaaacagatgtatctctataaagaaaaggaaggtaagcctgctgatgccagcgagtttctgactggggagaaagcaggtcagaggatggcagagcggcatgctcagggggctgcctttaaacataaacctgggcagacttagaaaatactctttcaaaaaggaaaaatgaaataaatcaattttaagatgtgaaatataaaaacgtcaccactgtgaagtgttaaagagagtctttcagaccaaaggaaaaatattactgggcaaaaaaccattaattcatataaaaaaaaaatgacgagccttacagcacttaatcatgagtaaataacttttattttcaattcttgagtcttttgaagacaaatctgtctgttgaaccacaaggtaattacagtgttcctttcttcacaacatggttgcccaatgacattttataatggaatagcttctcaaaaatctactcctgagtgtcttctcgtcatcaggaatgtggagctattgtctcaggtttgaactacgagagctttatacactttccactcacttctttggatataatacaattagtctttggctttgaatatgccgtgaagacattcgggtctagccttatctttttcatttaagttactgcctatttttctgcaatgctgagtactttggctttttaattgtgtgcagtatttcttcattatctaatttttagagattgattgatctagacgaataacctctcgaaagcctaatggaacttttcttctattatatctttgagctcaagtttaggtcctccacttcagtcatattaatatgtatcaataaacttaatatgctatctgctctataattgttttaatctttgttagaaagtcagttctgagccacgtctgttcttttcaccaattgacagttttataataatctgcttttgtcttcagtttctgtctttagttttatcacctagatgccgctcttttgttttctttttaattttttttctttttactttatgtgtatgagtgttttacctgcatgtacaaatgtgtgccacatgcatgcctgctgccattggaggttagaagaggacatcccacccttggaacaggagctaggaatgtttatgagatatcatttgggtcttaaaaaccaaacctaggtcctgtgcatatgctctaaactgctgagtcatctcttcaggccttcagttcatcttcttacatagtcttcagcagagactttagtagtgcaaagaactcctgtctactttttgtttgggttcctagtgacacctttcttccccagtaatggaacagtcttgttcctacagatcattttcattctgtagctcttgttggaagcctaggaatttcaggatcttggtgatctgagccccctgggacagaggaagacctcagctgggctatggtggttggtggtcccacctccatttaagggatggtgccttgctgtgagaagactctgcttggtttagctttcccccatccctttctttgcagagtctaccccttctcccccgtccttgtaaaggatttcacccagtctcttgccccctccccatgagactcttttttcccctacgtccctcatttattttcttctgtttaatgctggagataattggccctatgtggtgatgaccagcaaatcatctgtaacttccttccatctggtagagatcacactggttggggccttccagggttttggctttcccttccagtgtgatgctatattggttagcggggcctctacccctacacattttctctagttcataatctaaagtcaaagatggctctctgtggagaactggtggaccttctcagaattttaagtagctatcctcactccctctctggtctgcaggggaaagcttgcagagtccttccttctgggtcatcctggcctatcattgcaatggctttctgggggctgttttcttaattaagtgttggtgataatcttgtcttgatggttggtttgacctctcttgagctgttgttgttcacgtcggctgtgggaaagggaagaggctgcgatatggtttcaatttgctgtgttttctaagacgttgacatcacataggaaatttttttgacttggaaatttatctaaagccatacaggaagccaagtgtaggtactcctcatagggtataatttgtgattctatatctggtatctacaagcacaattatggcaatgcatcaggtacatctattggaaccaggaacccccaattccacgggtgcctcttcttctgtgggttacagatgtttcccatgaccgtacttaatgtcacagtttaatgcatgcaaatcccttccatatgggccaagctgcatgttcgtgagtgttttcatctgatttagaaatagcacacgaggcacattccagtcttgaacaagaccattttcatcttgaaaggaaaagaattaagttctgaatattacagtagaagcttgaatcggaatttaacgctttactgtgtaagtaaaattgctgtctgggaaatgaagacttggtgtttgccgtttctcagtcataagaataacctggatattttggcccaaacacacgtccccatgccagttcctagaggttctgattcagtgctcagcttcagtgatctcaggatgaggcggcgttaaagatgctgacgcaggcttcacctgtgttcaatcactaagctgtgaaacccatcgctggtctgcaagcctctgaagaaatcccattagagggtaaaggttgtgaaatacttgctgacacatgctccttttaaaacacctcagggtgctttctttgctaactaaataaggggtttacaaagtattcctattttttttttcttcagaaagccccaaataaagccatttgggatgaaattcacttttaggatattttgaaccaagttgtaagtcctcaaattatattattagaacagttgaatcctgatacagaataacaagatttgagagtagtctacttttatcataaggttttccccgtacctcctattttaaatcctaagacttcagtcagaagcttaacacatgctggtggcaaaacagcccggaacctttatgttggcttagggagtcagtgtgggtgtggtgacataaaccagaagtatgccagaaaaactttagaagttatgtgtacaaaatggaaagcttccttgatatttttcaaaaggacaatctaactcatttgaagcaaacttccgacctatctcattgtaattgaactgtattttattcaataattacaagagcagtttgaaggatttaataaggtagtgttgtgtggactgtagtaagatacatgaaggaacacacaagtatgttactttttatgtttataatgcttcctccttttagaacgctgtcaatttttaatacttgcatattttaaaaccatgcatctcctgtggatgatgaaagagcaaagctaagtcaatacatttggaacaaggccagaggaccatggtgaatgtgaatgtcttttggttccatcaagaatgtttgtgacggaggaagaatgtgaaaggctatttgttaaaaaacaaacaaacaaaaacaaaaacaacaattaaaaaaaccagctcgggatgcgtggctcaggcatcctttgccagataaatatcacttatctgtagtgagggttgatggaaaaccctcactacagaactaaatgagactggggactagctcatcagaaaatcctgaaggaacggtggaggtgaaggggcatcctgacgggaagtctaactatctgccaattaaagccttaatgctgttgtggtattttcctcctatttttcctcttcttttatccttttttgcctattaagtgtgactataagaatatatatataagattctgcagcagtccctagccacaccctctatcaagttctaagctgttcagagctatgcaggaattacttggagaaggctggatttgctgagtcctcagagaagacaaatataccctgccctctgtctcttttgagttcctctatcttcccaccgtacttctctggacaatgaactaatggtgtcagaggaggaagcattgctgtagggattgaggattctagatttggatttatttcccattgtgcactttggcaagtagaaagaagtcaataccttgcatgatacaaatacctgatttttttttttttttttttttttttagttactaacgttatgaaacacgttcctccgggcgttttattagaagttctgtggagaattttgtgttgtttattttaaaaatccaattacagtggatctcaaagtctagatttaacattctctagtccaaagtcaccatgaattaggaacaagttccttctcataggggacacttcggtgccattgatttagcatgataactggaaatcaggtgactctactgtaagtctatattattcctatattattgaatgactatattattccttctgtcagattgctcctgtctgaactaaagcaaacctggaatgtagttatctgaatattatttagtaattccaagtaaactattcactaatttgctcttccttcgtttnnnnnnnnnnnnnnnnnnnngatcatgggtttgatcatgtgtcacatactaaattttcctaagtccaacatttggtattccaggaagttgccctggcacttctgagtatccatttgccaaacagtatatgtagcttgaagtatccttctcttatttgttgaaaacattttagagaagatgtttgatagtcttaagttaccattggtttgttaagatagttctttgttccaacttttggagataaggattcatgacatcttacagatgattacggagtccttcattaagagaaagtaacacaggagctgaagtggagaccatggaggaatactgtttactaccttgttctccatggcttgttcagtttgctttcttatacaacccttgaccactgcccacagtgggctggaccctctttgtcagttatcaatcaagacatgctcacaggacagtgatgggggcgagggtgattcctcacttgacgttctctcttcccaggtgactcaagttgtgtcaagaaatctgtttaatttgatttttgtttcttccaaccaatttttttttctaatttatttcttttttaaaaagataacctcagaggtgtttagtatttaggtaaatggtattcttaattttatttctcatcatttattgctaatggttagaagcacaattgattttcatgctttgattttgtatcccgaaattttggagaactagttattaaaatgggtaatagtggataatacaagagcatgatcatgtcacctaaaaacagacagacttttatttcctttacttgcctaatgactctggtggaagcctctactctcgagttgaacaaacatggtgaacttgctttccttgtcttaattctcgatttagaaaaatgtacccattatttcaccgttgtagcatgcattttctgtcctgttttcttccttccttcttttttccttcctttctttcttccttccttccttcctcccttcctttctttccttttgtagatatccttactagattaaagacattcccttctagtcctattttgtgtgtgtgtgtgtgtgtgtgtgtgtgtttatcataaaagatactgggttttcttaaatgtttttcctgagttaattagattgattttgacttttattagattgatattgtatattacaatgattaatctctatacattgaaccagcttaaacctttgcttaaatctttttagtgatgaatatatttctctgaatgggtttttagtccctgcctgtcattgttttgctgaagattttggatctgcttccctaagaagggtctatggtttgtttctttgtttgtttaattttgatatctttctttgcttttgatgctctttaaactgtgactccgtagaatgatttgctacaacttcagtctgatttgtagctcctctagagagagttttcatatttttggccatatctataacaagcttattgatatgattgaccatattcgtagtatcactttatgatcaattttatttcatataatcagcaacaattatcttctcggtcctgatgttaattattctattgcctcctttttctttggttcaatctagtgaaagacttgccaattttatctatgaatggacaaatttttacttttgttgctgttttttttttaatctttccattttttagtttcatccatttctcggatcttcttcttttggtttgctttaattttagtttgctcttcttttcccagtctcaaatttgtctctttttttcttttttttcccccctctggcaaggaagctattaattatactggggttcttttgtgtgggaggtgttggttttttccaactactttaatagttgccctctttgtctaggtttcagtttctgattttaaggagttggagtgtattgaaattctttgcggttttcttatctactatgataaagtagagcaaccaagacaacttatagaagaagaggatttttgaagacttacagtnnnnnnnnnnnnnnnnnnnnagggagggggagagagagagagagagagagagagagagagagagagagagagagagagagagagaatatgagaatggtgagggcctttgaaacctcaaaactagtccccagtgatatatgtcctccaacaaatccatacctcctaattcttcccagtttctccaactcgggatcaagcattcaaatatatgaacatatgtggaccattctcgttaaaccaccacagagctgtagattcattaatgatgtgttcaatcaggccaggagatttttctgctagtatttcttccactgttaattttgctttctctctttttctgatacctatatttttctttttcttattacccatattgccagatacttagtggtgttcccacatttctctgaatctcccttcatagccatgctctgccttcaaaatgtaaccccaacaaaacaagccagtgaccatcagatccttgaagataatggcatttgccaccaagcctaacactgtaatttcaacccccggaacccatgacaaaagaagaaaacttaagcccacaagtttacctgtgtgctccacatgtgcgccacgtgtgcatgacccctcccacacacacccacacaccaaacacacacacacacaccaaacacgcaaattagttttaaaaagaaataccagctaatattaggtcattacattcttgtaatcctgacacttgaagtactgaaacaggtataattaccaaaagtttgaggccaacctgttctccatagtgaattccaggctacccaggctatagtataagacccaacctcaaagaaaaggaagagaaatcaaatgggaaagtcagaggttgtccactttgcctagtccactctcacgcctgcttccatcttgtcgcttcagacttcctgtttgatcctttttcctaattgcctaattgattatgaaactctcatcacacactgcttgtccagcaagatctcctttagtccttgagcaataatcatgagattgctttgaattccatcagacctggtcttgaggggcctctcccaggctgggtatctcctatgcaaactctagttacagtcagctctttctccctctggcttttgttgaaaactttaagagacgatacattgtagcaagtctatacttctaaggctcccaagcccgatgctactgttgcctgctgaagagactgagacagaaaacaagttctgagcatgctcgctcaccctgggggaactagtggttttagcaaagctttctttgactctccctttctctgatctctgttaagctgtctgcttctgttgatgtcacacccatttgtggggttccactaattgctcactaattacttcattgtttctctaatgccttagggcataaattgctccacaggctctttcaattaaattcaggcctctttgcagaagaattctttgagactggtctttgaagtccttagggatctttttctgtgggttttcttccagataactaactgggctgtggttcagctcattgtccccataaagctacctgcatcctcttgcttgcttaccaccaaaatttccatgttcaaaagtattcttatgtaatattttaaatatttaaatagttcttgtgaactaaatctctgagtgcttgttcaggattggagctagagacagtcagtggtctgcatctcctcagcttgctgtccttactggaaacctctcccctttgcagcatactgcaacagtagcagtgtctgccctagtgttcttggccagatgcaccctgagtagcagggtagtatccattccttcagagctctaacctgtctgtccccgcaagtgaacttctgcaataccaagctgaggacacgagtcatagcctgtcttccccggaagacaagactcagcccttaaaagaaaagggagaaggggtgatgtctcgctgttcttgcttgtactggaacctcctcaccctgagctggcacatcagaaggagggcgtggctcccaaagacacagactcttgctgttactgcagtgttgtagactttcttgaagacatgttaattagtctgctttgtgcccctaggacaatattcccagacttaaaatggctgctgtttgaagtcgttttattcattgtttactggggaccaggttagcaaatcttctatcatctttctataaatttcttttatgtgtatgtgagtgtatctttaaattcatcaacttcctttatgacatttaattaatcaaaccatctctttattttttttaaatgtcatatatttccccctttgatcgttctcctgggccagtttacaatctcacttcatctctgttgtgcttcttatccattccttaaaatctgtctccagcttagactgagtctcagccgacaccgaacctcaggcctctccacctgcatcccaggttccagttcttctgtctttttgagtctgggtttattgaagcaagacctcctaagggtttagcctcccaacagtctctatgtgagaaatgaacagtcatgaatgagcaggactggaagatatattcatttgcaagaagacagtagggaggcaagtttagtgtccacattcctcatagcttctacataatggcatgtttataactcttgtgactttttttttttaattttgcgtagttctacactgtttatgcagactacatctgaggttacctaagagtcaggaaagttcctttctcagggttcttatgtggaaggggctgtgtccctattgtaaaatgagcttatattatatatatatatatatatatatatatatatatatatacatatatatatacatatatatatgtacatatatatatatatattcaagtttgggattttacatgtgttttaattttttcctgtgtgtttaatcttttgctacttgcatttattgtaataaagtaagtaatatttactatttgaattttttgcctaagaatacggtgtttcagagtttataaggtacctgcagtattgtaacaaagtaaaacacttattcattctgcactactcacgagtaaacagctagtcacacacaaaacaaaagatacattctccggtggaaataaacaatttttctgataaattagtctggagaaatttcaaataattgcgtaggaattttcactctgagggtgtcatttagtctaagacctctgttaattgtggtggtttaggtcaaggcttctgctaccatttctactctcaatatcttttcattcaagaaattttcctgtgatcatgggtgcatgggcatataaactgggaatacagagagtcttttttttccacatcaaattaatattaaatcctagaaatacatatgaattaataccaactcttcataaataatttaaaaacctgaatgatacatgtatatgtaccattactcttataaagccagtataacggataataagttatgaagaaaagtttaagacttgtttttattttatgtgtacaagtgatttttgcctgcttgtactaagtgcagcatgtggatacagttccaatgaagcctagaagagggcgacaggcctccgtggaactcgagttgccgactgttgtgacccaccatgtgggtgctaggaactgaacccaagtcctctgcaagaacagcccttaactgctggtccatgagtctggttccagggattaaatgattgcttggacatatatatatatatatatatatatatatatatatatatatatacacacacacacacacacacacacatatatatatatatatttgtggaaatggtgtacttctttgctattacatgaataattggatattgagctcaataactatttgatcccatcatacatagagcaacttccatgcttctcagaattaactcacatttgaacaccactcagtatgtatagaaaacagcagaaataagtgtggagctgtttcagaaattgttagaaactctatcctaatcctaaaccaaaactaatgtaatgaatttttgtgaacctcaaagccaactacacaggcagcaattctaagaaccctgacattctaacttaatgcaacccagtatactaatagatgcaggctgagagtggcagttgggaaaccttctgtctgcattttctataatcaggccatcctgttgctgtaccttggagtgtacagtgaaaactgcagtttaaaaacatggaacagagccagctttagcccgggtccttcaggcagtcattgtgagcttgtgagcatcgggctgcatgtgcaaagtgtgcatatggtatgttaacaaacacaactagggccacctgggccattgctggcagaatgacctcttcagatttgtcacaggtgtggatttgtattccttttggataatgtgtgttcagaacctttttactattgcctggttttgttttgtttggtttggtttggtttttttgaaactcccacattcaataatatgaccccatgtggagtttccacccacaatctgtgaggttgtgagaactggcataccaaccagttataagactgctatgcagtttacttagtcagcaaaggttaatttcagtttacccaaatatccaggggaggctggtgggagctttgatggtcatagcagctcgtggctatgaaaaggaaaaggctgactctcatacccacccctgtagatactgaagcagggagaggagacggtggcctggaagctagcaggacacttctgttcttgctttattgacaataaatgtcatgtgctacagttacacctttgtaagggacaaagacttgtttcttcccgtgtgtctgaaaaggggcaggttgtatttgacaagcagcgatatgaaccagtacaggtctggagagtgaaagagtctgcctggccttttttttttttttttttttttttttttttgtggaatctgggcattttaaagacctggttattttaaggacctgactgttttgagagttgtagaagcaaggtgcttgacaaaagagacttcacgggaaaggctttaactttggagagagttgagtgtgtttgagagacacaagagacacaagagacacaagagaaggaagaacccgtcgtaatggttcaaagctgtgagtttaggttcctagtagttatcattgcatgtttgccacttgtcagcagaaatatttttctgttctgcaggttttgtttatagtggtggcacaagggtatggaactaaaattcatgtttcttttgggggatcttaatttaatgtcaagtgtacttggttttaaaaccaaccatgatttttttccctccaatttggcttgtctgtgacaacccttagcagagaaagaggtcttcggataaaaactgtgggctaagggactatagagtggacagcataaagttctcattgtaattttttaaatacctgatctctggtgatatatatgtatgttatcttgcagctaagcagagaaatgtctctaaataagtcatatatatgaattattactttgattcagtctctgaatcaaagatgattctgaataagatgattctccccagtgcatcatttgtttaagacaattctgttcttaccaaggtaggctttgtgtgaaacttagtaatttaaaaacatggtgtgcagggtctagggagatggctcagtgggcaagagggctctctgtgcagtcatcaggatctgagcttgatttctggcacccactcaaaatggggcggggggggggggatagccctggtgcctgtatcctcagggttgcagaaggctgagacaggaggactgctgtgacttactgcctccactcaagctccaggttcagtgagagactccatattaaaggcatatgatagagaggattcagcgggactcctaacttcctcctctgcatagacacgtgcaaatagccacatacatatacacatacaccacatagagtatgctatacatgtaaacacacaaagaaagaaaactagagaaagtggcttgtcgttatttttgcctttctcctctctgtcccttcaatgactacagctttattgatataatcttttgtattttcttttcatttctaactttccttccttactaaacgcagtgactgttatgcatgcacaagacatctaagcttgcactgaatcaccagggatcaacgccagggttctcccatacgcttgccaaatgtgccaccgcttgatatatgtccccagccggtgtgatctctagtcattgacattttggtagtactaatgtttttattcacaaaacatttcggtttttatcaaatccctttatggcttctgcttagaacgtaagtgacacctcatctccaggcgttcagatatgcagtgctatacgtgaacttagtcattacagaacaattccaaaaccgcttcgttatcaaggttgcaactgagagacaatgtagctgaacataaatgtactcagacatgagcaggtcaagcaagagaaagcagtaattctacagaaatctacaccaacaactccaaaagccatgagaaacgggcttctgtgttgaacagttttaaccctttccctgcctttgctcattcaccttcagcagtgtgttaggcagcccagtcagttgcaagcctccattgtggaaaacgttgcattccttcacttgagtcagacactgcaagatggaaatgcagttatggagtctcttctggcagccagagtgtctactctgtaaagattgtgattttgaaaagtctgtctgcatacctaagttttccctgatgctttctttcacttacgatgttacaaagcatcgattcataggaaatactaatactctctggtccaccctggacactgtgtatttctcagagcatggagcactattaggtattcagaatcattgtattttattgttctcagccttctctgctctaagtgtttcgttgaggattacagagactttgtggacatgagtagacactaagcttcccaatgtctgtaaaggaagtgcctttagatggtcagcaccttaaaacatcagccagcctcaagcagttgacaagaccttccttcatttccagcttgagtcagctgtctctgtgtctctttgaaggttccacaaagtcagaccagtgcctcccatcggatcctttgtgcgtgtctttggaaagctcatatctgtcttcttgacaaatcagtgtaccagagacagagaagtatttcatgatgggggattccagcaggtgcaaaggcctctgtaagggttaggcctctttaaatggcattaatgttgggtaggactctttaagcatcttaacattacaggagatgtggaaaagattagaatttggaattgcagtggagactggtactaacattaccatggatgcttagacttctaaacggtggcgcacttgcaaagggtggctgccactggtacatgctgctccctagctacaaagtcagaaagagggaagaaatatggagtgggttcttacattgttaaattaacattttaaacttttagtaatttcatcgtccataagatgtcaacatacttcagttagggctctcagttgccagtctaccagaggaaaaaacatagcctatataattaaaaataggaagcagaggaatgctgtgtaagggtattgagtgtgctgtgggacaggacttgcaggaagagtggagaaaggggtctggggaaggtagacaggaaactacccaggtcctttctctggcctttgccacctcctcttgtgctgaggaaactatgtgactttgcatggtgctcccaccaagaactacaccatggaactctctcccaaatgaaaagaaagtttgaacctagtataagttaaatatagctacattttttttctctgtagttcatgttatattttgagtgtgagttttgggtgctctgtgaatctataagagatcatcttaagaatgaaagtgtattgcaaaaatggaacaattcaaccaaccttagctgttgattttttttttttgctccgaattagctagagttgtttttatgcataacatttgattttgctcctcaaagggatgatcaatttaggaagcccatctcataggtcttaaaatttcttgactgtatatcaagcaaagttgtctgtgattacctgagaactgggataattttcctaatgactagaaggaaaatagacacgggccttatataccaaaagtgaaaatgtggagtgtgtgattctgagctcaacgaagatatttttccaataataattttgaggtggatgataatactaaataaggagagaaggtgacaaatgattgaaaagaaagacaatagagggtaggatatggataaatgatagatgattgacagaaaacagatgcatagatatatagatgatagatgataaattgattggtgatatttagattgactgatagataaatagattacaatataatataattattacaatataataaaaatcacactcttctcaattttgagaatagaagtatacacataagcaaacaaaagcctgacgagtttttatattgagctacaactggattgactatgagatgtttcatatacctgcaatgttagtgacatttggaaacatggatgtccaggtaggttttctttgatgtcatcacaggtagggtcagttttcagtggctcaaagccactgagacccaagggaagccagagagtccacagagacttcatctgaacagataaccttaggactaatcaggaaaccataactgagcctttgtccaggtcagatcaacactgctgggagcaagagtgagagttggcaaccaagagtgctctctgtggcagcccagggacaccgagggacaccgacaggatttctgcttttgtctttgcccattgcacttttaagtgaggtgaaaagggagtgtcctcttttccctgccaaacttttttatggacctggtatttctctctgcaaaataatttattcctcgttgcatagtaccgtttttcagactgcaaatcctggctctggttccaaacagaactttgaaaaagagggagcttgaataataggctcagaagtgtattatttcttgggaagatctacttacccatttaagtggtttcctatggctttcacaagcaagaacactttatccacatataattaggaggctcaaagccacagtaagttttacgtagacttttctgcctccttcctgcttcaccttacaaaacttttctgttgtggcatgaagaactcaaagacagaagaagtgtttttcaaataagagtaacccaagatattagattattaatagtcatagtgataaggacaggaaccaggcagtgtgcatttattgaaaggcagacactgagttcagcactcaaggtgtgtccttacatccacatgttcagagagagcacctgctctgtgtaagttctcctggtttttgaggttcgttttacaaacacagagacagaagtaagcgaactcattggatatgcgatgtttccgaatgtctagactgttaatgacatttggaaacacggacacccaactagattttcttctatgttaatcactactgttcatcggccactggtgaggctggctctcagatcacaggcaagttgctggtgaaggcttgggttcctgaactggcagagtgcccctcccccctctccagccgttgaacttggtgcttctgtacagagaagtagaatgtggtaccttgcttatcagagttacagagaagcaactaaacgactagacgatctcggtaccatttgcagtaaccataagtgcctcaccatattgcactcatgagcaattgcacacaccaacatacatgatctcctgtgccctgcattgcttgcttagcaatgtaggaatcacattttaggcctgagatgtgagctgtggaagatagaagaacagcaccatgaagacagaagggcctcggagctataaccacctataaacactgtcagcgctgttagctgtcttagtatgggatctgctgcagaaagcttgtatatcacagcatggcgcaggttctgacgttcttcgtgatagttacagcagcagtgatgtcatctggaggagagccagtcacacaaaaggtatcttttcactaaatctgtttcaggcagcctcatttaaggctatgacagaggctcgcatagtgcaagataagtgtttgccaaagtgtgtttcacccgacactggtcttcaggaatgctcctgtgtaaaacttctttatgagcaaataaattttgaagactgcctactgatagcctcctcttggcagttaatacgtacctgagtacattaagcactcccaaaggttgcagcgtcgtatctacaaaggagcccgttttcttgaattctgatatatttcctgatgtttgaccacagaatccttttttaacaaaatattcctaatgttttgtgtaactggcctgacactgaccacatgtgagaaatgctgagttacactttactctgaatttcatgcaggtgtgtttggtcatgaatgtcatgaatcatatcaaagacaagcttgacacctcagggacctagcttgtaggtatccaggttccattttctattggatatgtcaggagaatgagccaggaggtccaggctctcacttaaattcttttgatgagacaattttgcagccttgtttcaccatctgttggtccataatcaaaccccttcatttctaacatgttccatctctaaaggctgtagaaaattattcaaatttaagtaatctgttacagtgcttaaaatgctttctatgttccatctcgtttggtctaaaacttttggggaggtaagcaacagagcctgcaggtgcccgcctaacacttcggattcaacggagactttactgggcagttccacattatcttctgtagatagtgtgtctggctgcttgggcacttgactagcattttctgtcatccatctaagccccgtcaccacagcctctttcagcactgaagcagcacttctttaccctctgcccatgaagagaccagcagcaaagctgctgataaggatgtgttcgagctgtgctgtcacactgtggagtagctgctgaaagagaacatccgtcgttgagaatgatgtaataggaacaggaatggaaacggctatacccaggcaatggttcagaagtctgagcgagacacagtggctcctgagatgcagatcaaagtgcccagtggagcactcagtaagccaagctaatttatcgacagaataaagaccttatagtcttaaaatatggaatggattagatggacacaaaaatgtagctagtacaaagcaagatgtattggtcgagtgtagaacaaactgtgccgtgataatcaaagatgctgagaaatagaagaaggagtgtgatgaccgagggtatggaattggggatggagacatggctcagacagtgaagtactcactctgtaatcatgaagacctaggttggattggcagcatctacataaaaaagccagacacaggggcaggtgactgtactcccagagctgaggacgtagaggcaggaggtccctggctagccaatctaatgggatcatagaaggagatagctctttcacggctgttcctattacaccattctccctggttcagggcgagactgtcagggagagtgtttgagaaagacacccaacactgatttcagggctccacatgtatgcacatacatgaacatgtacacataagattttgggaaaggggcaggattttctgttagatgcaatcactgattcaaaacctgcctcacttaggtaccagctatgccactttgggcaattctgcttaacctatgtaaaatcactaaaggagcgagacatgccaccaaataagactgttaacacaattaagcgtttttgtgcccatgacctacacacacttcactacttggcacatgtgtatcctttgtcttctttcctcttcctccacatgcccccattttcttccactcacagggcagtaccaaagaattgtcaaagagctactaaattattccttagatagatttttgatgatgaccagcatgtaagtccaaaatattattgtgttttgttgcacttaacgtctgtctgtctgtatgtatgtatgaatgtccatctgtctatttattgctttttcacgacagggtttctatctgaatctgcgtatcttcagacacataacccttgctagagctatcgcctcagtaccaagagctgtttcatttccgtttctctgtggtcttgggagatagccgcagccgcatgtatagatagaacattctctatctgggatgatgtaaatacttgtgctgtctggtttggtagccactaaccaccgtgcggcctctgagccctccacatgtggcaagagtgactgaagaactgaatgtttgttttatgtcgctcatgctttaagctgaaattgaggaagccacatgtggctgctggctgcttctttcagccacacagctatgcatgctggcaaaccccagagctgtgcagttttagagctgagtgcactttgcttccttaaaatgatcaatttcatgtcaccaattctctagttgggacaaaaaaaaaagtccctttgtaagcagcacgggatgctcttttcataggcgacacttcagctcttttgcctaaaattctacaactttcagttggcaactttcagtttcacctgctgtcaaattaaaggcatgtttagttagaaagatcaggaatccaatcattccaataattgcatggccataagcaaaaatttttatcaaaatcaattagtcaggttaccaaaataaataaatgaaataataaattaatatactttattgtgataaattttattatgataaactattgttctctaaaagcaaaaactatatgtaacatagaattgtagatcacctatgaaggcaagactttatttcacttttctcttttttttaaatttgaatttaattttattttttattagatatcatctttatttacatttcaaatgttatcccctttcctagtttcccctctgaaaaatctccctatcccctcccctccccctgctcctcaacccacccactcccattcctggccctggcactcccctatactggggcatatgatcttcgcaagaccaaggacctctcctcccattgatgaccaactaggccatcctctgctacttatacagcttgagccacaagttctaccatgtattttctttggtaggtggtatagttccaaggagctctgggggtactggttagttcatattgatgttcctcctatgggacttcgttgctcacttattttatttttgaaagactctttgtttctagaagtttttgcttttctttgtattccactgtgcctttcaatataaaaataagatcttatctcaattcaattttaacttttaatttcataataatcttataccagttgtcttagttagggttttgctactgtgaacagacaccatgaccaagacaagtcttataaaaacaacatttaattggggctggcttacaggttcagaggttcagtccattatcatcaagttgggagcatggcagcatccaggcaggcattgtgcaggaggagctgagagttctatgtcttcatccaaaggctgctagtggacgactgactcctaggcaactagggtggatcttaaggcctcacccacagtgacacacctactccaaccaggtcacacctccaaatggtgccactccctggcccagaaatatacaaaccatcacactagtcaatgctcgtgtgtgtgtgtgtgtgtgtgtgtgtgtgtgtgtgtgtgtgtgtacgtgcgcgcgtgtgccggagtaaggaaatctgggctgtgctttgtctgttcagggaatcttaatgcctctagcatgatgttgctctggggatcacgtgtcaggctgttaatcaggttcggaggggaagagtgagatattttaggctcgcctgacttagcagcagtggtagttcatgccactcaggagccattgatgtgacacactgagttacatcaacatgtactgttgtacaaagtatccctcagcaaattgtgtggaaaattttatttgtttccaccaaaatccagtcttaaggaccttattgtgtttgagtcaagggacacatgagatctgcacaagtgccacatttttattggttttagtctcccttgaatatgcataaatattttgtgagcatatatcattttttttccctgaaagatactcaggactactttgttttacatttttcttagagcccataaagaatgtctgttgttagtcagagctgtgagcgaacttcttttcacattcttcctttctatctctatttccccctcattaagtcaggtcaaaatgcctttttgtctcttcaaacctttatttcaaaagtggctttaatcctccgcttaatcctatttagcttttgatctacatcactttagggaggttgttctttaagtaagttaattgattttacttaggagcacacacttcaagtccataggccatgaatctcaggagcaggactttgacagccttcctccttatggagagtaacagcaatgacaggaattttgtttgtaccattggccagcacctaatgatcattctctccccctatctctaatgcatcctttgatgttagtgtcaaaaaacagcggtccttctctgccaagtacacatcccttccgacgtattaaataatgtctatgttagagataaactgcgctgcagctgtgctcactaaagtggctgctcatctaacacaaaagcaaatcttcagtgtcgacctcaggcaccaaggggtcatgacccctgatgtcagggatcaagtggaggcttaatctttggggaataatcaaaatgagagtaagacatctaattatttgtataaatattatttatcttaaactcatgcccatatacatacattttgcaacattagccatttgtaagttcaggaacatggactacactcacactgaggcacacacactcttatgcagtctctctccccacccatttgtagaacccttttgattttgttaagctgacatctccttgccacttagacactagcttcccacccacatctcccggctcctccaggcaaccactgacataattgccattttgataaattcagttattctggtcatctcatgtgagtgaggtcacatggcttccgtcctcgtgtgactgacttacttcagtccacgtgcctgcacctccccattttggtgaggggagtggtactccattgtaaggacttaccacattttactattcattcatctgtcactgggtgggccctaccacttgatcattgcaaatgctgctagctggagcattagtatactgaatgataaatattgagtgttgaaatattaacaagcatgttttagtagccattttaacagaacttcaagtaatctttggttttctcttatactgtagctggaacactacactactctatgggctgcttgtcatattacaggtttgtcacatatacatgtctgatgccctccataagtgactcagctgtataccttaaaagcccacctagcactcaggacttacaagctgatagactcaaagctatacatattaatgtacaaacataaaaacttaaaaacacatagagttcacctaacacttatattcaggatcttgtgcaacagtgaatctctctgttcatcactgttcactaactggagagtcttgtctgagtaaacccaagagtgggcatggggacgcagggcagtctgatgctatatcaatctagataaatagcagtattcagttcttccttggggcctatgatcccccttgctatggggtgtcctagatcaaggtttctattacaaggtttgtgttttctcttgtgaagcagtctctaatccaaggagaaagcagatggttacccccatgaccagagttctcctaggacacaccttacttacataagtggttcttgtagggtcgtattattcacagataagttagaccattgatccctcttctccctcagcagcctgcatagcatcttctggcacgatgaaagctagcaggaagggaggacatttccagctcagtcctaggtgttttctgcatatcacacatccaagatggatagtgtctttagtagtaggctcttctcatctacctctggtaggcaagcaaaaagaatggcaagaacttgtattgttttagagacctggggatgcctccatgactcccaattcagaggtacaggacctgtttcactggggctttaataactcatagcttctgcaaacagctttttctggctatatgaggtagctcctgttaaagtctctttttaaaatatatatgtaaattttaaaatgtggttatgaaatactaggtacgtttatggctctctctctctctctctctctctctctctctctctctctcctctctctctctctctctctctctctctctgccagtgtgttttgattaatcccctccttcatctcatctgcatgtcttctctcatgatacaagcttgcatttcagcatcctagcctccctccatcatgttctagagtgttttcaaacctcactcttctgaggataactcccatatacaggttcaagcctatgatgtcatttattcatatgaattgtcctgaagatgcaaattcatagtgccacggtgctcagagagcagttgtctaggatttggctgataatagtcctaacgagtcttggggaagtagtaatcatgttccagaactgaactgtgataaatagttcctcatttcaattaatgtaccataagtcatctaattgagtgtttcagacagatagatttatgacatgtaatctattccttaattaagttgtttggagaggaaagaaatgcaagggtctgacaattgttttatgagtttgctaattgcccaaatgtgcaaaagcatgagataaagagccaggcagatggttcagcctgctactccaagctgaaagcctgctggcagaggaaagtatacatagtagcagggctggggggagggagaaggaggaaacttattgttgggaagggagcctaaggttgcctgggtttttacattccaccaggaaggctgattgcaaaggacacagggttacttgtatccactaacaatatgttaagatgcttacattttgagaaggtgctgtggttagatagagggatgagtctcctggcccactggtttgcttgagggtgggttagaggaaagcaccacaggcctctttcctgggaacctgaaacccctaaagaatttggagatacacatttatccatgcatctcgagaagtcataatttcactgctgtttggtaagaaatggagttttcctacatgtccagaacatgatataattgaaaaccacaaatccaatatttaaaatggcaaaatatgggttttatgaaggctttaaaaagttatgacctggcaaatgcttattcataaggccggtatatcttcccatatacacaaaaggattttcttcaagaatgtactttgcagccagtacatctgctgttctcatgaaggattaaaatgagctatttttgtggaagttaatctgcaaacatataaaaaccttaatccagcttgtgccaaaatacctgctcgagattttgtttcattacgttgactttaattatcttcgtgttagctctcaaagtacactgaactttcaaaacatccatttcttatttgcaaagaagcttcatttctcactaaacacttctgcatgtggttttaagtttcgtttgatcattttcagcctttatatgctagataatgtcatacgtgtcattctgaatgtcattttgttggagtttgattttcacagtagaagttttctcataaaaaccacaccactcatctttgcaatgaagtcccgagacatcttgtattccccaagggttagtcaacgatgagatacagtctttctggaaagagaactcttttgcatatgtccctcttcagtgttcagggccaatgggagtcattacatcagtctgacactaggagacggactttacccctgttcctcacattttatgaatcagcatcaattccactcaaaggctgtcttgctggtgattcagctctgtctacaagaatgtttactggatgcctagagtgtttatcgaagtaaatttacaacatgaagaaaataggctagaaatacccagagccagcctttgagtcgcctgtagtctgattcagccctcaagctttgaagtgcatgtggagttcttgaacatttcattaaatacactgagtctggatcagggagtcttaaggggctatgaagtcacaccaagatagcttggccttggaccttaactttgatgtgtagtgatgacgtggaaagtcctcatacgtgttagggcctcataggaaggtcataggagtgctgcacatcacacagttgtcatttattcagtctttgctcatcatctatagcagagcaagacaatggtcatttgatagagagcaaagaggatataatgtccacttgctggtaaagaatccacgattgcaagtctttcttagcatgtctttcttcctaagtgagctaacaatacgagtgcagcctggtgcaaagatgggtgtccacttgttatacttaactatttatgcactgtttggattgctgcaatttacatttggtatacaaaagacatctttatcgtgtcactttagctttctaaactcctgatcacttggtctgaaaagaaaatacttctgcgctaagtaggtaggggattaaggtgggggaatccttggcaggaaaacttgttcatctcatcatttccatgtggcatgttgggtttagcatagctagaaccttcaatttttcaaggaaagttcgaaatacacatttcttgtgaaatgtcccgtttttacaatactggctaccaatcccgattctttaaaatgatccaagccaagacagcacatctgtgcatccatttgcagtgcccagtgcataatccactgtggtctcttaatacatgtctcatgattggaaacttataaagtttctaaatgaaactcaactgctcttctgtccttagatgatttgctcagaagtaagagtttcaggtttttgcatatggggtttaagaggatctaagattggagcatgatcataaaagccatctttccccctccgttctcattccagattacaggacaggcccgtgtttcactcaagtcaataatcagatgtgccaggggcagctgacaggcatcgtctgcacaaagacactgtgttgtgccaccatcggacgagcctggggccatccttgtgagatgtgtccagcccagcctcagccctgccgccggggcttcattcctaacatccgcactggagcatgtcaaggtgagtcaactgtttgccacaagtgtcacctctttgatgggaatcagacaacgtgtaggaaccacgaacacagtacccatggcaacagcagatcctgctcagaggactgatgagagatggtttgtatttatagtttacattttagcttccaatgaagtttcaactcttagcatcaatggagaggaagaggaggaggaggaggaaggaaaggaggaagagaaggaggaactcttaaaactactacttaaaatgtagaatgcattgagagacgagatgctcctgtctgcatccagatggcttaagtgtgcacacacacagttcttctggagagactgatttcttctctcttctcaccatccatcatgtctttctctccagatcgtcttctgcaactctccaacctcataagtggctctggtacttatatcaaaggcagatctgagacccgaggctcctacagccaccgtgtccaactcaagtgacctagaatggccctcttcttgctagttagttctactaggttttagcccacagagcccttgccattcgttggctacttttgtgatgttatctatactaaatccatcttctgagcttggggatactctttctagtaagttgttgaatgggagttgaaatgtcttttgtattattaatagaaacggtatctcatggagttagaagtaaatcatgtgcaaggttaagcttgttttcagacagaattcaccaagaagtaaacatgacactacccactgagtagatgtcatagtgtggtaagcagaccattgtcccttatgtcaaaattacagctggggatgtgcatgcagctctagctcattgaataatcaaccatggatagtctacacagtttggtaaatgatccatgacagaagcatcaaaagatttttgctagtttcatagtgctattaaaggatacagggatagtaccctgagctgaaaaaacaaaatttcaaatattccccaaaccaagaacattttgagtactgacaccatgctatgaatggaaaaattccactgtgaactcatgtaataagactttttatcaaaatgcacaataatcagggctgtagaaatggctcagcagttaaggatactgttgctcttgcagaggaactaagttcggttccatgaacctacattaggaggctcctactgcctgtaacctgagttgcaggcaaccctaaggtacctgaacccatttggaagacacacagaagtgcacacatacaaacaaagagaaacataagtcttttttaaaatgcacagattcattaaaatactgaataaaaattaccttgaagttctgtgtgcaagtatgagaaacatagtgaactttgtgattagaattgcacttcatcagcaagacatcccatgtgggtgctgatagcccagaccttgaaaacaacgctatccgatcttctaaggcagctaaaaattaagctggtgttaatcacggattaatcataataattttcaaaagagagcttcagggtccttgaggtgatcacagtacaactctacagatcagaaaataaatatgtagcaagaaagaaggccatgtcagttgtggacctactgtggtattttagtaaaaattacagattagacctcaagggtgaggtcccctcccctccccctctcnnnnnnnnnnnnnnnnnnnntcccctcccctctcctcccctcccctcctcttttctcttctcttcttttctttgtattcgagtgctctatctgcaccgtactctgcgtgcaagaacagccagtgctcttaaccactgggccatctttccagctctgcactttattcttaatatctgtttatttttgagtgagcctaggcatttgtaactttcaaaggacttgcatatttcaccttaattattgaatttctattgttcacattttacatctttttcatcttttttactatttggtgacatgtttattgttggtacttatgttacatagtttttcttatatctgagattaatattgatgagatacatcagttttactcatatttccagaaggccagatttcagagtaattacctgttgttttttggttggttggttggttttgcttgcttgtttttggtcttgtgttttattatattctctgacttctattcagcttccatttgttgagtgcttttaaaatttgtgaatatggaaacttagatcattaggcatagaatttactctttgcaatataaacacttactgctctgtgtgtacttctaggtcccagtttagctgtagctcacaagctttaatgggtatatgttcattatttaattaaatatgtgttcaagttttaatttctggtttgatccatgcattattacagaatatattgttaaattcaaatatctgagctttgttctagatcttttccatttctgcttttagattaacttttgtgcttacctagcttgcatgcgcgtgcacacacacacacacacacacacacacacacacacacacctacttgtgaatctgggggcggaacccacaatcttttacatgccaagcgttatatcaaccagagctgtgaatgcaatctctccttcatatatgtaattccatataataagcctttatacttaatctcgctgtatgtaattcactagtgtgggtggtctgtgtgcatttgcagaaaaaaagtctcttcagctgaagtatgtgatgggtacagagaggtgaggtgcttgaaagaaaaccaagtcctgtgtgtcctgtgggatttcccgtctatttgctttattaatcacgaagagacacgtgtggaagtttccattccaattgtgcattaattgccttcatttctaattctgtatgatcaagttccatttgctctgggtgtttactgtctcatgggacacatacagagttagcatttttgtttcttctaagtgaactgaatccttggtcattagaaaatgtcagtttttaatctttggtattgtttgtttgtttgttttctcatggcaaacccttacttacttttgccacggtagacttcttgtgaccaaaaattgtttgaattacctttgggtcttcctttttaagttgtccaagtggctttcttgtgaactacataaagttgggacttggtgtttcaacataaaacattacaatctcagccttttgcatttgactgttacattatttaaatccatgtagctgtgaacattatcacgaggaaatgtgcatttcaccattttctgtttgtcttgttcacttttcatatctcccttttcctgcttctactgggttgactatgttcatattggcttttatttccagtggattgtgagctgggattttgttcattttatagtgttacctacacatatttaactgatcacagttaaattattttcaaatatgaacaatccatttttatagtgtggtgactttatatccctattcttctcttttaatttgtagtgttcacttattattattttactttttgtttctttatgcattacaacctacaaaatacattagccttatttactatttttgtttgcagccaacaattatcttttaagctttcaaaaataagagaaacatactttgtattccttaacacactatttctagtgccttttattttgaggaaaggtttaaacatccatctaacttttccctgaagaaattcatttggcttttcttagagactcacattttatctgttggtaacttttattattacttcattaatgtcactatgacaacattaaagattcaacacttgttcctaaatgggtgaaattaatacatagtataagattaagaaggctatggccatctaaaactgaggccataaatgggaggtcactaaccccagtacaatactgtttaagggatataaatccataactttcaaacaagaaaataaaaaccctaataaacttagtaataagtaattgaagtaacaagagccaaagtactatatatttacaaccgttagataaaggaaagttaagagattaggtagtaataagtagcaaaaagtgggaaagttgtatcaagaaagagggaagacggagcgttcatgagttatgaaggtgggttgggattgctgtggtcatttgggagaacacagagtgccctttatgcatagcaggtgtgtgtacgctctgtccaagacttctgccctgggtctgtggtagagagattgagtgactttgaatcctcaaggcccatagtcagtgagatccacaaggaagcccactggggacattttggggacattctctttatggctgacaagatagggatgaactcagtgccagaaccaggagagcacacagtagaagcacacagcagaaagcattctgtaacaaagcaaagcagctgattgtaacacattctgtaacacagcacagcacagcacagcacagcacagcacagcacagcacagcacagcacagcacagcacagcacagcacagcacagcacaggtgggtctccatcaggcatctttctccggaagagaacatcacggataagctgataagaagcatgcagggagggcccgctttcctcgtcctgttgtcgtcttgaggtcaacattttcccttgtacataaaagaaaccagcggatggagtctggaaatcagttttgattacgtgtaaaatgtcttctctttgcagatgttgacgaatgccaggcgattccaggactgtgccaggggggaaactgtatcaacacagtgggctcgtttgagtgcagatgccctgctggtcacaagcagagtgaaaccacacagaaatgtgaaggtgagagtatgtggggtgcaagcctggcacaggggtgctagcctggtgtgggggcataaacctggtgctgattttgaagttttaaaaaagatgcatctggaatggttaaaactaatgaccataatcaatatttcttaccttaatatgaaaatgaaggtgtaacccataacatttggtgttaggatcatgtgttatagccttaaaggatttgatctgcacaaaggcaggctacatctgattggtctcaatagctacaagcagggggagtcatttaacctctgataatttctttcataatgtaggttttcatttcatctgtgaacttgtttgaagaagagtacatttttgttctaacttatccgtgaacaaagtctgtgtcattatgaaacttaagaaatttctaaatgaatgtagcttcaaagatcatgtatatttagaatgccatatatgtgtgtgtgcgtatgtgtatatgtatgtgtatatgcatgtgtatatgtatgtgtatatgtatgtgtatgtgtatgtgtatgtgtatgtgtatgtgtatgcatgccatggtatgtctgggtaaggtagcttcaggtgtctgccctcatctgtcttatttgagacaactctcttggaacttcctatctctgccttctctctgcaaggggctacagaaatgctaccacattcgcctttagacagattttgaagatctgaacttaggccctcatgcttctacaataggccttttatccactgagccaccagctagcccaaaggtagtttctaaagacagtgccatatggattattctagttggttgtggaagagcagcctcatttactccagttaagatttttcttattcttttataaaaggcagtattttgttagtgtatgctgatcaattataaagcggggtgcctatctatgtagacaagaaaatggcaaagtgagaaatctagaatttaactgcacaaagtcaattggagtctaagtactgttagaaagtaagaactagtgtgtgggcatcgtggctcacactaacaaggtttcaccacaagcaaccacaatcccatgagttgttggataacaccagcctctatttcctgtgttcctctacttatgtacagtcagtctgaactcatctttacagtctgatgcatttaataccattcccagataatttcatgttccttacaacatgaaggtgagaaggacgtagttgattattttaaggaacaaataagttttttctgacactgtttttttttttaaataatatccaagtggtttgtgctacttcaatacaatgttaattatcaacctacttgcaatgaaaaggttcagaaaaatgcatgcacagtgaaggaaagtgagttctgaattagcacagaaagtgaatcaaacattcagtggtcttcagaaagggtgctactattccaaaatcctcctaggtttttggaagagttgatacttttgcctttttccccccactgctctctacttttaacttctggaataaactgcaagctctatgcaagcacgagggaagaaaagccagcctttgactgtaggtgagaaggcacagccactaactgattctagtggttgtgacatttccattacacatcaaacaatgagtttcttcttagtcgaaaatggaagaagtcttttctccatcacatttcatcaaaagagcatgcagagccaaggcagagctcggggagagacagggccgctctttatttctgctctcctccttctttgggaatgggagtcattgatataacataggcaccacccggagccctgaatccagtcgtgtcttggcttccttcctgcccaggcagccagctccatttaaacattgcccagagagaattatatgatttagtatttgtgatttgtgggaatggaggaattggaacaagggctgattaaggcctgaaatctaagggctctgtgaaagctttacttgtttataaagcctatttatttagatgtcttaaaagtagctattatcaattttctttgggtaatactgttcctgtatacaaaagaccaagcagtacttatataaaattatttaatttaatctgtatcaaagcataccttgaaataccagagctgtggctatgcccgacgtcagggtttgaagcaaactcatatctagtttaataatctgatgggtgttctaaataagaatgaaaccacggcagtctctcttgtctaccaaaacgtaggtatttaaatttcagtgttaaaaaaatgtaaagtggagtattagctgatttattttttgaatcatgcccttcctgtttgtactgtatgaagttccatgcttctgttcatgtaaaagaagcctcttgcttttaaatttcttctgtctgctcaaaactaagagaactgagtcactggggagatggtattcttgcttggaaaatgcaactcaaggctgatgattttggcaagtgtgatgtgactattgctttcaaatgcttgagtaagattcctaaggacagaaattcttccttctccactactgtcctccagacctgagcccctgagccttatttctaatatacttggcagattccttaccaataaatgttggtgagcagggtccaaagtttataaaatggtggtcggtttgacctgaattcatgtccaaaaactaggtgaactgtgaaaccaggataaggctgtctttggaaagaggaaagtcatctaagcagattattttctgcagtggcccagctctcatgtctctttcaaagtgcataattatttgttcgtttgtttgtttattcgtgcagagactagatttcatcatatagccctggctgcctacaattcactatgtagcccaggctagccttaaacttgtagcgatcttcctgcctcccctttcggagtctggattcattggactgcaccaccatgcccgccttcatttaaaacataataatttcattattgttgaatgtaccactgtaagtccaagagggacattaaatggggtgggttggggctggagagatggctcagcggttaagagctttgaccgctcttctgaaggtcctgagttcaaatcccagcaaccccatggtggctcacaaccatccgtcatgggatctgatgctctcctctagtgtgtgtctgaagacagcgacagtgtactcacagataataagtaactaaatctttgactgtggtgtgttgctttcctctcctgtgtcattgtccctttatgctgacctattgttctgagtttagggaacctttgctgtctttgaagtagaaagatgtctgttcacttaccagaacgtcatccttcaccactgtaaaaaggcttgatctgccaagttatatgcgattacgcacgagtagcttatgctggaactcaagcagaggggagagcccatttctttaaggtttgaaacccatgccttggtgccttcagggaggctgtgtgtgttatgtagctggtcctggtatgttctgctgaaggatccctttcccctcttgtggacaatatagactactgctcaagtcctaaatctcagcccaaatctggaagtagtatacatctatattgttcacgtgtgtgtaaagaagaacatctctcccctttctttggttaggggcccagttccatgaaattcctcaagatggcaactgcaactgtgtcttatctctcctgagccagcttgcttctaaaaatctaatgtcctcgttccattggacagcaggcaaatggttcttcagtgggggtgggcgggaaccaattccttcacatccaaagaggaagttggttcagccacttatcccactcagacatccattaatataaataaatatctgtgtggcttaaatgaagatgaggcactgaggactaagtacctctgtgcaacatgatgctgcacaattgggctgcccagctttttctttctgcaaacattatgttggtttgcccaccctgcacataaatagagacaagtgggtaccagatgtccttgcttgcccccctccccctccatgccttctttaacatacctaagtcacgtattctgtcttggttgttgggtagtcaggaaagttacatcgaagtttttccttcagtggctttacatgtcagatgcttattttaaactattctgaagagtctttgtccccagtctatttatatgacattttgtcatttggggtctgaagataccaaatgtatctatttattcatgcttgtgaaaacccccaatacatgttggcataatgtctttgctgctattacaaccctgctttaataaacccaaggagataaattattcataataggattaaaagtatttgtttttagtcagatctccaaaagtaaattaactttaaaataaataaggaatgccccgccttatatgaactgttcagtcatggaggtcggttgttcacaatggcgaacaacgaaagcttggaggtcagcaatgcaaaaataatgaaagccaacatcttttaaatccttcggaaagtttagaactttgaggttgaaacggatatattccctctgttgaagagggaagtgggcagagaaatatccaaacctatttctcggtcccataataaataatccttaatccctctgtcacctatttcactgtgttttaggtgcctttgttatttttctcatgcccgagtctgccagcagactctatctagcaatagtaatgcctgatgttcaccgcgaacttactataacctttggagctactgagaaaacaagataacccagtttacagaggttgttgtactgaattagcacaaaggagctggaaagtggcaaaaactaatatacttcacagctgagaaaaaaacctctgtaggagggccctagggactctccaggtaacaggagaaaacctggacattactgagatccagctggtcctcggacagggctgtcaatcacacagctggatgccagcgaggcacagcccagcagaggattctactcagccaagccattcagccctctctacgtttatgtattgtggcaggactctggaatagctatgggtcagaactgatgtcgtttcacagtccagtcactggacatggaacttcatgaatgaaaaaggcaccatctctctgccctgacgttgacaaagacagaaaacatgaaactttagtcttcattcttcacttcagccttcatgttcacaaaaagttttcctgtgtcctcgatgatggtagacatttgtaacctagagctctctggctcctggtgagtcaccatcccagctctttagtcagactgggcatctgaagcatgacacacagccagtgtccatgtgcttcgcaggaaactggttcacaagacctacttctttgaggtgtttacttccttctgaagtgtgttctgctgcctccctgaaccacacatttggagactcagatagtgggttctctgttgcattcaagattctttaaaatgggatttattctgtgccactgcactgaattaatccagtcaccaggactgtagattttagtagatgtcagaaagcaagagtccagggtaagcgggtagaactgaaataatccccttgttcatggaaggaggcaatagcagtactctagagcagtagttctaaagtagggatgtgctcaactgttcctatggaagaataagatgaaaacttaaagtagagaattaatggatgtggtgacaacagctttcatcccaacacgaggaggcagagtgaagttagctcttctgaacacagaagtatgacagaaatctaaaatatttactacagcatttgtggtagccactttctggtctgtgaaacaaattccaaagattttttttttctaatcaggaagtgtctctgaaagagtctccccaaaggcagagaaccctcaagccctcaaagacagttgtttatgttttcttgtttttatacatctttgacttctttgtcaccacataaggtgacatatgttctgatgagatgtaaagagtaagtagaatagcgaggaaggaaatggtgtacaagagagatctggtggagtcacacatcactcaagcacactgaccaacaggtgactgttctcctgatttctttcttcatgattttcaggggcctaggatgcaagtagcgtgacccaaagacattcaacaaagcaagtccagtaaaacaaagcatgtataataaggaaggtcattgggtacacagtgaatagtgttgagaaaagtgcatatcaaatttgaaaaggattggactagaccatcacatcttataccagtggttctcaaccttcctaatgctgcgaccctttaatacagctcctcaggttgtggtgacccttgattaaaagattattttcactgctacttcataactataaatttgctactattgtgaattataacattaatatctgtgtttacagatggtcttaggcaacccctgtaaaagggactttgaatcccccaaaggggtcacacctcatagcttgagaatcactgccttatgccaagagtgacctttaatattagtatcaatgaagacacataatatccaaagtcatcgtgaacgttttttttttgtgtgtgtatactcagccaaagaagacatactccctgccaggcgtggtggcacacgcctttaatcccagcactctggaggcagaggcaggcggatttctgagtttgaggccagcctgatctacagagtgagttccaggacagccaggactatacagagaaaccctgtcttgaaaaaaaaaacaaaaacaaacaacaacaacaacaaaaaacaaaaaaaagacatactccaacattttgtcaaccctgaatctatagaggaatagattggtaaattcaactctataaaaaaataaattccatgccaatacaagatggaaaaaagcaacatgaaagaaagaaaaaatacacagatgaagacaaatatttcaaaatatatataaagaaattctatgaaacaataagaacatttctaataaaaaaattaaatatcgaaatatacatagaaattctatgaaccagagaacatatctaataaagaaaagatcaaatatatgactgttgacaaaggcagttgttatttgactactatatttaaacatgcttttccttacatggaataaaatatgtaaaccaatactgagctaacttttttagctataatttatgataaaataaaattcaaatgaaaactataccactaaaggtgttagaccatggacatgatcacaaattccttataaacatatcaggaatattttttgtctatcgaaataaaaacatccatgccattacatccaaaaataagttaacctgttggatataagaattgactttgctatgggatgaaaatcaaatgctgcaatatctacatctgggctggtgaaaaaacttagtcggtgaagttgagttcagattcctagcaccacacccaaataagacacttcagggtggcggggtagggggtagggtagagatgggagggtcactggagcatttagccactcactccagtcaattaaggaaaaaccgatgtgtcagaaaggggagggcgagctggagaatgtggatgacaaagatgatggagatgatgctgactaggacagagaatagaggaaaatattggacattgacctctgacctccacatgcatacgcacctgcacatgggcttctgcacctgcacaccatgcatacatgcacacaccatgcatacaggcacacacacacacacacacacacacagagagagaggcaggtcatacttttaactactgtcatagttttattttcagagttttataaccaagcaagaggaaacacagggagagagatggtaagataggtaggaagtgttattcagaaggtcccggggagataggataacagaggacctgtagcccgcagtcagtgcccacgcatcagaacagcacgatttgtgtcagcccgagcacattaatgtctcagccttgatgcagttgtcctgcttggcgtttttggctatgatttccatgtgcatcataacatacagtaatttttatgtcacagtttattgagatttttgatgtaaccttttagtgggggtggacattcagtacagcattcaatcagtaagcttttttccaagctagcaaacgttttcaaaaatataattggcataccggagcatatatttgcataaatctgataaagctgatgaagacaatgacgtggtgatgagagaaagtagaaccagatggtcatttactttcggcttggtctcagcctgattctactccccatgtcccagttagtttcatacaaatcacagccatgaacatatgagactcggatgactaagtttatttagcataagacagtgattaggaaattattctttgctcgatccagggatatcctctcaaatatgagaaaccggtgctattcaccagggctagtgtgtcttcacatcctgttatgcagtactgaaaactggtaaagtaagcccgtggtgcttgtgtctgttgaagatcactgaaaaaacgagcctccaaagcacccttttcatagatgtaaaactacatgtatggtaatgtcagaggactgagtcccccatggagtgaaaggaccagacaggtgctttgaacctgggctttgatgttctaaattctaaagtagattctaaacctgtatctctattacctttaccaagctgctgcgttgacagatgccacaggcaagtcgccctcattttccctttaagtaattataacagacagttagaaaagggtctcctggcatggttggagagaagatagagacctcaattttgagtctcctcaaaatagaaggtgcagtaagctttatgccctcgaccaaaaggaccactcttgccagaatcattacttcaaaagtctgacttcttgagttgctgtttttcctagcatgagcatagaagctgaaaccagacacccaaatccttgctcacgggaagactgtactaaagacaaagaagagatgagacgcttgtaacctatgtagctgaacacaatcaaatcaataggaacaacaaaaaaaccagagtttataaaacgatgtcataaaattttattagtacctggaaagtcactaagatgctgctgtttgagcaaaactctgagagtgtgaaggaatcaagtatgggtgactaggaaggaagactcttgtgccattttgggtagtggccattgtcaaacagaggccagggcacagcagaagtttggaggagatgttaggagatggggggggaggggagtgagaaagagaaggaacaggaccccttcatcgtgaaggtaattcagtcttactgaagcctatgaagtgtttaagtttctatgaaaactgtccagatacatccctcgtgggttagcagcagagaattgtcacctacagcataatgtggtcaatggtgcagaatgacatgtcagcctattagagggatcatctgatgaggttcatctgtggataactttattattttttgtcattccattatttccttgtgaaaatcaaagtgtgcactttataggctgagcctgaaggtgacccttccatactaatatatccagttacacaatccactttttttcaattttttattagatattttcttcatttacatttcaaatgctatcccgaaagtcccctataccctccccccgccctgctcccctacccacccactcccacttcttggccctggcgttcccctgtactggggcatataaagtttgttagacctaggggcttctcttcccaatgatggccaactaggccatcttctgctacatatgcagctagagacacaagctccaggggtactggttagttcatattgttgttccatctatagggttgcagactccttcagctccttgggtactttctctagctcctccacacaatccacttttatatgtacacaaatagtgtttatatcatacagtaaatatacagctgctttttggagtgttggagattgaaaacagagccttgctcattctgagcatgtgttctgatttgcctgtggattcccccagctgtgtaccctactttaaaaattgacctgttacaagaattttttaaatagaacacagctaagaaaatacaattaagaaatgttctttataggaattgtgcatagtatgcatgttagtgaatgagcgtagagactccattcagtctcctttttctttctagaaagtaagaaaagcacagaggtagattaccactcctgacatcatactgcctcagaggaatgtagaactaagttcattttcacttgagaccatttatatagaagataaaaaataaattactcttagatgtatcattagagcgctgaggacagcccagcttccttacatttctcacgctgttttgccaaaatgctctttaaaatatcaacgttttacatcccacatgctaatgagaacaggagtgcacagtgctgaattcctgaaacgtcgccaagtccaaatggctatagaacaatttaactttggaatttcctgactttcgtgttggtgaaatttaagtttttatccaaccttaaagggagactttccattcatcatctccgtgttgggattttcataaacttgtgaaaatgggagattggaacaaaaaatgaccaagagtctgctggaatatggttgtggggtgagtgcttgctaagcgggagtttgatccccaaaactgggagtagaaataaaaaacaagaaagatgtcggaagatttaataggactcctctgctcttagaggcactgtcttacagatgagtagctttcaatctgttgaatcgtcagcattttaaagtaataaataataattggttcaatttatcctgaagtccatgttttaaatgtagtattgtttcctatgtgtcttaagtttggattaacaaagggtaacaaaatattctctccccccccaaaaacaatgattgtgcagttaaccactgttggtaaatggctgtgttttccaaatgacccattttagaatgtagatcaaaaactaaagctcatgttgtttgactatgttatcagtagcctttattttgaagtggaaatagtttccagagtgttgtcacaatgttataaaacatcatggtggcattgtcccttgctgccaatacctcatgcctgggttactccaaattagtgtctaggaagatgcagcaatgacttcaggtcagtggggaaccttttatgttattgctcaatagtagccttttaaagagaaaattattgtgaacataaaactgtggaaaaattctactagcatccacttaagctaatttacaaagactgtttcaaatgtactttcctatattgacagcaatagaaaaggggggatcaagaaattagatagatagatagatagatagatagatagatagatagataggtaggtagggattctttgctgatacacagacacagatttatagagactggttaatctattagtaaatagatgatagagatacagatatgtggatccataaatagatagtgataggtagatagatgatagatacattggatggatggatggatggatagatagatagatagatagatagatagatagatagatagatagatgatagattaataaatggatggatagataggataagatagaaaggtgatagatagatagatagatagatagatagatagatagatagatagatagatagatactgcatcatagccttgcagtgacataggacactgatgtgaagctatagactacagcccttttccacacagcccctggtgttcgccaccatcctggaaaaatgtcattccctcccattttttccatggctgctatcagtctcctgattttcacatagacttttggaattgttgatagtcattctctagtttctcccttctctgcttaccttccaggctcctttgttcctcacatactcatgccagacacaggcacgcagttccttagataaagcactctggccgagtcttgtgtgtgtgtgctttccctcctcctcagttactgttggcctgcttatcttggttctcccctctcagggtcccctggggaacctctgttggcccattctctctgagttctccttctgccaggcactattcaagttgtcatactgtcacaccatcttgtcctcaggtctagtactgttctttgggtcaccagtgctagcttccagagtccttggcttgggctcagctcatccctttgatatgctatttctggtcaagggaaatgtttatcttgtattctgaaaccagccatatcgtttctctttggtcgtcagatatttttctgttagtgttgtgtgcttggaatcaaggcagggaagcagagtggaaatcaagatctgcatgtgtaactattagctcaggtgacttctaagcacactggggttttctgacatctgccctctatgtccctctatcaagaaagtgggaagtatccggtgtgaactttttaaaacctcccattttcaccacatcctcattttctgtctcccttgtgtttgggtagatgtcttccaaattttccaaataaagttttcctcactcatgtaaccccattctctgtgcagctttgaacccctgcctccactagccattaattcaagctgctgacatcacacaactgaagccattcaaaagaccacaatactctcctgactgtctctcagtctcctctcaccgcactgtgtcctgtagacttccttctgtagagagattgttctcaagctgccccctccctgctcatggttgtctttccttttgtgacattgtgttagttgtctccagggcctggtagctttttcattagtgcacatgactcaacatcgtaggagctgaacattcaacagttgtcagagtgaagtcagtgaagtcagagatgctgtctcgtgctcaaactcttgtctcctgtcagtaatgctttaaaacacaggctctggcagaagcaaagcaaaagctgcaattttcaattcaggaagctggaaagatgaagaaggttcctgtagcagcaggggacttgaaatgggtatggctgagctgttgggctctctttacagcctttggtgtaggacttaggcagaacctctttttttcttcttgcttctactgtgatctcctctctgtgttataacttccaccctaatgattgtatctatcctgatggcctcatcctcccagactcttgactgactttcagtttaactgtttccctgtaactagagtcaatgaagagaccattggttttcccccctcaaagctgttctgtcttgctttactggtttgctaattctagctcagtaatgaaactggctgtgccttcctcttacccttccttctcacgttcacggtattcttgacatgagcaattcctttctccctgagtcttgatctcatcggctgaagcttggagacctttactgccccgtctgcattattaactctgccctgccttacttattagcacctgtagatcttcttcatcagcactgaagcttgggtcagcctccacctcactttccaagatccagttgccccatctttgctctgaaacagggacagcaatgtgttctaggtctttctctttaccttttcactttatcttctaaataaatgacctcaactcacaggaaagctcattcctcactcaatgggttcccttcatcgtttggatctcactatttcttacctggaaaacatttcacttcttcttcctctataggcaaaggctatgcaatagtctctaaggtcctttatcagatactgtgacttccaggtattcattctgagtgtcaaaactgagctggattagaattctgctataacatggtgttgtatttcagggtgatcaggcatcttatgcttcattttatatccatcttcttagcaaattgaaaattcttggtagttacagaccatgcataattagttcttggtatgtgacaagtcaaaggctttgaatcagcagtaacttcctgaatttgtaaatgaacagcatgcatccaatcgatacttcattgtttaaagaattaaaaggatttttaaaaatattattttaattattatttttattccaatcagattgcttgaaatattttgccttttaaggaaaatcagtgtcaagaagttaaagagtctgtgtttgtttaaactcccatctcctccaaccttttctacaaaacatcgatgatgtattgataactaaaactaatatctatgaattagagttgaaggttcaacaatgatcatttagaaatgatgtacctgcttttcctgcctttctgtatgtttttactgggggggggggtggaaactcacaagattctagagattgtatttttcaaatgactcataaatacattttatataagagaaaataattttatgctagtggctggctgatcttgagaaattagtgttttcattttttattgttatagtaacaacataatgagtaacatttcatcctaaatagataaatttagaaagcttaattttgtatagaatggcatgaaaaaaatgtcaaagacttcacaaagatcaagtaagaatcctggtagaatttctcttagcagggcaggaattcaattggcaaaaacattgatttgggggaaatttcatttgtttaaaatctggacataagaaaacaaggtcctatgtaaaaatgagtatggttcattgtcagtagcagatcttcgtccacagatgagcagctatttatcactatcttttaaaatctgtcctaataattggctcagcatctttaaatgaatccacggagaatgtcagagtagattaaagattactatctccacaaaagatgcaggaaaaacatgaaaaacaaaggaagctgaactttctagtgtcacttcctagtgtcacttcctagtgccacttcctgatcagaaaatctacacattagcaatttcttgaaacggctttcgccaccctgatcacgtgcctctgtgtaaaactacagttcatatcttcctaaataataaaagaatgtttctccaacatcaggaatacaacagagtctgctgccaccatgtctgttcagttgcagtggagactgtagccagggcaattaggtaagaaaaggagtaaaaagagtgacctagaacagcagaagaaaactacaacagtctctccttgacttcaagggatgaatctcagctgtcccagtggatgcatgaaactgtagttagtatttgtctatttctgtttctctgattgtctagatagctatctctttacatacatagtgctttccattcatatatatatatatatatgaatacatgtattcatgcatacatatctgtagtaaagtttaacttacacatgagacatgttaactaggtgtggtactcacattagcacaatattaagatccttatgggattcttgaaaacaggaaacatcaaggggacaaggcaggagaatgtatacagtgcaggtgtgctcagtaatggggtgtttgaatcccaagtaagacacagggttttatccctccactcaaaatgaacacaatggttctcttttccatttagtattctagatgaagcatgactaactggaatcagagaacactgagtcatggataagaggggtgttgtgagcaggctatatcagacatatagatacatgtgcatatgcctttacacagtgtcagaacatattgaataacaatgtatttacgaagtacagaggtttcaacagcaacaatgtctaattatctgcttccctcagtaatctggttgagatgaacacattcctttattccagttctagttactgattttaactcttatattagagctcacatacccccgtgtgtgtgtgtgtgtgtgtgtgtgtgtgtgtgtgtgtgtgtgtgtgtgtgtctgtttatctatttctctctctgcgtgtatgtttttattgggatacaaaatggataaagggataaaaagactacagaagggttttcagagattttagaagtaggctgataaaaatgccaacagagtctagattgacatgataacaaacctaaaccagctacaggtaaaaaggcaaggcctggttactaaccgcaatgaacagacgtttgggcagcaggaccagaggacacagagggatgagcagaaggcatttgagttgcatcagcaatagcgattagctggggaatagtagaagtactctgcatgttgacccttgaggtcggtggttgaaggggccattgacatcgtcttattggtggatgtctacctcttcatggggtgcatgtgagacagtttaatgaatccctctcatgagtctactataccagataaattcttgaccatggaatccttgatatggtttcagtatgctcatgtgtccatgaggtctctgtgtatcatgatatgttaataaaatggcagaaataagtcgtgtatcagtctgcactgtgtgggtgatgctggataggtggtggtgtgtgtaaacatacttaggctcacagtgatctcccatcctcaggttgtagtcagaagctgcttgtgagatggagtgttttaggatggggacaaaactgaaatacaacatttacatcaagaatagtttagtgcaggacacagcctggtctccacaaggcgagtagtgtgtctgtattgtggatggcatgctgagcagctaagataccacccaaatgcaatgagatctctgctaacaagcctgcaggatactctaaaatgatcttagagctggtaaactggttcatcattgccgtagctcaatatcaatatacaaaacgaattttgtagaccttgacagtgagcattctgaaattgaaattaagagaatcccattaataataagatcaaaagggatgaaatgctttgaaatcaatttaaaagtaatcaaaaaatagcacactgaaaactataaatattgttgaagtaaattaaagaataaataaatagaaatgcatgctacttttataaatcggaaggcttagtattgccaaagtgtaaggagaagacaaagagcacactgggaatggaactacaaagcccaccccagtgacacagcgcctccaagaagaccacgcctcctaatccttcccaagcagtaggctactctcattcatagcaccacaaaaatgtcatttttttgaataggcaaaggaattaaatacagtatctacaaagaagatacacaaaagacctaaaagcacaaaatgaaaatatcaacagggtatcattagggcacggcaaaccacactgcagtttgatagcactccacccctattttaaaaataactgccccccccaaaataccttcaacaaacaaacaagagcgaataataagtgtggctaaagcgatgagaaattgaggtgctcatacactgttggtgggagtgtaaaatatcactgccactttgaagacagttggtcttcacaactccttagatttcaggtgtgatggcaggtttgtgtccactggcacccaaaggtgagccacccagatatttatccacggtaggtgataagctgcatgctgtattcagtgaccccacggaacaaaacacaccacagcatggagcagctttgcaaatgtcaagctgcgtggaaacatcctgttacgagagaccacatacttcatggtctcctttgcatggactggacagaacagcccattgtgtaacaacagaagtctagattaatgcttttctggggcttacaggaggctgtggagagtgattaacaatggagtggaattagttgtagctgtggggggggggcagtgaaggtgtcataaaattgggttggagtgatggttgtgcagtcctgcactatatttaaaaaacacaaaacacagtagaatttagcgagctgagtgtgtgaactgttcagcaaaggggctgcttctcagttaagccgcccacgcacgacacaactcagaccggttcatatacattgcactctcaaaagtaggagaaaacatgcatgagtttgcagttgcaattcattttatcacaccagcgttccctattctgacttaaaaaaaaaaaacatatcaattgactgtacatcacatcccagctcacagatttacctactatacactaacatacattaagaagtagaaatttaatatataacaaaaacaattatatatcaaaaaagtttttcaggttgtacttagtatgtacaggcttttgccaccagtgggaaggaactattctatagtattttataaacgaaatcacttattttattcccattaatttttctggagcaggtgttgatagggggtggggagaaggttgaaaatgctgtgtccctgttacagcagagcatcaccagggcagtgttcttaggaatcagtggtatctgagatctctccactcactaagttagcaccatctcctgctaggagtagatcctgctaggagtaggacttacaagaacatgaggttctgtggcttgtcatcagaaagctatcagacggttctctttagaccctgttttcttttcccaaagccccatgttcagattcatcaactccccatacactctgatggtcctcttactttacctcctgtttcctggggctcttcctctgtctctgtcctcttatatcttagcctcttctccctagacttccatctcctctcttcatgaattttcctctaggtatggatggtttgcacagctgcttctttaaattcatctctgtttctcttttttaaactcccatccactgatacacctaatatgagttgtctactttataaaccatataagtatgtgtcttagtcagggtttctattcctgcacaaacatcatgaccaagaagcaagttggggaggaaagggtttattcgacttacactttccatgctgctgttcatcaccaaaggaagtcaggactggaactcaaacaggtcagtgagcaggagctgatgcagaggccatgaagggatgttacttactggcttgcttctcctggcttgctcagcctgctctcttattgacccaagactaccagcccagagatggtcccacccacaaggggcctttcccccttgatcactaattgagaaaatgccttacagctggatctcatggaggcatttcctcaactgaagctcctttctctgtggtaactccagctgtgtcaagttgacacaaaactagccagtacagtatgtgtttgggaacttagccctcagctgaactccatacacaaaatttgagttatgtagctcattagtctacttccctaacactagactctcctttggtgtggctcccccttctccatatcctgttccctcttaatcattctgcaccatctatctgtcaatcaaggttgatgtctaacacatcttctcagtgacaaagttctgtccttttgtcctgtttccttcttgacttgttttctttttcctcaagcctagcttcgggcatcctgcaatattgttccttcaggtaacactcttggtttatttaaaatctttcttagaaagtagactgatccttcggaataaaaagcaatgctctacaggtgatgctccaggatttggcacgtgtcttcctaattatgcaatgtatccccaaagtttctcagccatccatgctcatgcaagtcccagtcgtcaacagtacagtgtttcagactcacccacactcttctacttcctgttacgtatgcgtctaaacttagtcgtgttgagaactccaggcttatgctggtgaagacttattcaggtattgcttgtgagacaatctgagatgttaggatgtaaggaaagattgatggggattttcttggcgagcttttcttcctcttaaaagggcagagaccctggagagacaaccagtgttttactgcatggcctagtcaaatgtccagctatgcttgctgtagccctcttgaccccactggggaaaccagatgcaagatactgtcagagaacagaaaggctgtcacaggatgttcgggtctgtaactaactgcccgagcttccctattttccaaaaaccttccaggatactgagtttgataaaggaaaatggggtattaccagtttagccaagccaggcgaagaatttagttttcctctgtaccatgcctgtatcagttcatagaaccttagaattcgtagtaaagtaacgcagggagaagacgctttggacagctgggtctctaacagtttaatctgcacttccgtggaacacaggagaaagatcttcttgacccgatccgttctcagaatggcatcttgattctcctatctttttacaaggttaatgtggtggtagaacatcagcccaggtgtcttgtgaccccaacaggagaccctggcctaaccaatcctgaggtccatggtacctggactctcagcccaatgctgttaaacctctggcttgggtttagatcggtctttctgagatctgaaaactaaagctcccaactcacatgctttaaaggctcaaaatagtcaggatgtgggggaagcataataaatgtgcagaatggccttaccttaacccgtgaatagatctgccaccttcaaacacacttgcttatacaaacatcggtgtgtgaggtccattttataggccttcttccaaatctggttatcatatagagtcctgaagaaatgacttataagacaactaagttcaggtagcccactgatataaatgttaatgctaaattttatttgataaatacataataggcattattatactgaaatttacaatgtctggaccattattatgtttctgtgcttgcttgcttgcttgcttgcttgcttttcttgttttcagcgatctctataattcttaaaacttggggagtaatttgtttaagataagttttaaaaattcatattttttacaggacccccaaactcaaacagactgtgtatagcataaatctatttttaaccctatttttttaaggtttctatctcattctaaacacacagagatctttcagtgactattttaacagaaaacctcaaaattgaatgtcagaggatgctggttaggttttctttgtttttgttttaatcaagttaacaaataactagagccaaccagtaagatgataatttgtttgaggaattgccaccaacagattggcccatgggcatgtctgcggggcattttcttaattgatggatgtgagagagtgcagcccactgtgagtgctgctatccttgggcaggtattttaggtagtagaaaagggcacactgagtaagccagtaaatactgttcctctgcatggactaagtgtattggtgaccaactctgtgtcaccaacaatgcattgatcttaccctaaggacaggaaagcggttcctgccaggagtcatccaaccaagagcaagtacagattcggattctctacttcacactccctgagtcttctgtttcatgtcggtttggtatatgagtctgaatccttgcctgtctctgtacctgtgtctgtccatatgtctgtctgttgtatctgtgtgtctgtctctcccagagggttttgctttgtctatattgaactgtacagaaagcatagcatggggaaggagtagaatactttacagaaacctttaacagaactttacaaggaattaagtcactggctccaattgatcccaactgacccagatagcaagcattattgtttatcaaccaatatccataaatgattgctttctatctttctgctttattttgggaaattattcacagcttccatatttgctgatttcagcaaatgatgcacaaacattatttgggtcagggcatggaagaatacattcctcaagcttaggttgtaaaatcatgaggttgtttatatgaaattgtaaaagttgtttacatgagaaagccaaggcaagtaagaatgactgttccattgttctcttaaaagcaggttagacaaactatgtgagtagatgtaaatggccatcttaaatctgaagtgacctcgatgtgaggtccagcaaaggttccagtctcttagaatataagaaatatttttgtaatattgcattagcacccccccaacatgacgtcagctttagttcctgtctccgtgttccttccttgagttcctgtcttggtttgcctcaataatggaatgtatgtggctgtaagaagcaacaaacaatttcttttctttgtttttggtcagtgttttatcacaacagaaatattgtatttgtctatatcctagatagttcttccaaaaatgccttccctcaaatgtcaagcatctttcatttttgggttttggacaaaatcatactttgtgaggaaatgcatgtacatgaaaattagtgttcaaatgaacgacatgagatcttataatttcgtttatcctaaactacacaaacccttgaattgttggcatttttggacaatggagagaatatggatgcagggtttggcctgccctttgtgctgcctgcttcacatcattccattctcagttttgtctcccttggggagaggtgatttatcacagtacttgttgattgcagtctctctgcacctgcttcatctccatgcccctctccattgtctgaaagcatggagcaggaagatggcagcacgggatgcaacaggtcctaatttgcacagatggtttcattttgctggatgaaggctgatgggaaggctagtaccacattacacatttgctcctcgtttgtgcaggcaattcatgttaggattctgatctcttgggggattggtaggtgtggatttgtgcccctgtccttcagaagttattgaatctcagatgaagttagtattgtagatgatgtctgacgttagccttctttttgaagaacatatggaggagatagcaaaaccccacggttgcttcttgatgcaatcagttagcctggcgatttgtcagaataaatgggtgaagagtaaatgagtggacccatggagggataccaaaaggagacggctaactttgtgtgctattatttaaaactttgaatcgtttgtttctaatacttcccatctcatagttttaattattttctggttgagagttccaaactcgtatatgatgtctttggtcaaatattcacacattctcccctccagttctttctcttcctccccatctctccccgaactgctctgttttcaagcccactgagtccacattgtactccctgcatgtgtatggctgtaaggactctttattcctgagtagcctctcagggaccaaatccctaagaaaactgtctctcccttctctggccaatagctagctcctccactaagggcaggatttatggtccagcttccttctccataccgagttttggctagcttcatcttgtgcatgttgtcacaggccctggaagttcacgtgaactctctgtgtactgccatgctcaggacatactgtttcaccgtggaagttcaccaccctttaagatctttctactcctgtagcgatctctgaggcttaggggacggagcaggaatgtgtgtgtgtgggggggggggggtaattatggagtttaaccatgttcccttgcatttataattaaaacgcaattatttcccctgtcttttaaattgagacattctgaaagaatgtatacaacacaagaggacaagaacataaaagaaacaaaacgttcccatttactttgatttttgagtaattatgtttatgacttttataattgcttcctctattcattggtctttactacaccagttgctctgcaaacaatgctaacaattgggtatccctgcctgggtttcttccagtggctcatttccttttgtaaaagggattagccttcagctcccagtgctcctaattgaggttttgtttgactttccacctctctctccctcatgggattaaaagtgaagtacagggaagtttagagaaatgctcaggtttccctactttagggacaatttaagaaaaaaaaaaaacggacttttgttcttgtcaaaggaaacagcccattcccagagttaaactgagcagataagcacctcactaggagaagtgggcccttcccagtgcctctggggtgtttatttgccatagctctatattgtttcatattgaacttattcccagaatgtcaaatatactcatgttcacgtgcacctaccaaaagcacaccctacagccaaataggaaaaaaaatatgataccatttgttggttccaatgattattgtaaaaattagctatatgtttgtatttaattattccatatttaagaggtgattgtatatgtgttttctgatgggccctggtaggataattccctcgttgatatagaacaggaactaaaactttgacatccttacttatttgcaatttaagttgcatttgagcagaaagggctgtatagagttttgcttgagttggccttgtttggctgctctgggaggatgctgtcaactcagttcccagagatacgtgcgagaaattcctcagggcctgaaagaagactatcttcagggttatatgatccacctaatcagctgcgagtgctctcatagtttggaaatccttttgtttaacgaaggcctttctcaattatcttctcttgattagacattgatgagtgcagtgtgattcctggggtctgtgagactggcgactgttccaacaccgtgggaagctatttttgtctctgtccccgtggcttcgtaacctcaacagatggctcgcgttgcattggtaagccttgtgttttgaaggtacagtatgtggcttctttataatgacagaacagcccaaacaggtatgaggatggtaatgattataaaaccattgggcgaacggatgaaaggattgctctaaggccttaataatatttagcatcacggagggattgatagaccagatactgttcgtaaagtctttgctttcaggagccagctggcttagttttatgttgtcaggatcattttttttttggaagaaagacttgctcaagatgtaattgttgcccagcattgcaggcacagagcacaagaaagatgtaaaatctgttagggagctgggatatagtaatttatattctggtgctaggaatcatgaacccagacagcatctgtttacttaaagcttattctggtaaaaatgcttactataaagaagtaattggcacccctaattttgtgtttcaagtgtattcaaattaaataaagccaaatatacttacacggtctgctctgtttagagagatgaagctttgtagttcgcagacgtgatataggttatccatcaggcaacatactttgggtttctgtcttgtgagcccagagataatgaaatggcctttgatgtacaagcatggtagatttagctacctttatatttcttgccttgagcgttcagcctggttagttccaaaaccgaactgataatagctacaaatagatggagaaataagtacagtgacgatagcagcactcgagatttatgcatgacgagttagagaaagtagcctagtgtctgaagaatagagcttcatggtccagtgaagggaagaagtggggtacagagctctccctgagtctggcagtcagtgtatcagtacctccctgagggatctatggaccctagtgatggggccaaacgaaccagttcatgagctgaaagtacagagttaaggcgataaactgaaaagctcataccagcagtcaacagcttatggcttgaacctctttgataaatgcacttatctactgggcactaaactagcctcggccatccatcagcaagaatgaaaggtgtatatactcccattacagggccatgttgtcctcacatagtataaataacaggatgggcatatcagatataggagtctcgtttggctagtgacaactttgtgtcctttggcctcctgatggacaagatgatatggggctgagttagggtcctgcatatgccatacatccactactgaagctgagttctgggcctccagaaatccccttcatctcagaggaaacattctatccctgggggccagagagagggcgccctaaaataggaaagtggaaaatgactcccaggaattagaaagccagtgctaaaactaagtaaacagcctgattttttttaagataatccatattctattttgaatagggatgtgtttctgtgtgtgagaagaaaaacaaacccagcgttctaatgtggggggaggagcttcgggttttaaaaatccaagtgtttattttcttagatcgaaattatttatgatcgaatcatatgtcatgaatatatgaatccccctctgttttctgttctataaacacatggtgggcatgcaaatggcactgagctgggtgacgtcagaattttcttcagcctgagacagcacgctatttgaactttactctgagagtttgtgactctaccctgcttccttgtcctgtttcacacagttctccctacaggatcgtaagaaaatcagcaagtacgctgagtctaaaccaccttgtaaactgtcagcgagctacatcctttctctctcaggaacaagggaagagtttcatggggcagaggcatttagctagtcatttttaatcttcaaaaaccagagctttccccattccatttaatgctaatttaggaagacagatcctaacttaattttacctagtgtgttaatcaaaattttctttttaaaaaacccaggaaaaaatatctttaacatagaaactaacatttgccacatttaaaaagagttgaagtgtcactaataagtcttttctttaaaagcattttaatagcaagatttaacgagccttatgtcattttggaattcactccccttgggcatcattaatacctaatttccacaatttaatgcaggccccgaagaatgactggcacaagcagtaatgagtaatgaatatttgagccacagagagagagcaagccggatgcaggcagagggggctgactctcttggtgctcacacagctagcagaagccctcagcaggaacaggatacagcctgccagaggcaacaaaggtttagaaaaagacatgaaacagttagaaattcttgcagaaagtgatgtcctcacgacgttctgacgccttttcctccagctttccgtgtctcattgcgcagcctcacctgaaaagtctgaagataccaaccgcaaagtataatgtgaagtgtgtgtgtgtgtgtgtgtgtgtgtgtgcatatgtgcatgcacacacacgtgtaagtttgagggaagaagtgattcactactgaatcatttccctgtataatggataccattaagcgaagcaaaacagaaggctaagcctgccaggatggnnnnnnnnnnnnnnnnnnnnacttgtacaagcctaatgtgctgggttcgatccccagttcccacattaaagtggaaggggaaatccaactccatactgttgtgtctgaccttcacatgtagagagtaataacgaacaaagatgttttaaacattgctaaagtgaaactttttaaggggagtgctggagagaagactgggtgaattaagttcttgttccccaagcttgagggcagagattggcccccataacccacacaggagacaggaaggtggggcagtggtttgtaatctcagcagtcagagggcagaaacagggtccctgagcaggctacccagaaatagttatctccaggctcagtaagaaactctgctcaattaagtaagtgggggagaaactgagaaagatgcctttcaccaatgttgggcttctattcatatgtccacactcttgaacatatatccctttacacacatgagtccacacagagatgtacataataaatgtaacacacacacacacacacacacacacacacacacacacacacacacatgtgcacacgcacaaataaaaaacgaaaacaaacaaacaaaaaaccttggaaagaaaattctcaaggagatgaacactaacaaagatctcgataaatgcgtaagagctggatctgtggaaggaacgggagttgccaaacaagagagtcctgtgagccagtggatgctgagaggattccatatggatgcaggagacattcaacagagcttggctgggaaagaactgagcaagacactggctggcaatagagtaaaagggctgatgctgatgctgatgctgatgctagagttccctactgtctgatgatgaatacttgagtgtccatcaagagctcaaagcaggatgaggcatcaaaatagatgggcaagcagaggtatggggtggatcctgtcagtcaaggcagaagaggactcttcaatgacatagtttgatggcagtcgtatgctcttcaagtatcagagtgtagtcaatggtgtgtatagtgtgtaggagtctgggttatgtgtggtgctaatttctgatacatttgcaagaaaacacttgaggaaggacctgaaattcctcacaagtgtgtttatgacaggtaggtgactcaaggacaagcagtgtagtaggtcgtccacaatcctataaaggaagactgatggttttaggatactattttattactaatgattgctaatatttttttcaatttgaagactccttttgaatatcaaacttttttccatactcccatgtgatggggatgtgttgtgtgaattaaaatacataattaagtggctgcttagcatgctgtcctatttgtaaatgaagccctgcttggcaggcccatcaacacgaagaactgtttgtatgtagcgggggacatgcgtcactcactctccaatactcatgacaaatagagtttctgaccttgcagtatcccagcagaggactaaagggcggggcccacacagaatggcttcctgataaacttgctatctggtagtttacacgtacgacctcattccaaatggaacgttgagcctgaactcatgcagcgtgctgaagtgggtagagttgtcttggtagagcttctttagctattgatagccaatttcattgcgttcattctggtcagagaagtctctggtgtttgctgtcagcagagcaaatgcttagttttttttttttttaaaggaatgagctctcaagtctgtggctggtagactctatgcctatgaaatgaaactcagtggtttggtgttcagatctctcctcacctacagaattaattctgatgttactgtcagtttctgaaaaagctattaccattctactatggggctagagttattgaaagcttttaccgtggacctctattagtattatttgatatagtttgggcttgttctttcttctcccactttggatttactgtggatttcttaggccttagcttgtcttatgacatggctagaaatttctggaaggtttgaaggtgtagaatggtacctgttattctgtttatgccttcttctagaccccttattagatattccccattttctttcatctcctcatgtcttaaactttttgcagcatctcccatctctgtctatcagaacaacattgacgagaatgtgtatttacaaacctccccgaccagtaaccactctctccattcgcatctggcagccttagtgtatgtgtgaggctccttgccccagctctggccccttccagacacagagtacatagagcttgtctaaggcaattctctccttgtgtatagcattttatacagcatccataggttaggctttcgttgcttaaacattaaaaatgatctagatactaattgatctttaactgtgaatgatttaaaatggtacctatgtgtcaggttgatgttgtcattctgatatcaaacccactgtttatttccttttcttccctgtgtctcattccttggcgtgggtcacttctccgttactactctgttttctttgaagttcgtggaactcctctgagatgtctccgtgttgtcctctacttgggttgacttggtctagctgctgttgtatctttacctgagaaactgtgcttctttgaaaggtttcagagcagaagcttggtgtgagttgcaacgtcaaagctgtttagatgggaagagcctatgattataatatcttgaggccactcctccatttctccatgcagaagcagcacagagatgggcagtctccactgtgctccctagggtgctaacaccctcaggcccctgttctttgaggcgcctgattacactgtgctgggtaggatttggactttctgttttgtatgctttgagccttgtgaaactgtaccagacgcttggtgtatctgtacttcattagaagcttaaaagtgaaccaagccatttacacatagaattcccaaatctcctgtctccatnnnnnnnnnnnnnnnnnnnnacacaagcaagacaactcttcctcccctttgacaagggagaaagccagggagaagaaattaatcaactgtgttgctttttaaggaaataggctaccactttacggaaggattagagtgatgctctgtgtgtggacaacacgaagagctgtgggtgtccatgcgtcatgaaggcattttcacccaaggagcagtgctgtggcactatcatccagagggagaggactgtgggcaggagccccccaacccccccaccccgctttttatcttgcttttcatgtgaagcagagtgctttttttattatgagggatgtttctgggagacagtctactactggttggcaaaacaacaacaaccaaaacaacaacaacaacaacaaaaacattgttttatttctttttcccaccagctctgatctatgagtaagaaatattaaatacagttatggaagtaaatctaggtctcttgactcgaggctgtgattttgatttcgtattcaaacatgctacaactgccttagtgtagaaacctcgccaaatgtcacattttcatcctatcttgctgcactggttggatgctagagtatgggggattagtcgtaagagtttggggctttcttatcttcatttacatcttgttcccaagaagtacagcaaccaagtagagctaagaatatgagcctttggctcccagaatgaatggtcttaaatgtgttcccatggctcactttacaatagacctgggaagtcactcacagacgccaactgttcaaacttagctcctaagagtcttagtgtctcccatggctttacatgggatgcatgtggccagttctgtgctttgctttaaagcaagctgaatgtcttctgtaaatgagaggatgtgttccacatcttactggctatctgcaagacagcttcaactgtgtcctgctgggttggaagcaatctgagaatgctatggaccgtttggggaaataatgtatttatgctagactgtgtaattagagccaggaatgtcagctgtatccattactggaattatttgcaatgatttttaatttaattttaaaaatatattttatgagtactgtcaatttacatacaccgtttctatccctctttccagctcctcccatattcctctatcagattaatgatctctattactttaattaatattgttaaatacatgtgggtctgcacatgtgagtgtgagtgtgtgtgtgtgtgtgtgtatgtgtgtgtgtgtgacttactcagtccatttagtgttgcttatatttagttgtgtttaagactgatcaactccggtctgtataaactatcaggaagcttgtccctggagagaactaattttttctctctgttggcatcactggtgtgaggctcctgaatattgcctgtaacttcttatgatactagagaaaatgtctttaaataaccaggcatggtggcagacattcatgatctgagcacttccgagactgaggaaggatggtcaagtttgaagtgtctctaggctccacagtaacgttgagggctgccttggctatcagtcataatcctgggcttgggcttggtttttttcatttatttgtttgacaaaggatcttgatcacatttcagtagtacttagctaacttcatttgttaaaagaaaagtggttgtatatcaagtttgctgatgatttggggtttttattcctgtgtgatttggaattgagagccttttgttaccattacggtttttcttcctgtgttttctacccttctgattctttctcaatttagtcgacagggtgcgctctatcagactcaaatctgattgtgttaatttcctaccccaaatccctcagatagtgtactgagattttagcacaacagattttgccaaactcagtggtgcttcagtctcctcgccttgctttgtttcgcatctgacttccttagctaccttgagctcttacaagacacctcatccggccttacagttttagattatgtatgtgcgctggcaacttccagatacacatattccaagtttgtttattcaacagcctaagtgtgttgtggattacagaagagccttgcctggtaccctctcagcctgcttatttcctattcattgacatctgagcagtccaagtcgagactcaggaaatttccagcactctttcccttacatccagcatataagtgatttcccattaggtctgtcttccaacgtgtctgccaagggttcttacaacacaacacagtccactgctgctctcatcaaagccgtggctctcctaaacatctcctgtgtcctcttgttgctcttccatctcttcttacatcagtcatgatcctaaagatgtcagccactgccttttgtctatttgaagccatccacaaaccttcacaacatggccttcaaatcccaatgaccttagggctcctatgacaatacccatcttctcttcttaagacccatgggaccctgttctttgtatggctgtgactcattctcttgttcccttgcaagctgcttttgcagttattgccaggttttaagtgggcgctcagacatcggtgtcttagggggcttctgactgatctttcagtcagcaccctcgttagacattgttgcaaagctaataccggcatagatctcagtggcagacctcaggacacaggtgggtcatgtttgatgctggtgtgagatacattgtaagctctaggccaacctcagctacatagtacaaccctcacccatccccaactcctcaggttcaaaaagtgtcttgatcaagcgcacgtgttcggttgccactatttcttgagctccagacctatttggtttgtcaagggaagcttgcctcggatttacatgcctctcacttttgacttagagtcactaatcataggaacctttgctgacaaaaaggagtagagcgctgatcagatgtgtaagaattaagaggcaaaggaatgaactggtataaaaaatgattaagtcagaggaattcacctcgcctctatttgcctaacatgggaaatgattgctgcaagacctggaggtaattctgctgtgtctcctgtttgtcctttacatcttcagatcagagggctggaacatgcttctccggcctggtgaatggccgttgtgcccaagaactcccgggccgaatggcaaaagctcaatgttgttgtgagcccggccgttgctggagcatcgggaccattccggaggcctgtcctgtcagaggttccggtgagtggcaggctactgtctccttggcaccaacagagttgaaaaagtcaatgaccgtgatgcactttgcccttctccttggaagcaggtcagatggttattttggatagccggcagcttatagtgcaccaggcctttacaatgttttctttcctttctcacgaccttgagaattaatccctctcatatcctgtgcattataaataagtttgtactgggaaaatccccttaggatgaatgagaagttcctcttgctgtagatagcataaatagtaaagtttgattagagtttccaaaacaaatatttttgttatctttattatgggaaaaattgagatacagtctttgttctctcaaaatcatgaagccataatatactaccaagatggatctctaatatgctatcctaattccatgaataattaataaaatatggtagttgcttctttttatttagtttcaatactcatacaactaaataaagaatttacaggctacctgaatgcattcgactaccaaaattcattttaaaacattattctgcacatatattaatatctaactcctgaaaaatgaataaaacagacataatattcagttagacataatactgatgagaattcaagtaaaaccaaatatgtagactgagttacccaaagcttttcacctgctcaagtaaatttcttgcattcatagttacgtctggacttttatgagttatacttagagtgtaaagtaaaaaaggttcacacaaaggactctttgtttttgtagcttggttaaaataatgaggaccgtaagttttaaatatttttgaaatgcctataccttgttcttgttactacacagcactgaacatatctaataacagaataacctccttattcgtgttgtatagaaaaagtgagcaaaaaatgatccatgacaactacttctatgatgggacaagagctctatttgtgtttaaccaaactctcttttcttacagaggaatatcgtagactgtgcctggatggtcttccgatgggtggcattccagggagctcggtttctaggcctgggggcacggggagcaacggcaatggctatggccccggtggaacaggcttcctccccatccctggagacaatggcttttctccgggtgttgggggagctggagtaggagctgggggacagggacccatcatcacgggactaagtaagtaatcacacttcctgcacattcttgagttctcagccttacgtgatactatatcagctaacacgtgtgtgtgtgtgtgtgtgtgtgtgtgtgtgtgtgtgtgtgtgtgtgtgtgtatgtaccaatattaatttaagaaaatttggtaggaaagcattttatctattcctcacaccttttgataaatcggaacaaatgcgtgacctaggctcttccaaaatacaaatgcgagtccaagaatatccgatctagatgacatcactgcaaagcacatttgggtcttggtggagttcgttcatctggcctatttcactgctccactcatatactgcttggattatatcccaagaccgggtctcaagggagagaaagcaagccccgctctgtgcctctcccagcattctaaagtacacatcttctctaccacacactttgccattgttgtcaaattgcttgaaactgagaaccgtgggctccagagtggaattggtgcccgattgcttgacgtttaagcccactctttcaaaagcacagttcttgataatattttataatgtcccactgtgctatgtttattctttctggcatactgcctacttgctacatctaaatattcaacaagttccaaaaaaaaaaaaaaaaaaaaggaaagcactcaaacgtatggaagaacattcctgacatttttcaaaaagacacaagcaaagtttccagatgtgtgacttacagatgcaacttcaggcctgtgcctcaagtatttatttttaagatcctccatacaaaagcttaatagaaaatgtgaggctcacaaagaatgactacgagaaaagtatacatgtatatttttcataaccccccaaattgaaaaatataatttaataaaatacagagtaatgcaggcttctgatacaaatttaattaatttctattaaacttctaaaaaaattagtttgcatatataatacatgttgtaatgaccctgtatgctttgtttcaactttccgtagcaattctcaaccagacaatagacatctgtaagcaccatgccaatctctgtttgaatggacggtgcatacctactgtttctagctacagatgcgagtgtaatatgggctacaagcaggatgctaatggagattgtataggtaagttcacattctttaagccttctccatctttctttagttagctgggagcccatacaaacaaatggggctgaatacaaatgtttaaggtctgttgaagtaaaaggaatttctgtgctgttttcctgccactctctgcagcctggggccccttaactggttgctgcccttatatcccatcaaaaattccccatcccttcttttcctagaggtaatttctgtctcatgtttctttagagagttgcctatccttaatatgaattaaaattttaaagtgaatgtatttagaaaacaatattcattcaatccatccaaggtgacaatggacaacgaactataaatatttaaatattttggtttaaagtcttgagaagtactgggtttgactgtatgactgcaaacattaacatcacttcttcatcctctttgtcttcatccacttcctccttctactcctccttccttgtgtgtgttttgtttgttttggtttttgtagtcattgttttgatttggttttggttggttgggtttaggttttcttttgtagttgttgttttattttgttttgggattttgtgcagtttggagaggggtctgattttttttttaagacaaggtctctctttgtagccctaacagtcctagaactcactacatagaccagaatggcatcaaactcacagaaatccacctgcctctgctgcccactgagtgctgagattaaaggaatacattaccaccgccaacaattattaattccttagatactgacgggctatatctaacaaatacagagggctttgggtatagctcagcaggtaaagtgttgactatgtaaacatgaagagttcagatccctggatgtgcacatgagaagcagagaagtgtgtgtctgtaatcccagcaatggggaagcagacacgggaggattcctgggacctgctggtcaactggtctaccctaccagtgatgtccagattcaataagaataactatcaatggagaataattgtgagcgacagggatattcaatctttggcttctatgcacatccgcatatatgaatgcccacacagagagaataaccataaataaaatgttttaaaatataataacagaagcaagagagacggcttagcagttaagagacttcctgcttttccagagggcctacatttggtgcccagggcccttgtcaagtagctcacaatctgcctgtaactccagttccaggggatctgacagcctgttcagtccttgacaggcactcattcacatgtggcatacattacacacacacacacacacacacacacacacacacacacacattatttaaaaataaaaatctaaagctaatttaaataacaatataaatattgcatatcgatgtaagtaccacatgcatgtgtaaaaattgcatattctaaagtaaatgaaagtgtactgctaattcaaaaaataaaaaagtgtattctctgtgtcagtattattcagcttggtaagttgtttgagctggacagtataataaactcaacatttagtcataaaaatccccataaataaaatacttgagaagggagaggacgtcttgaaggctttcagaatgttgtgaatcttctctactatttcattcaaggccggtgagtggtgatgcatagatcttatctgtaatgtggaaacatcaacaaacctgctgtgtgttgtgctgagtccactgaccccttttgtgtattgagtgaagtttgtaatgtgccttggatctcaccagagatagaacggctccctgtgttacaagtgattccacagtcaagatatttcaccattattttaaacagcaaaaacagaggctgaagagatggctcagtggttaagaacactgactgctcttccagaggtcctgagttcaaatcccagcacccacatggtggctcacaaccatctgtaatgggatctgatgccttctggtgtgtctgaagacagccacagtgtactcacattaaaatcaatcgatcaaaaaataaataaataaataaatctttaaaaaataaacgaataaaatacatcaatctatttttaaaaaaaccaaacagaacaaaaatctgaaaacccacatatatatatatatatatatatatatatatatatatatatatatattatcaccttcagactcattacaaactctgttacacttttagaaaattggcagtattactttttaattctgccacagtaaaaacttaaataccaaaccctgacctgtaaatgagctttctaaaatctctaaggaaagcgatgcatatgaccctttaccatcaactaggctttttaaaaatttccttaaagggacaggttcttgtttttcttcaagaaactgacaaattcacacatttgaagagctgtcatttgcatggcagctaatctttgagtaaaaatagcattctgtgataaaatgtggcttaccaatgtgcagtgttgcaccaattcatttctgagacacgtgtggtacttcagtcagcaatggtgtgtaacatgcatcgctgtcatcagagattttagaaagcacattggcaggtcagggtttagtatgatgagttttcactgtcacaaatgaagccctttgctgaacctggcttttctttgcactactgtcctgtgtatccttggtaatgtggcttccatttgtgttcaggtatttgtgcttaaagcaccgctttgtcctgtatcacagaaaatgtccccacagtgaaaaaggcagtggcatcaagtggttatgataacactctttaaagatttatttattcttatatgcattggtgttctgcctacatgtctgtgtgaaggtgtcaggtctcctggaactggagtgacagacaattgtgagctgccatgtgggtgctgggaattgaacttgagtcctctggaaaaacagtcaatactccttaccactgagccatttctccaaccccatgaaaaagaaacgttttaattgtgtttctgaaatcccagtgacttccaggagcccatagaccaaatcttgagaccagttgttatagagaatccccaactttgccctgaaccatgtatgaaccagcctttaccagtgctgtgattaatggcgtgtgcctataagccattttctcacaaaccaaaaagtagtcttggagggtctggtgtttctaaattctatctatttgatttagagttatggatggtgacatgatagtaaaatggaagccaatgtgggacctctagaagcaggctctacagtagctgggatcatgatctcttgataaatccgaatttccttggggctttaaaaaaaaagccacactcagcacatctgcctgtccctgctcaagttctgaaccactagagagaaacacatatgtttctctcatatgttgttgtacagatactgaaaattacatctccatgtgttgtatagtctccacatttgggcttaccaaggctgaagtcctgaagaagtcggccatacttttatatattagtcaaaggtgtatttacttgtccaaatttatactcatgcctgcagaggccaacaaggctcactgaaggctttgggttctcccagttgatttatctttgcagacaccactccttgatcttcatcctgcagaagccattggcatgactgttgctcacatcatggaacgatggtacaagagaccacatccaaccagttgccctggagttgagtttgataagtttaacattgtagggcctgatatgttaggcactaggaaggaagggttcttgttttatctcctattacttctgcctaatgtggtgtggagactgtatatctgcataacttaatatgttgggggaagcccagagcttctgcactttgcccaattacacatggctgcactttagattcatcattcagtccttcagcaaggaaacctcaccaggattctccttcacactattataattcacagccatagcttaacaatgaagcccatattcaggaaaaaaaaaggagttttcagtcttttcatgcctttctggtgtcagcttttaaccattttgagttcatgaggaacaagttattctgttagaaaaaaaaaaaaacttactttagtactcatgataaaaatggtacctgcttaaaatatgccagtgttttgaggagtgataaactgacttttatctgagaacttctttacatgcttgctaaagacataaatcatatgttaaacattaaaaaacaaagcacataaacattaaaagcaagaaaaccagagcttgacccttatttcttccataagaatttctcctgggtcctgagaacagttacattccctcccgtatttctcttcttctcttgttcttctgttaacatgaaattcggcaatgcctagtgcctgtctttaaataaatatttaaactcgtggtgtctgaaattttaataactttaataatcatttttttcatgattcttttcatttgttttcagagtcttaggattcccatgaacttaacactactgagtccttaatggaatcgtagaaagaaaggaaggaaggaagaaagaaaggaaggaaggaaggaaggaagaaagaaagaaagaaagaaagaaagaaaggaagaaagaaagagagagaaagacccaaaatatagtgactataacagtcgttgtctctgtccctgttcctttaaggtagatgtgatcactttgcggtactggagtgtgaggcacatcatgcagaagaggcatggaatgcagggttcagaagataaggctggggatttgtggtcactctaaatccaaatctctagctgccagggctggaacttaccgttggagtgccagcctacatgcttgaggccatggacctgattcccagaactaccaaagataaataaaaaggaaagctaaatatcccgatcctgttaaacacacagaaagaaagaaaccgagcttaaagggctcttggaattataaagcaactcaattaatttgctggtgaggaactaaaaatatcagtgagtgagtggatacagcctattggtcagctggacccttgtagaagactaaggagagagctttgataacactgaatgaccagggggtgggaagagttgtcatggcaacaggaagccatgggggtgggttcttaagagagaaagatgtgctgagtgacactgtagattcttccatttttccatggccccctagacaggtgacctggtggggggcgtgggggaggttggttgcttgctctcttagagacttcatttaaacacagtttaacactgggctttcaacaagagacagccatgaatcacatttaattgttgggcttcaacggtgcacatctagataaccgaggtgatttttagcagtgcaaagcagaggtgcggtttcattgtggaaagcgctcagattgtacctgatgtgtttgctaatgctctaaactctctcttcccccttctgctccattcctttggctcagtagaattgatgtatcaaccaaaagtgtcaatgtaagtgagtcttaaggggctgaaagggccctgggatgaataaaaaaaacgcacttaatcctgttagactttgctgtcttaattgtattcaccgcgaggttttgttttgccctccccctcctttaccagagagggtgtaattgcagtccctcagcaagtttatagaaatgaggctggtgtgtgtgagagagcgcagtccctctggcagaaacatctgtgagaggagcaatctgtttattaacatggtcaccctgggttgactgcattgttctttcctgcagtctagctaaaattgtaatgctaatggattctacatgggcctgagatggcaaaacagtatggcagcttttttaacttgccagcattcagaatattacctagtgggcatgtctaagaaaagagaggttcaatgcacactggcccagtgattttacctgggatttgcctggtcagatttgttcagtctagtctttggttttacaaacccaatgtaatggattcgaatttaactacgcctaaggagaccttacatggaaacttccaacttactctggtttcagatcagctaataattgcatcagattttattttctgtgaaaaacaaaaatcctcagagccaatcttaagactcttaggagatctaaagttaatcggggggggggggggggaatcgctgtttaattggtttttgttgtctgtatactttatgtttgttactgcaaaataaaacctcggtgaatatatctagctgtttatgtataaacaagtctgcaacagcgtaacaaagaaactccgtagtccatcagttcctttatttaaaactaacagtattgaccacatgtagtgtgtgtgtgtgtgtgtgtgtgtgtggtgtgtgtgtgtgtgtgtgtgtgtgtgtgtgtgtgtgtgtgagtgtgtgtgtatgtgtgtatgtgtgtgtctttacaaaccatccattgttcacatgatattgtccaaggccttaggctattaacttgcctagattgctgtagctgctgagtgttattgtctgctggaactcacagttgttgcttttcgaggcctgtgcccttaatcactgggcattattccagctgggaaaaannnnnnnnnnnnnnnnnnnnnnnnnnnnnnnnnnnnnnnnnnnnnnnnnnnnnnnnnnnnnnnnnnnnnnnnnnnnnnnncaaattggactctgtgtgtatttgatgaaaggaattttcattcatttataaatactctgctatttagactattaccacggcctggccttctctcaagtttaggaggctaaatgcactttaaacaaacatttctacaaattgagtgacgtctgtaatggtttcttttgctgctcgcatatgttgatgaatgtacatccaatccctgcagtaatggagattgtgttaacacacctggatcctattactgtaaatgtcacgctggattccagaggactcctacgaaacaagcgtgcatcggtaagacagggattgtgtgcggaaacggcttctctgtgaagtagagtcagcaaggctgttgaagttaaagggaacttattaaaatgagacagggattagctaagcactgttacgttgtggaattgttttaggacgctcttgaagaatctcccattaaacataagtaccgggtgcgtgtataatccaggagatgtcgcatctggctcctaaactctttagtctgctttctttgcctataaagcacggcttcctttctccaaatgacgtcagcattgccgttcactgaatttaagatttatagtcattttcaactactgggtttttaaaaaaaatttattagatattttcttcatttacatttcaaatgctataccctccccccccaaccccagccctgctcccctacccacccactttttggccctggcgttcccctgtactggggcatataaagtttgtaagaccaaggggcctctcttcccaatgatggctgactaggccatcttcttacgccgtactcacaatccagcacctaatctttccttgtctgtattcagtctcattgcttcccccaccaacatcacccaaaacctacctccctgctgactcattgcagaaaccctttaccagaccagttcagttgttttccgtttcctgttcatccgcacactgttaggtgcctggatggactttctcaggcagttgtccttgtattgccctgaaaccagaaattcctcagtttccttcactgacccagcattgagttctgactttaaggcctttgtccactatgccaaaaaaacagctgcctcgataattctagcctcctcctacctgctcttaggctaaccgcaccccatgttcttttccctgtctttccctcttcatccactatctggtaaggaaaaagaaaatgcttacattttctatccaaaaggaaaagctagtgagaggtgaggatgttgcatcatcgtagacatcacgtgactatttcaaattgcatgcattattttactgttccttcaacacgcatgacaaagaaagactgtttggctctctttaaccttgtcagatatcgatgagtgcatccagaatggagttctgtgtaagaatggccgatgtgtgaacacagatggcagtttccagtgcatttgtaatgctggctttgaattaaccacagacggaaaaaactgtgttggtatggaatttctcttcccttggaaaaaaagacttctagaagatatacattttatttagagccacatagaggatgcctacaaggcttccatttctcatgggtgtaagaaagttggtcacattacctaggcaaataaaatatgaaagcatttgacatgaccagaaacttaaagtgtcagaattagtgagcaatgaatgctacagccacacataattcatgacttgctgcatttttcctatgctgtgcatatttaaatatacatagcagttattctccagcaatgtgctggattttcttttttttttttttttccattttttattaggtatttaactcatttacatttccaatgctataccaaaagtcccccatatccacccacccccactcccctgcccacccactccccctttttggccctggtattcccctgtactggggcatataaagtttgcaaatccaatgggcctctctttccagtgatggccgactaggccatcttttgatatatatgcagctagagtcaagagctccggggtactggttagctcataatgttgttccacctatagggttgcagatccctttagctccttggctactttctctagctcctccattgggagccctatgatccatccattagctgactgtgagcatccacttctgtgtttgctgggccccggcatagtctcacaagagacagctacatctgcgtcctttcaataaaatcttgctagtgtatgcaatggtgtcagcgtttggatgctgattatggggtggatccctggctatggcagtctctacatggtccatcctttcatctcagctccaaactccgtctctgtaactccttccatgggtgttttgttcccaaatctaaggaggggcatagtgtccacacttcagtcttcattctccttgagtttcatgtgtttagcaaattatatcttatatcttgggtatcctaggtttggggctaatatccacttatcagtgaatacatattgtgtgagtttctttgtgaatgtgttacctcactgaggatgatgccctccaggtccatccatttggctaggaatttcataaattcattctttttaatagctgagtagtactccattgtgtagatgtaccacattttctgtatccattcctctgttgaggggcatcnnnnnnnnnnnnnnnnnnnnnnnnnnnnnnnnnnnnnnnnnnnnnnnnnnnnnnnnnnnnnnnnnnnnnnnnnnnnnnnnnnnnnnnnnnnnnnnnnnnnnnnnnnnnnnnnnnnnnnnnnnnnnnnnnnnnnnnnnnnnnnnnnnnnnnnnnnnnnnnnnnnnnnnnnnnnnnnnnnnnnnnnnnnnnnnnnnnnnnnnnnnnnnnnnnnnnnnnnnnnnnnnnnnnnnnnnnnnnnnnnnnnnnnnnnnnnnnnnnnnnnnnnnnnnnnnnnnnnnnnnnnnnnnnnnnnnnnnnnnnnnnnnnnnnnnnnnnnnnnnnnnnnnnnnnnnnnnnnnnnnnnnnnnnnnnnnnnnnnnnnnnnnnnnnnnnnnnnnnnnnnnnnnnnnnnnnnnnnnnnnnnnnnnnnnnnnnnnnnnnnnnnnnnnnnnnnnnnnnnnnnnnnnnnnnnnnnnnnnnnnnnnnnnnnnnnnnnnnnnnnnnnnnnnnnnnnnnnnnnnnnnnnnnnnnnnnnnnnnnnnnnnnnnnnnnnnnnnnnnnnnnnnnnnnnnnnnnnnnnnnnnnnnnnnnnnnnnnnnnnnnnnnnnnnnnnnnnnnnnnnnnnnnnnnnnnnnnnnnnnnnnnnnnnnnnnnnnnnnnnnnnnnnnnnnnnnnnnnnnnnnnnnnnnnnnnnnnnnnnnnnnnnnnnnnnnnnnnnnnnnnnnnnnnnnnnnnnnnnnnnnnnnnnnnnnnnnnnnnnnnnnnnnnnnnnnnnnnnnnnnnnnnnnnnnnnnnnnnnnnnnnnnnnnnnnnnnnnnnnnnnnnnnnnnnnnnnnnnnnnnnnnnnnnnnnnnnnnnnnnnnnnnnnnnnnnnnnnnnnnnnnnnnnnnnnnnnnnnnnnnnnnnnnnnnnnnnnnnnnnnnnnnnnnnnnnnnnnnnnnnnnnnnnnnnnnnnnnnnnnnnnnnnnnnnnnnnnnnnnnnnnnnnnnnnnnnnnnnnnnnnnnnnnnnnnnnnnnnnnnnnnnnnnnnnnnnnnnnnnnnnnnnnnnnnnnnnnnnnnnnnnnnnnnnnnnnnnnnnnnnnnnnnnnnnnnnnnnnnnnnnnnnnnnnnnnnnnnnnnnnnnnnnnnnnnnnnnnnnnnnnnnnnnnnnnnnnnnnnnnnnnnnnnnnnnnnnnnnnnnnnnnnnnnnnnnnnnnnnnnnnnnnnnnnnnnnnnnnnnnnnnnnnnnnnnnnnnnnnnnnnnnnnnnnnnnnnnnnnnnnnnnnnnnnnnnnnnnnnnnnnnnnnnnnnnnnnnnnnnnnnnnnnnnnnnnnnnnnnnnnnnnnnnnnnnnnnnnnnnnnnnnnnnnnnnnnnnnnnnnnnnnnnnnnnnnnnnnnnnnnnnnnnnnnnnnnnnnnnnnnnnnnnnnnnnnnnnnnnnnnnnnnnnnnnnnnnnnnnnnnnnnnnnnnnnnnnnnnnnnnnnnnnnnnnnnnnnnnnnnnnnnnnnnnnnnnnnnnnnnnnnnnnnnnnnnnnnnnnnnnnnnnnnnnnnnnnnnnnnnnnnnnnnnnnnnnnnnnnnnnnnnnnnnnnnnnnnnnnnnnnnnnnnnnnnnnnnnnnnnnnnnnnnnnnnnnnnnnnnnnnnnnnnnnnnnnnnnnnnnnnnnnnnnnnnnnnnnnnnnnnnnnnnnnnnnnnnnnnnnnnnnnnnnnnnnnnnnnnnnnnnnnnnnnnnnnnnnnnnnnnnnnnnnnnnnnnnnnnnnnnnnnnnnnnnnnnnnnnnnnnnnnnnnnnnnnnnnnnnnnnnnnnnnnnnnnnnnnnnnnnnnnnnnnnnnnnnnnnnnnnnnnnnnnnnnnnnnnnnnnnnnnnnnnnnnnnnnnnnnnnnnnnnnnnnnnnnnnnnnnnnnnnnnnnnnnnnnnnnnnnnnnnnnnnnnnnnnnnnnnnnnnnnnnnnnnnnnnnnnnnnnnnnnnnnnnnnnnnnnnnnnnnnnnnnnnnnnnnnnnnnnnnnnnnnnnnnnnnnnnnnnnnnnnnnnnnnnnnnnnnnnnnnnnnnnnnnnnnnnnnnnnnnnnnnnnnnnnnnnnnnnnnnnnnnnnnnnnnnnnnnnnnnnnnnnnnnnnnnnnnnnnnnnnnnnnnnnnnnnnnnnnnnnnnnnnnnnnnnnnnnnnnnnnnnnnnnnnnnnnnnnnnnnnnnnnnnnnnnnnnnnnnnnnnnnnnnnnnnnnnnnnnnnnnnnnnnnnnnnnnnnnnnnnnnnnnnnnnnnnnnnnnnnnnnnnnnnnnnnnnnnnnnnnnnnnnnnnnnnnnnnnnnnnnnnnnnnnnnnnnnnnnnnnnnnnnnnnnnnnnnnnnnnnnnnnnnnnnnnnnnnnnnnnnnnnnnnnnnnnnnnnnnnnnnnnnnnnnnnnnnnnnnnnnnnnnnnnnnnnnnnnnnnnnnnnnnnnnnnnnnnnnnnnnnnnnnnnnnnnnnnnnnnnnnnnnnnnnnnnnnnnnnnnnnnnnnnnnnnnnnnnnnnnnnnnnnnnnnnnnnnnnnnnnnnnnnnnnnnnnnnnnnnnnnnnnnnnnnnnnnnnnnnnnnnnnnnnnnnnnnnnnnnnnnnnnnnnnnnnnnnnnnnnnnnnnnnnnnnnnnnnnnnnnnnnnnnnnnnnnnnnnnnnnnnnnnnnnnnnnnnnnnnnnnnnnnnnnnnnnnnnnnnnnnnnnnnnnnnnnnnnnnnnnnnnnnnnnnnnnnnnnnnnnnnnnnnnnnnnnnnnnnnnnnnnnnnnnnnnnnnnnnnnnnnnnnnnnnnnnnnnnnnnnnnnnnnnnnnnnnnnnnnnnnnnnnnnnnnnnnnnnnnnnnnnnnnnnnnnnnnnnnnnnnnnnnnnnnnnnnnnnnnnnnnnnnnnnnnnnnnnnnnnnnnnnnnnnnnnnnnnnnnnnnnnnnnnnnnnnnnnnnnnnnnnnnnnnnnnnnnnnnnnnnnnnnnnnnnnnnnnnnnnnnnnnnnnnnnnnnnnnnnnnnaagccacatagaggatgcctacaaggcttccatttctaatgggtgtaaaaaagttggtcacattacctaggcaaataaaatatgaaagcatttgacatgaccagaaacttaaagtgtcaaaattagtgagcaatgaatgctacagccacacataattcatgacttgctgcatttttcctatgctgtgcatatttaaatatacatagcagttattctccagcaatgtgctggattttcgatgccatggtcctaacactggcaatttagagaaatttgggggaatgtggcaattttgatatctgttgtaactgaatctcttgataggttggcatgcttagttgagtaatcgatgccaaaagagatgtggaactcatacactcactaagaaaagtgcagatcattccacctgcgaggaggctctcggagctttttaattccattgtaaatgtgacacccactgggaactaaaagaccaaggatgctaatacagtcttaagatttattccttgccttgacattcactatactgaaggaccttcaagcagccacactacttgtgatcatgcactagacatccttatttttaaaattgaaataaacaggcagtcagccccgaaaacacatacagacaagcagcagtgtgcagagtgaacaggttgtatttatgtgtttaggaacatcgacagtaaatgggaaaagaggcaatgggtttgaaagagagcaaggaaaggacacatggaggaaagggcggggagagtgggaaggggagggagaaatgatgtaactataatctcaaagctaaataatttttaaagcatgaaatagtacccacaaggacaggattcctacggagataggtttgactgtagactatggaaggagaggcgtggttctcttgaggccaggggtcaagatcactgtgtctttctgccacagaccatgatgaatgtacaacgaccaacatgtgcttgaatggaatgtgtatcaacgaagatggcagcttcaagtgcgtgtgcaagccaggcttcgtcctggctccaaacggccgctactgcacaggtatgtatagctttgaggtaagaaagccaccatgactcacacagggcccttggctcatgcacaagtatactcagtatctcagtttgatgctactcattatctcttgctagtttagtaaggcagatgtctaaagtttcctaaggaaatatatattgttgagaaataactgtgtctttgcaaagtaataatggtatatgaaaaaaattaaaggaatggcagattgatttaattaagtctgaaggagacaatacagaaacaatgtcttcctgcttgttggctaaatgagcaagagtaatcaaatgcccttgcaaacttttcatttttgtatttctccaggatcggatttttctaaggtcatttttatgggcacagtatctcatatattccatagagctgatctgcagattctttgggaacatatcatcaatctaatttcatcttaatttcattaagtggagacataatttgagtgttttcattagctattttgtttatgaagcaattttggagaccaaataatttcaataaatagaacccccctggaaatactgtatgatgttcatactcacaagcggagctttgtaacatggaacatgttttgtggtttttgtcttggaagcaagcttttatttttatttcagtttcctccctcagaggaaatcaactttctgcctccagtttcaccagtctacctgaataaattaagattccttaccaagtcctatgacttcattaacatcccaggggcagtcgggatacaaagtggtacaagtttatatatagcagatagcttttgactttgcaaagaagggaactataaagtggactgggagagctacagctttggactcaaggtcagttgactgagatttagcacaggataggtgaccaccattgtactgcacaccagtttggaacttcacttgagagtttcttgggaaagttgaatgcccgtatcagatgcctggcttaacccttcctccctcctggggtttattcttcatcagctttcttactacaaatgttagaatccgtgggtcttgacttagcacttctgtatctgaggtgtgcctccgttgttgagaatctccttaatgttgggcagcttttgataaatacaagcagaatggaaattacaaggcaaatctcaacttttgttgttgttaatatgaaatgttcaaattgatgtcaaagcagaatctactcatgtgtgaagaaaattgtaaaacttggccacagatctgaagaggtttacttcacttcatttgaattagacaatattcacaaggttatcaaagagataatagaagtcgtgagactcttttttcccccctcaacgcatagagcagattttactcagcctttaccaaatgcgcttgctaggactgtattattgtagaggtcagtttgcatttgtgtgtaacactctacaagttactcagttaaaaggttgataggctagggcagttcagcaagcaaagtctgatactcagtaatggaccagcttctgcccccccccccccgggcagacgtggacgaatgccagaccccaggaatctgcatgaacgggcactgcatcaacaacgaaggatccttccgctgtgactgtcctcccggcctggctgtgggtgtggacggacgtgtatgtgttggtaagtgaggtcttcaataatggcccgatggtcccaagtgatctctgaaaacataaaatgggatatgtctacacaaaggaatagtatttgaccacaaacagaaggcatgcaaagacacgggtaagacttctctctcatgccaagtgagaggtgtcagtcacaaaaaggtgacattatattgtgttggatgttgttcagaggaaatggccagagaggccaagctgcatgcatttaatatgattgctgagcgcaagaggaggaaatgttagctaaataaagaacatgcaaatgttcctaaaacccactgtgagtgtaaacactcttaaaatgtagagttcccatgggtaaattttatggcgtataagttatatctcaataaaactgttttataacaccgaaaccctaaacttactcttttcaaagcttctgatggtatacaaagaaatggagttctgtgttcagtgggtgtttgtgttgttattaaccacggcatatgtaattgggggttacagttacatgcgtgtaaactctttttctcaaataaagcctgaagcatgaggaactcattctgtagaagtgtactaatatctaaagcttaaagtattcaagagtattcctcaccaccacgaagggagactatgagaccaaatgcacattttactctaagccactctgaactccctttggaaacacctgctgaatggatggcatgaaaatgaatctaaagggccatgagttggcgttgaaaaagcgtgtggagctttgaggggctgtgggcactccaagacctaagcagtaatgcttcggtgatgacagagagaagttaggaagatatgttaacagggtttccccttctaagcgcttctgtgagacttcagggatgggttggtccttttcatgccctctggatttcagcttatgcaggaagacagcaaggctggtttgaaggcacatttgagaaaaaggaaattcttagccatcacatttaaatactttacgtgtaactctcgaattccaggaggggtaaggagggacaaggaagggtgggcagatggaaatcatctgttctctcaaattcatcctccgcccagctgaggctccatcccagcctgcaggttgtcagcgctttgtccaggggaatttcaaacagaggccctagaagaatgtagctccttcctgtgtggaaagcccaagaagaatttttcagttgccttaaactatctagttgcttttcatctacacctaaatgattccgttgaaatcgaaagtgaacataaagctggtttaggatggagaaattattatttttttccttccaagcagccagtttatgagcatttatcacaaaactgatgttcaaaaccaagacttgattcttttctccacatgcctggaacacatcagaaacctttggaatgcttttgtgaacttttttgtccttgtggcaatttcaacattttaacatagagcatcatttttccgtgtggaaagttatatattgctattctgatactaagggagatttcatcagtcctcccaataaacagcgagaactgtcccttgttaccttaggaagaagtcaggcctatgtcttgttggaattggctctttaacagaggtttctttaattatatctttcttcctaaaagaattgagatttaaaaaaaacactttcataaaattaagcgatggttttagcatactgaagagccatggctcacagtgtaaacaggagacaaaacgaatgtttccctaccatccccacccctttacactattttgtagttgtttcaggagacagagaagatcccataatgaaagaagaaaagtcaggttatcccctaacttagcatttaggtaacaaaaaattccatgaagattttatttaatgggagagatccaaatcttgacattagaatgttcactagcacatgataattaacattcctgggttttaaataataaacacccttccaagctcagctcttcagtgagtgatggtgaaggcagggatgctttgtgttattagagtcaccctaggatggctttgcaaatatttaaagtcaccttgtgcgcctgccacatggagccctttcttcatgtgacccagtccatagacatatcatcctctgccctctgtcttccttacccacatccactgtgacccgaggctacctccttccaccatctgttcattgctgacacagtgggtaccatagcactggacctgactcttaaactgaataaaaagcccttccagggatcccatgggactcttttagtcttgataagatttaagtaaaaagaacttcaatttataacccagattatgcacttaacctttttaaataaacattcttttaagagtcagctacctagattatagatagataagtagatagatagatagatagatagatagatagatagatagatagatgatagatagatagatagatagatagatagatagatagacagatagacagatagacagatagataaacagatgacagatagatagacagaaaggcagacagatccttgactttgggcagatatgagagatctgcattaaattctctatattcaggatgggatctcaaatttatcttacctattgaaaaatttttagttaaatttcattttcagcaggttccttgaaacactagctttagaacattttatcatgttcccaagtcctaatatatttctttatagaaagttcacgttcacctcattactggttttgttgtttactatctatgtgctattggacaaggtatagaccctccaaaaaaaaaaaaaagcaacaacaacaacaaaaacaaaaagaacaaaaaaacccctccttccctcagtagctctgttgattaaatatgttattgctacatacttcacctatgtaaagcattgtacagtgtcagctcagagcaaacagataataagaaaacaatactggagagatgacccagtgatcaatagtacatagaactcttacagaagacccaactttgatttctagcaaaatcaaaggagattgtggtttttgtcaagtcacaatctcctgtgactccagacccaaggtatctgatatcttcctctggcttcatgggcacctgaacttatgtgtgtacgtgcacatgcaaattaaaaataaaaaatcttatttaaaagaaaaatagtactttttatttggataaaataatggtgtcatatctagtgtgagtcttaagagttgctgttttatgtagtgaagttgacaataacaagcaagtaatacaaaattagtattctgcatccatatgtattttgctactggcttctagaatttgctaatatactggttaaaaaaattctcaaaataatctcattttaaagaaaagataacatgctgaaatgcaatattatatgtaaaagatatgtatacctttagtgtatattaaagtatatatgtatacatatatcatgttaaatgcatatattactctggtccacacagtttccaccccagtcttgtgagtgcattctcgtagctcactgctggtattcgtctttcctattgtgactcggttacatgattagggaaatatgaactgaagttctatcttggggtccttgatcataatactgtccttgccaaagatcaaagaaatagggttgctaccccttagggctttgattttctgagtgatatttggtacctcacttaatgtttaactagcattcctgtttactttataaactacttcactgataagcaaagtgtgtagtaatctgagatagaccatctaatggagatctgaattcaggattggtgtggtcctaggcccacacaagaattatgctgctttctttcttggggaccttcttgtgtcaacggctttcagtaacttagtcaaccacacaaacttgtgtgtaatgcttttgttcctgtagtagattccacagctttttgcctacttgcttttattctttcattttatattttgactggtttagatttgtttgctcattatttttaccttcatatgtgtgagcctgggtgagcttatgtgtaccatgcatgttcaggagctctctaaaacaggtgaaggtgccagatcccctggaattgaagttaatttttcatgagggttgtggaaactggactggggtcctccacaaaagctgtaagttccattagatactgaatcatgtccccagcccagtcaacttgcttttgaaaagctgtacactgtatgttcttgttctgaaagcagcagtaacattgactacactaatccctccccaagcgctcacagaaatcctactttaagtcaaaactgtgtttctctggattagaatgataaactcgggaccctcttgtatgtggctatatgaacatctcagaagttaatggagctgtgaatctaatacatttcatggataaaaactacttgagcataagaaagcattagaaaccgggcagtggtggcacatgcctttaatcccagcaattgggaggcagaggcaggttctgagttcaaggccagcctggtctacagagtgagttccaggacagccagggtacacagagaaaccctgtctggaaaaaaaaacaaaagaaagaaagaaagaaagagagatagagagagaaagaaagaaagaaagaaagaaagaaagaaagaaagaaagaaaagaaagagaaagagagaaagaaaggaagaaagaaagaaggaaggaaagaaagaaagaaagaaagaaagaaagaaagaaagaaagaaagaaagaaagaaagaaagaaagaaagaaaggaaggaaggaaggaaggaaggaaggaaggaagaaagcaagcaagcattagaagacacatgctaagaaacagatacttgtttctaacaacttatcaacaatgtaacaatgttagggacttacaatggggactatctctgatgaaattgaccatgttctcctgcttagaaactttgctgactctctggcctttaagatgttcagaatttaaaaaaaaatagttcattgttgactccctcgtaaaactgtaacatatttcataagactagagagtgagggagtgaactactgcaggatttttaggggtgtggattggcataaagggagaagaggcaccttaggagtcactcaaacctaccgtgaatccaaacttgggtctttgagagtttgtaactttgattttttacctattcttcttcagcttgagtgacctctttcatgaggccatgtctgcatagccccttagtacagtgccagagagagagaggttgttttctttttcttatgtttgtttgtatcttaaatggctgttttggtttggtttggttttctacaacaaaacaccatgatcaaaacagcaaattgtggaagaaaggtttttttttttttttttttttttcagcttacacttctaagttgctgttcatcaacaaaagaaagtcaggacaggaactcaaacagagcagaaacctggtggcaagagctgatgcagaggccacagaggggtgctgcctactggattgctccccctggtttgctcatctcagggctaccagctcagggatggcaccacccacaatgggctggcctatgctccattgatcactaattgagaaaatgtgttatggctggatttcatggaggcatttcctcaactaacactcttcctctctgatgactctagcttgtgttcagttggcaaaaatttacccagtgcagtctttgtataaagacaggttgtcactatgtagctggcccagaactctgtggaccaagtgagccttgaacacacagagatcttcctgtctctgcctcctgagtgctgggattaagggcatgtgccaccgtgcccagctgctcattttctaaagtgtaattcttaattgagttgggatatgggaggagattaaaaacatagtcaccagcatcgtcctggggttgaaaagaaagacttcctaatttaagaagtcaaagcaaataatctcctaggcacctctcagttgcttcaaggcagtttatctgcatcgctccttagaagttctcaaatagaaacaagagtgcagtgccaggcgtggccaggacacggtgaggttaaagctcaaagtagtgatgtttgactgttgctatatcctcagccaatgaaacatctgtgagaatagtggggtaatggacacgtgtgtggcacagagaacttcggatgggtagggctggggaccatagtcgttggtacgttttcaattgtccccttacactacaaacatttgttcatttcctaaccttgaagatgctaaagatgcaaatggcagatgttccctgggcattcccaaggcagtaacctcttaggttaaagaagccttccatttcagtccctgatggtaagtccctttatctccactagacactcatatgcgtagcacctgctacggggaaatcaagaaaggagtgtgtgtgcgtccattcccgggtgcggtgaccaagtctgaatgctgctgtgctaatccagactatggttttggagaaccttgccagccttgccccgctaaaaattcaggtaactgcacatcgtaagaaactagaaactcaacagtaggattgggccaaagattatgtctactacaaaatgatttgtcttctgaattgaagaagaaagagccgggtttacattatcatataagggaggtagtcaaacgtgaacaagatctatttgctgttgtgatggtggcccagattttatacatgactgctaccctggcagtataaataggttgacatcgtacttgccagtattgagcttacaaatacaaaacaatctgattgggtcctttaaactctagacaccttatgatgtcaagcctcaggtccatcaaggttgactcttgttcattgataattgcgatgagcctctttcaaatacaaataagttcagtggggttcaaaaataaacaaactccctgccttttctctaactattcgctgatttcaaattcttgagatgatattctcaggaaagcactgatttttatcattgttaaaatgaatgtacataaaattgttattttaatgactgagttatggaatgggcttagcataacgtctttgtttttactgttatattaatggctgagtgcagagtattgtctaacttttctgtctctattgttatgctaatgagtgggtgtggcgtgggtgtggcttaacatttcctgtttgtttttgatcacacagctgagttccatggcctctgtagcagtggcatcggcatcactgtggatggaagaggtgattctgttcaacttgtgattattaaaatataacggtatagcttgctgattgtcagatgaatgtggttatatttactgtgaaaattcacaagtggataaatggttgttaagttagatggtgttaagtggtgttttccatgtgactgcttttcaatacagacaaatatttattggttaaaagtgcttccttgagaatgttactaacaatccataggcatgattttatgtgcaaattttctaagacggtgctatatcatgtgattatacagacacagttagaaaagtatccatctgtagggatatttgatatggatcaagtcttagacatactatcccaaaattaaattgtttgtgttttggaaacaccaagatgtttctgtcagactgtagaagtaaaattcatttaagttttcttattgcaaacagcgtcatgctgtaagaaacctctgatgggcaagggcatctgtgttgactagaggagaatgtttgatgtgatgttacgttttaaatgagtatctgaaaccaaagagggaggcagaattttgctgggatattttttttcctcagatgcaaaatgaaaagctagataatcagagagtttctaaggacgccttcccaattgctttttcccttttttaagacagagtctcaaagcccaggctggctctgaactcctgattctcctgccctgttcccaggtgctggggttatacaaatgttctatggctaaccaatttttgtaaattctaattcctataaacaatcattatcagaattctgatcacagtaaacaaaattggatttttgtatcacatttttgtcattgannnnnnnnnnnnnnnnnnnnnnnnnnnnnnnnnnnnnnnnnnnnnnnnnnnnnnnnnnnnnnnnnnnnnnnnnnnnnnnnnnnnnnnnnnnnnnnnnnnnnnnnnnnnnnnnnnnnnnnnnnnnnnnnnnnnnnnnnnnnnnnnnnnnnnnnnnnnnnnnnnnnnnnnnnnnnnnnnnnnnnnnnnnnnnnnnnnnnnnnnnnnnnnnnnnnnnnnnnnnnnnnnnnnnnnnnnnnnnnnnnnnnnnnnnnnnnnnnnnnnnnnnnnnnnnnnnnnnnnnnnnnnnnnnnnnnnnnnnnnnnnnnnnnnnnnnnnnnnnnnnnnnnnnnnnnnnnnnnnnnnnnnnnnnnnnnnnnnnnaggagtgagaggaggaagaggattccctgtcaatggcccccgactagagcctattgcctgtttggaaccgtacgtttgtttcacttggattcacaagtgacattgtccctgggagacatggcagtcatgtgcccattgtttgctgtaaatcactggattgtcagcagccatgttttatcatcttctgaatccattctaactcatcaacaatgagaaacactgcgtatcccatgacttagggaattgctaaatatgagaacaaagcaggaacgtcctgtgaccataaaatcatacaggccttcctcataaatttctatgttttaattagatggctgtgatacttattaaattgagttttcccttggattttgagccaacggcctgtaaattttctttattaattttgtcaaaaatatagacatactgcatgacttaattatttggttgctgccaacacctttctttttctctgacttaccagtggagtgtcttgtatccttccattttatttttctttcttttttttttctaaaaggcatattgcagttttcaaagttagatatttcacatgttggaagttccttattagatccctttttatcaacaaacaggtgtctgtgagtgttgaccatgctatattccacacagatattaacgagtgtgccttggaccctgacatatgtgccaatgggatctgtgaaaacctgcgaggcagctaccgctgtaactgcaacagtggctatgaaccagatgcctcaggaagaaattgcattggtaagttactggaggtttatacacaagggccatccatgtcgtctaaccccatggataagagaagaaacaacaattaatgagagcaacttagctcccctcattacctttgcaccatacattgatacagaagcattcgaactgagttttgcagcacagtatcaaactcaatggagtgctattatttaagataagttttacccaaatgagtgaatcatttgcccactgcttctctgtacttattttaatcctacatgtttccactgagacatggacttcaaaaactaacactcttggtaatagtaaagttggggaagggggatgctccaggttagaggaacttcagctttatccagaaaccactaattgccaccaggtgcctaaatatggcagcaaaagtaagtgtatccctttttcaacttataaaagaagataaaaaacaaaacaaaacttctgtgtgatctgcttcgagcagaaggaaagagggaaagattaacacttacagtgctttattggtttatagatttaagagactggaaagaaacaaaattgtcccacaggaaaattgactctattttcacaaaatgagaattattacatcattatatgtaatacttacaaataatttgtaatgctttaaaagccatcaattgatggctgtggataaagaaacttactattctatgtttctgctgctggctttattacccaatctatgcatttgaccttgagtttaagatatatacagatagacttctattactctctgactattgcatatttaaataggttgaacatcagtaggaaagggtaccagccaaagattctcaaacagttctaaaagcatgcaaacatgctagaggaccttgtcgagcactcaggttcaatccctggcaccacagaaaccaaagtgtggtgacacacacctataatccagaccttgagaggcagaaggctcaggaattcagtctcacggctatcgtagtcccaggccagcccgggctggaaatcctgtctcaataaataaataaatatgagctaaaccatcttttattcagcagaagccaaggcacttccagcttagcttctaagttcaggtgagtgtgtgagtgggacccttttaaagccaggggagtcctgtgaacattcccgctccaagcacaggtgacatgtctgtaacactttacactgtgtggtttttgttaaaatgtatacatgatgaagggcctggagagatgtctcagcaattcagagcactggctgctcttccagaggaccagagttcagttcccagcatgtacatggtggttgacatgtgatgccctctgctgacctccctagggactgtacacacgtgccacacattcatgcaggcaggcaaagcacccatacacataaaataaaaatatgtgagccttatcaaatggttgactcatccttttcttacccatttctcaaggaattggactgtacccctcgctaagcatgtgccagagtcctaaagcacaggatgtgacctcattttgggatcacttttatcttttaatatttatttaattttttgagaatttcagatgtgcatactgtggatgttgatcataaccacatcttctgccccttccccagcctcttccacactcaccccttactctctccctccttccaacttcctgccttcctgaaaaatgaatcaacaaataaatggttgagtccactttgtgcttcacatatatgcacgggtgtgtgatcatccgctagagcatggttgactcactgacctactagaggctatacccctcgtagaaaactgactgggtttgtacaattctaatttcaaagtacatattaaaatatctaataaaaattgaattgaaaaaaaaaagtcagactcggagcaaaacggaaaagtggagaaaactcaagcaaaacagaaaggtaattctgcctacagtaacaacatttgaaatcattttctgatctccattttcagtattatcagggtgactctgtatcatttgacaaagtgcaattgttcgcgagagtaaaattagcaaaacgaactctttatcccccaagtagagttactgtttcttccacttggtaattatacttgctgataagaaggcaatgtaacacatgcctgtaatctctgcacactagaagtgaattcaatgccaacctgagagacatagtgaggtctgtttccagtaaaacaaagccaaaaaagaaaagaaggaaggaaggagggagggagggaggcagggagggagggagggagggagggaaggaagagaaggaagaagaaggaaggaaggaaggaaggaaggaaggaatagtgagcaactaaagaagtaatgagcccttgctaagtcctgtgcattttgcaaagtcttgagaagatttttttaaagtattcaccagcataagaacatagcatttgaatagcacgtggtgtgtttgctctagtgtggtctaaagatactgaggcagagaggagagagggagccagggaccaaacaaagaaaagggaagcagaagtggtctgtgcattacgcctttaaccatttccatctcctgtcttccactggctgcttgcagacattgatgaatgcctggttaataggctgctttgtgacaacggcctatgcagaaatacccctggcagttacagctgcacgtgtccccctggctatgtgttccggacggagacagagacctgcgaaggtaaggacagtgttccttgactccggcatgcccttacccaggaagcaccaacatcagtcatagtgaatgagtatgctctaaggacatgtgtgaatgaatgtcttccctattttatgatctctgttcactgctttggaagttcaggaaatggcattcatataaacacagtttataaacaaatgtcagttcgttctgttcacatagtctctcaacaagcacttagaaaaaccaacagatagagccatattgtttgactcgttaaaataaaatatctgattttgttcatttggttcaccctggaaataaaaatcgctgtgacaccttaacctacaaaccttcattccaaaaagactcagttgttagccactttattatgaaatagatggttaacagtgtcaaaatcctgacccggaaaaatatttggagcctatgtgaaactaattccatgatgaaatagatagtctataaaaagtatcatttctgtttgacaagttaaaggatgttatttggatttgttcaatattttaagacttattttatgccatgagtttctatacagtgcaagttgcttgagccagttaacggcttaaggaaatctctggtttcagtgagattcagcttaggacatgagtgcatgaagctatgacatcagtgcataaggctgtgatatcagtgcatgaggctatgacatcatgatttggtatcttgatcacatggtatttcagaataatctgtttcttaactaccattcactctcctcctgtagtttctttacattctgtgggcctgcagggggctcctataatatgctcaaactcagttgctacttccagatacttcgatccttcttagaagggggtataaaacacccatggaaggagttacagagacaaagtgtggaacagagactgaaggaaaggccatccagagactgccccacctggggattcatcccatgtacaatcgcaaaacccagacacaattgtgaatgccaacaagtgcttgctgagaggagcctgatatagctgtctcctgagagagtctgccagtgcctggcaaatacagaagtggatgctcacagccatccattgtatggagcacagggtccccaatgaaggagcgagagaaaggacccaaggagctgaaagggtttgcagctccatagaaggaacaacagtatgaactagctagtatctccagagctccctgggattaaaccaccaaccaaagagtacaaatggtgagactcatggctccagctgcatatgtagcagatgatggcctaatcagtcatcaatgagaggaaagtccttggtcctgtgaaggctctatgccccagtgtaggggaatgccagggccaggaagtgggagtgggtaggttggtgacaaggaagggaggggtatgtggaggggggctttggaggggaaaccaggaaaggggatagcatttgaaatgtaaataaagaaaatatccaataaagaaaaagaaagggaaaaaaaaagaaagttcatattaattattgcagaatacccttcccttttctgtgggtgtacttgttgctcggtgactccacagtcgggaaaagtacaatagcgttaggatgaaaagaagaaggaggaggaggaggaggaggagggnnnnnnnnnnnnnnnnnnnnggttgcatcagcttcatctttaacttcaaagcattcttgtggacacaaacaagttgtattgaacaagatgctgcaacacagaagtctcagctgacgtcaatagaatgcaattacagagcacagttctaagtttgggttgagctgtgtgtgtggagaggaacctttgaaaaacagtaattcaccaaaaggtgtgggggtatgtgtgtggaggaagatagtcatttacgtaaaatcacattttcctaaacttaactgaggtaactgtttacccatggatcctgggtactgagtccatggcccctctctaccagatgctcacagggttccctaagagtgagggcatctgtcagtaaagccagcgcaggctcctcagctatgcatgtgacagttgctatctctggtctctggtctcactcctaacacccattacccttcaacattgctctgaggaaagtttgtctagtcagatttccctgtattgtccctgtccccccacacctaccccacagagggatgtggtaagggattgctggaggtttttggtttgtttgtttcggttttcctgggtattcacactttctgctgcctttagccattgtaccaattcagttctctattaaagggtaggttcgtctaaatctcgggaaacttaaaaagcaagagcagatgagatatcatctcatttagctcagtactgtccattatttggtccgttttcccattctgttgaaaccatacattctggtaatcacttgaggataaagtggaaaccgggtggttggggtctggttccgtgatatatatgcggaattgtcaaagcaggttagatggagtccaaggtactgagaggtggactaccaaacagggacacgacagaatgacatttagtcgtgaaatcttgggtggccacataaatttgaaggaacttccatagcaaatcagccaacaaggaaggttagagagacatcttgacttattttgttcaaaggacacttgctcttaacaaaccatctgtgccattcatgggaaagaagtttgtgttgtataaataaagatgaaataatagagaaatattttggccccaaccttatggtgttggtggacataaaacaaaacaaaacaaaaaaaacagatttacacagaaaacttgctccccccaaattttacattctgttattcgaatttcatcaaaagatttctcctaaatactatgtacgtacaaacccacaagctgttcagctcttctccccttgtgtctcctgacgtcccccattagccacagtcaattttgtcagcctgagttctctctctactctttcttcattaatttccaagggctagacagagaattattaccagcatcaatgcaaactttgacttcctgtatttatattttctctgttcgcttattctatttgtaatttgtgttttcgatggattaatttaaatatatataataaacaacagtaacaataagcaggatgttcctctgtgttttaggctgaagttaccaaaaaaaaattatttcatttttcctgagcttggagagtctgtgaaagttaaattttttacatcaatcgctgtggtttcgattgtgtttccagtgacataactagttaaatgtaaaccagatgtgctttgaagtttatttccagaaatgtacagtgaactgtttcaatttctggttccatgacatttataccataaaaaaatatatatttaagggaaaaactgaatagctgatatttgtacttgtccctgtatgtgttttcagtctttgagttcaccattgcttaattcaaaatgaatcttttaaaactatgacacaggcacttgtcttttggggaaatcttcttacacatgaattcattggagaattaaatggggaatcccctcagacagattgcctgttcccggcacatctagtttctttggctcttgccgaatattcatggaaggatttcaatgttgtagagcatttgcttcattaaaaaggcttacatctgaattagtgtattattaggaagacttttatttctcttataagagtctttttctactgcaagcactctgaaagccaaatgtaattgtatccctgcaccccgataatttatagttcaagaactaaattaacacctgagcacctctttagtcattctgaagtagcaataatctttctctatatagtttttttttaattaaaatacaactatataattctcaccttctctctcttctccctctaacaccttccatgtacttgtttctcaagctcatggcctctgtttcattgttgttgttgttgttgttgttttgtgtgtgtttgtgtgtgtgtgtttctaaatataaaaatataaccttctcagtccatatgttacttgtacatatatgtttttaaggctgaccacttggtgtcagataatcaatcagagattcttcctgactctcagagttccttacatgcctgtagttctttgtttacagttaggctcccatgacatttccctctcccatattactgcgtctttggtccttttacataggtttctgaattgctattttaaacctattagctggcagtcagttctgagcctgccccccctttcaggaccggtttatttacattttatttgagatagtcaggggcaagaattagagccttccggctttacttatatgtctttgtttcggtatttaaagaagagaagggtctatattaaatctaaagctatgtatggagggcagtgtctccttggaatctcagaaattctactgtttagctaagagtgttgaggcatgttgacatgtttggaatcacttagctagtagggatgggatctcaatgatgactcttggaagctgagtagttgagtttgtataggaagtgtccttaacgttattcatattttaaccgagagttgtgtttgcctcttagtgagtcatgtgttaagtgactttagaaccttgagaaagtcacctcttaaaaaaatgtaggctgatttctgaattcgaggccagcctggtctacaaagtgagttccaggacagccagggctatacagagaaaccctgtcttgaaaaacaaaaacaaaaaacaaaaaacaaaaacaaaaacaaaacaaaacaaaaaaacaggtgtactgtgattctttttacttttgtcaccaacaggatttgcttactggtatattgtttgatttnnnnnnnnnnnnnnnnnnnntgcttactggtatattgtttgatttaaggctaaaagccggtagtcatcaagtcctaattgagtgcaattaattcttcttcttttttctttttttggtctttggtttttccgagacagggtttctctgtgtagccctggctgtcctggaactcactttgtaaaccaggctggcctcgaactcagaaatctgcctgcctctgcctcccaagtgctgggattaaaggcgtgagccaccactgcccagcatttttttctatttctaatggttctgaagattgaatttagagcctgaggcatatgctctacctctgagccatgcccctgcctgagccatgcccctgcctggagccatgcccctgcctgagccatgcccctgcctgagccacgccccctcctgagccacgccccctgccactctgccccagcactcgttttcctatatcgtatctgaccaaacttgtggtgtaaagtaattctttaactaatcacataattaataaagggctcaagaaagagaataatgaatgacagctggggagagttctgtagcctggattgatatcccggttcttatttcttggtatgcctctaagagttcagaatgaaagccaatgttggtatacgtttgtcttcaaagcttcgcagaagcgtaagtgacagaaatatccaacccttgttgtgccccagagtcgtacctggagttagaacaaactacagagcaaaacaaatcgactatatacagttagagtcatagaagacacacatactgaatcatcttccgaatagactgttgctaatacggtcctcctgagtctccagtcatgtcgagggctatctgtgctgtagaacacatgtctgccttccctattcactttaggccctgtatatccatattaaaattataagagccaagtttaccagacgttctggcacagtctggcttgcctggaataatattttccagaaacacatggcagctctaatggaatttttttccttctggattgtagatgtaaatgaatgtgagagcaacccgtgtgtcaatggagcctgcaggaacaacctgggctctttccattgcgagtgctcgcccggcagcaagctcagctccaccggactcatttgcatcggtaagatccccgcacggatctccctgtgaccgtctctcatgctcttgcctcagcctgaggtgcaaacagagctgacggggaggagagcagaagagcagaagctgggcaggctttaaccagttaggctctagagcatcttcctttcgtgtctgtagatgcatgcacgctgccacgactgtgagcatttctgtgtgtacacttttcttacgtctgaatcccttaggcatgcgcacagtcaaatcccatcacagaaactttaaatctgtcgtgatgaaaggcatggtggggtttggattcagttcacaggacaagagtttgaagatttttttaggcactgaagcatagaaggagttcagtattctcctttccctcgccggtcgcaagttggtagactccagagaaagaaagataagtgctctcttactttggaaaatctctaggtgtgataatattttgctccaagatgggattttgacatatagcccaggctggcctaggatctgatggagagcaggctgaccaagaattccatgtaattcctctgtctcagcttcacaagtcctgggatgacgggtatgggccatcatgcctgctcaagtccaggtcttggtagtgacatataatgtatgcagggtaagataatttgatcaaagatgtataccgacaaggtctacccaagtcatttctttctatgtctagtggcagtggctctatttaccaggcatgcccagactcccatcctgcctagaatccacctttaaaggaaactaattcttctgatgatacttggcttcacatcgcaccatataaatgggcaagttcttgcttactatctaagcaagtgaattcatctctgcttgttgtcctttagagttactaatgaaacaatgatgtttattgagtcattttttttcacttgccaacaactgaatgctaccacattacccacacagaaactttaagtattttcattcattatgataaaattttgagtatttccgttggttctctttccatcatgtgaatctcagtcaggtcaccaggcttgtgggcaagcacgtttgtccaccgagccatctctccagccagccttgaacacgttcttagtggggctgttggtggttctgaccagtgatgagcctgccgctgctagtcacaggatctgagtcactaaatttgtaaaggaaagaaaattctactttgtggttactaattaaaagtcggatcatctgtgacttcactagggtactaaggctggctgcagagtttgagttagtcctacggatatactaaatgtgattttgtgaatgctaaggagactactgtatcctgggtagtgttgttcagctttctaggacagtgcagtaagttcatcctacagagttgtgttgctctcctgggttagcacccatatcccatgggcctgcactcttgccccatgtccttgacttctgcggacagaaggaacagcagcttccctgataacaggtcccactgtttatccctcgtggtagattataaagtcagccactcactttctcaggatcagcattgtaaacatcccaactgcaaccattttctggctcctttttccccctaatgtcttttgctctgttcttctcctgacccccagcctgcagtgtaccaccagtcagcccttgatctttttgcactcatgcctagttgctctctgcactgcttctcagttccattggatccatcctcacctttctattaatcccgggcttgtgtctccgcccggctgcagccgtttctatgtggatgtctctggacatctcagcagaagatgcctaacaccacccgattctgagtttcatacttgatcctgtttcctagaaacatttttgtcttggcaaatggcagccccattcttttcattgccaccccaaattctcctcttcaaccttaatggcttactcccaaacctcacattgaatacccacgacccagttttcaaccactctttacccccactcattatttgtcttctatttttaataattcatttaggttagcttagcacagcaatatatttcatcacagcatcttcatatgcatatatcattatattgtattcttatgcatccccctgtctctctgacctcccttgctagaccccatcaccttccctacacaaaccggttccttctctccccccagtcggccccccttcttatttcctgttatatatattccattactgtctttatttgcccctctctaaagatctatttctccccactcatgcttccctgtctagttgggatatacaaacatgtatgtataaatatacacacatacatatatacaggtgtatatttcaatctatgttgtgtatataatatttgtctttctgagtttgtttatttcatttaacctttccaattgggtttattttcctacaaaagtcacaaaatcccattatgtctatgtgcatactttctgtatgtttatctaattctgcctgccccctcacccagctcctcccatgtcctcattcccatgtcctcccacactctcagctcctcctacaccctcgtctccgcctatacccttagctcctcccatattctcactcagctcctcccacatcttcactcagctcctcccacacatacccagttcctcccacactctcatccagctcctcccacatcctcaccttctgcccacaccctcagcttatattttgatattcctaaggtgtgggcaacgatatgtgcttaagagtttattatcagaatcgtctgaggagaatgtcaagaatgcagatttctgacctgcacacctggacctatgaattaattaattaatcaaggatattgccagtctcatgcacacttggctgaactctgagttctccagagaaaactaggaatgtagctgtataggcagttagaatttgcatgtcagtcaatatttaacgtatgccatatttaaatacaagcacatgtcagtcttttcaaagaacatgctataaaaatgattttaagaatgaatactctggtgccttttcacactgttacatatctttagcatgcacaagagttcattgtctgccgagagaagaacttctcaacctctcctattcctttccagacagcctgaaaggaacctgctggctcaacatccaggacaaccgctgtgaggtgaacattaatggagccaccctgaaatccgaatgctgtgccacacttggagccgcttgggggagcccctgtgagcgctgtgagctaggtaggagcctgaccagaccctccgacttggccactggaaagtcctctttaaatcaacggtcactccttctcacagtgtgtcctaagtggtggggaaaacggctaggctgtcttctctccaaaactgtcttcccaggaaaattcattctcctcttgaaatgtatgtttaacagagagcagatcctctaagtatctcagatgtggagaggaaattggctcaaaccttatgtcctcatttgagtgtgtcccagtgggatgtgatagcctctcccctgaggttttgtctagctcgcttttaagtcagttgccaatttgaacagagatgaattgtaggagaaatcatttcaaactgtgtccacactgatagcgttaccatagcaactgaagtgctttctgaatcaaagacaattggtcctaggtctttgcgaccccactttaaatttaattccctcaccctgtttcttgagcctgagactcatgtactttttatatatgtatataaagaagtcaaatgctgtcctgctgttcttacagatgcagcttgcccaagagggtttgccaggatcaaaggtgtgacttgcgaaggtgggtgtgacgagtgaatggaatggactgctattttacttgcgagttgctagtcactgttctcaagacaaccttgagatttcaattttaaaaatcactccgtgtaattaacacgggtgcttaggaaatagctttgaggttcccacttctcttctttatacagttgaggaaatttcataaggaagtcccccagccttccaggcacagaacagctggcgagggagcacgtctgggctacacttttatggaccagcaagactgcggtcgtctgcacagctggtgcccaggaaagctggtggctgccttgtggaatattttttttttgcttaaactcaagtaataatccacactgtgttgcagattgaacacgccacacaggaaatgaggctacacctgctttttctatttgtgacatctttacctttctgcttactgcattctcccccctacagacgttaatgaatgcgaggtgtttcctggcgtctgtccaaatggacgctgtgtcaacagcaaaggctctttccactgtgaatgccctgaaggtcttactctggatggtaccggccgggtgtgtttgggtaagatgagttttcctgtctatatgccttgagctaaccatcagctcttttgtcctttggatggaagccagtccaaaaccagaaactattcttgaagaaatggctttaaatgagatactgtttgagggagaaaatatgtgttttatatatgtttaaatgtgtttaaatatatgtttaatatatgtttaaaatagtttaaaacattttcatgactaaaaaatatcatttaatccttagtttctgatactttagacaggttgagttattcatatgaagttaataggagaagaaaactaggcatagtttgaacctagtatttaaaacattatcatataccagcccactgcagctggactctccagacaaagggggaggggcaaaggtatgtcaatcatcctgctccctcctctgccaccattaaagggcagattttcttagtgcttttttttttttctaaagtcactatcaacaatgtatggatggtggtttggccttaggctttttcagggccgtagctgaaataatttaagtttcataaaatggaaaaaaaatgctctcctttatttcgcgttatatatgagcagaaagttctttttttaaagactacttttcccaataagctctggaatagtgaagttgtagtttgcaaaacattttttatgtcagcgttgttgtgtttggcacttaagaaggacagagaaggaatagtggtaatgccatattagacagtcttcaagtatttaaatgtatcaataatatttttccactactagtttagtagttaactccgcagtactacagagcttaatttactgtaacagagacttcattttaagttaatcttgacagcatatttaagtctggatagaaagcagtattgtggttcatatggaatcatttagaaagcacatattcaacatggaaatttttttttaatttggttgatttttcttcttgtggatgtgtgcatatctgagtgcttgcatagacattggtacacttaagagtcgatcacaagtcaactctttcttctcaggttctctccaacttcttcttgagacttgatctctcactgatgattctagagctttccatattggctagactaggagggcaatgaacaccccgccatcctttgtccccaccactccagagctggggtcataggtattcaccatcacacatggcttatactgagattgctggaaatctaagaacctcattcctgaacagcaaacctttgcctgactgacaacccaaatactgccttcttgagcctcttacttgatgaaagattttgttctttctaacttgttctaagttgacacctgctgaggatgtaagaacatttcagggggttggtgtgtggtagtgtgaagatgctaaggactggttagtgataagccgctgcattagagcttcatataaaataaggatgtcatctcaagcgtttgcaggaggtaagctgacataattgagtgaagcacaataggagcagaggggattgtggcaaactcccaagcccacatgccatcgggttcaaaggttctattataggttttgcaagccagtcaacgtgtctactttggttttgttgccctgtgccctggctatttcaattcttggtgtaaatactgatatgaatcttcacaataaagatacaaaattactcttctcaaatataaaggcttcttaaattcttggttcccataacccatggttccagtttatcacagaatgacttctgagcagattacttcagtggccctcgggccacctgtgtgtaattaaaatttagttattaaaaccttctcatctcaggaagagtcctccttccctagtggcagtgctgggtgaagccaacccagagatcagaactagggaagttgtgctaatgagactttgagatatggccaagtatgtggcttttgcttcctattaatgtagacagactacatgtaagactcaaaatgaaacattaccatgctccgtcttagttttgattcttggaaatgtgtgttacacaaggttagagacagttgtagaggttgctgcgacctttgattgagaatgtgaaatgttccacatggacaactgaggagcaaacttatctcctctttatagtgacccttctgtcaggatgctctaacctctgtgaagccgttttcaagcttcatgccatgcctcagaatattttcaccaaaatcattttatttagctatgaaaactctttttctgagcctgttattctttttttttcattagacagtgtgtgaccataggtcccccatctctgttgaccaacactagagcatattgtctgtagatcatactggctcaacctctttatggctgttcattgctgctctgggtctctaagtaactcaggctaagcactaacatacagtttggtacagattgaagttaggaggaaaatattcatttaaacaaatgatttggcccctttgtggtgacgaattcaacatgcctatatgactcaggaaaactcaaatgcaaaattcataacaatagaacaaaacccaattgaagtaaaaacatcttgttttagtaagttgcagatggggtgcagcaactattattgttcataattagaccctaacaagactgactagacactaacaatactaactagaccttaacagaactgattgggccctaacaggactgactaggccctaacatgactgactaggccttaacaggactgactaggccctaacaggactaactagactctaataagactgattaggccctaacaggactaactagacactaacagaactaactagaccctaacaggactaactagaccctaacaggactaactagaccctaacaagactgcaaaattactttaaagtcgtgacaaagaagaatccatcatcgaaattactgttctgatgtgaaaaatgtaagagtgagatcatgggccaggacatggaagagtcatgtcatcacgagagcttttcggggttctttgtgagatttaagtaatctcttaaagagcccaccttcactctccctacctgactgttaccatggagtccattcaaggtggtgacaaactgatctctcacttcaagtctgtctccagcccaccgtatcagtccacttcacccagcatggccactgagaaaggaagagtcctcggagatgtaacagtgttagctaagtacaggtagcctggagcccatagtttccgaggcactaagcagggataggatgctcagtgagtgctcccgctcagctcatgctcagactgcacgtgtgctctccatgcagatatccgtatggagcactgcttcctgaagtgggatgaggatgagtgcatccaccctgtccctgggaagttccgcatggacgcctgctgctgtgcagtcggggcagcttggggcacagagtgtgaagaatgtcctaagcctggcaccaaggaatatgagaccctgtgcccgcggggcccaggctttgctaacagaggggacatcctcactgggcgtccattttacaaaggtaagtgagtacaagctggtctccgacccgctgtagtcacagggcaccctctacgctctctgagcattggttaagttttcaacatatcattggtggccaacctaaggtccaaaactataaatgacatggacaaagtggtatggatacaggctgggaaatacaatggtgatcactctgtctctctgtctgtccttggacttttcttttgacatagcttgaggagaggcaactctgcctactgcctcagcagcagagagatctctgtccccacttatctgtgtaagcaacagccagatagatgggagcaaaactcaggtgacggtggagaatctcttccatggtggacacttccctgtgccatctctgtagtcgttgccaacctggggagctgttcctgtcaatgggtgcgtggttactgtgtatggccatcaggttgtaagtcaaggtgatggaggtgtccatcccctgtcgaccatctccccagtcgtccttccctctgcttacagatatcaacgagtgcaaagcctttcctgggatgtgcacctatgggaagtgcagaaacacaattggaagcttcaagtgccgttgcaataatggcttcgccctggacatggaggaaagaaactgnnnnnnnnnnnnnnnnnnnnnnnnnnnnnnnnnnnnnnnnnnnnnnnnnnnnnnnnnnnnnnnnnnnnnnnnnnnnnnnnnnnnnnnnnnnnnnnnnnnnnnnnnnnnnnnnnnnnnnnnnnnnnnnnnnnnnnnnnnnnnnnnnnnnnnnnnnnntctccccttccccctccccctgttggactttaaagccaaataacttagagcactacaaaatagcacaaaatgcagttatttgtatgtaaaaataatgatcttcaaaatgtatgagtactaaagtagagagccactaagagcctgtgcctgttatatcatatttgaggactatgtcgggtattgttttagttagttagagacatgtttcgacttcttttcctcacctgcagacagattcttacccactttggattgaaaagagacgaatttaggaatgtttctgtttgacgacaggcagtttattgcaaatgcttgaccagtgttgccagggatttctgtgcagagttgccggcatccgtgtatggaatgtccaggggtagacgttccccttttctgacctctcacctggcccttcttcagcatgcccattaaaatgtctctcttgcctgcttcctgaggctgcacagcctgggctaggcctgggtatttcagttctgctttgtcttgctgctctgcccctaagccttcatcccccttaccatcagtacctgtcctctggaatgccaacattccagcagggccctcacagctgcttagcaaactcccactttagcttcccagagcttttgaaacatctctgtgcctctgaactattgacataccttcatagctctcctttcttcatgactgtcccaggcatcctgttctcatggaagtccctcttccaccctcgcccctcctccagtgtcagagagctacagtttctccctgtttgaagtgaactcctgtctctccagtcctctccactcctgctacaggataagtctctgtggccttgattattcaccctatcttgtcccctcttccatcttccttttgcacacattaaaggaaattcctcggcccctgctcccctgcctgcccttgcccccatctctgcctattctcctagccagctattcatttcacagttgtgacagttgacgaagcatcttgaccgcagcctaaggtaacatctcaggtgacatctgagagcattctgccagctttgtaccccaggagtacaggaagaagagagcctttcctgatagatctttgtctacatttcagtcgctgctatttggcagacataccagtgccttctcgtctattgaatttccacagccaaatccttcatttttgcaaccatgagagttttcagcctgcccctcaaaaaatgccatttttgacccagccatcctggacctgcataggcaaagcagttgaggctcttccagctctagccttagctcttgtttgtaatgtgcagttagacaagtttcttaatctcagaagcaagcaccttccacaataggagatagttattagtagcactgccttgtttaagagcagagaacaaatcccttccaatgctattggctcccattcttgttagcaggtggcattctgggtaatcaggaccatcctgcctacattgtcagcctctgcagccaactgctcagcaacctttggcttctggaaaaaaaacagtcgccactcttctgtgtgcttgtcgctgcctgtctagttattacacctcttgaaagttagagtttccatacaaccttcaggttcagttcgaaagccttgcctttcaaaacgccagcttgtagcagaggatggcttgtagcagaggatggctagtctatgtgcagcggtggtgtgtatgtgccagcagtggtgtgtatgtgccagcagtggtgtgtatgtgccactgttcttgtgcttgcttcccttcatgctagagatgagctctgctatagataagaagacaaagataaagaaaatggttgaattttccaaatccccgaaagatgaaggactgggctgtccttgggcaccttgtcatagagcctgtaattctaccatgtggtgctctcaccactttacatttaccgaaactgtcccctgcttatcacaggctttattctgttcccctgaggatgctgaacggcagtcaccagaaattgacgggccaattgtgtcagtgaggtttttgtttaagagaaagcactttggtgtcctgggtatggctgataactgggggaaatcagtaaaaatgggaagtaggaactgtggctgatcccaccaaagtaaatgtgcaagttgcccattgatagcctatacaaaaagacttccatttcaactcaccaagagacagtgagcctggtgtgccagcatgtgtctttaattcagcagttggcaggaagaggcaggtggatctcatgtatgtagttcctcatgtatgtaggacgttccaggccagtctgagacacagtaagaccccgccttaataaatcaataaatattttaaaatgaaacaagacagtggcagacacatttatttaattgttactttaaaaaaatatgactcctattttcttaaatatcttttgtgtacattcaatctctgtactgaaaatatgttacaggtgtgagaggtctctccaaactttctgagagtgcccacacactattaatgattctaacagtaatataacaaacatagccaaatatgagcacataatttttctttatttttagaaagtcggataggtaagcacttctcatccgactgtgacacagatcccatgacaggttcatcccagggccctgctgtgtctgaacgctctctgactggaggcgtgtgctatggctgccttggaggctgcctctctgtgtccctgctcagcatcagtgtccccggtccacctgctcccacccttggctggggtagcagaatgaacactctccatgccttgctatggcttcctcccacatgagcacactgcctcctcacatagaccacaagggagtggcgggatctcttctctcttactacatctaagccacaaagagaaggccacatttcagaatttaaagacccgcaggccccagctgccggttgaccatgacagttttgacagttggagaaaggaatgtgcctgctgaaggcctggtcccctccaccctgtctcttcagaacatttcttgctgctctcaaccctgatttccctaagtctcagatgtgcagtaccctcccctagaagaccccattcagcactctcttatttccctctgtatttttcttttttctttttgaaatcgggggcagacattgatgagtgcaggatctcccccgacctctgcggcagcggcatctgtgtcaacacgccaggcagctttgaatgcgagtgctttgagggctacgagagcggcttcatgatgatgaagaattgcatgggtaagcgaggccagaccctcctggctggcctggaacctgacaactgtatgctcatcttctgctgtgcctctgctgccttcagggctgtggcagcacccttgacagggtgtgtgctgagcacaaaggcctacaaaatcccttccctgggctggaagcagcacaaagactacccaggatgcatctatttaaaatggataaccttgtgctgtctgcaaatgtgtattctgccttgccagttccatgagaactgtgtcttatagttgtgatattgaaaaatgtttgggtcactatatcatgtgagtgacttatgtagttggattcaagctataaacactaaaatgaccgagaacaacatatgaacccaagtctatggtgatatataagggaaaagttatatggatcacctcttaccagccattattttatacatgaacatttttcaatagtttactatagtaacagtagaagttacttaatttttatattgaaacaagtaaagcttatcccgcttctgattgggtgtgtctttatgtttaaggcacatacctaccttctaacggcccttctcccatactagatgtgtaaatatattttcctcagggtgctttaatgaatctcacgtttttacctttcagacattgacgaatgtgaacgtaaccctctcctttgtaggggtggcacctgtgtgaacactgagggaagctttcagtgtgactgcccactgggacacgagctgtcaccgtcccgtgaggactgtgtaggtgagtttttccccctttggaaaaaaaatccagtgagcacagtgggtgaaaatcaggagttacctctagtgaaagcagcgtcctgtggctcacaacaacctggaaatctggattcccagtgtctgttttctagaatgttgggcgctgggctgctttccatggaaagacctctgtgcaaggtcatagattccatggtcccggcggggttgtgagtaagctgcccaggtcactctctggacagttgtcctgtctatatacctgttcatcccctgttctctccctgcactgtcagagtacatgtagacccagttcttcacacccatgtgtgaccatgaggacccccttggtgcttcatggctcctcaaggtctcctactagaaccaagttcaggaggtgactggagtgtgcttgggcatttcctcgttccagctgctccttgtaaatccacacagtgtttaccacgtcctagtacacttgctgttcagcaaggacgtagcctgggggcatcgtcttcaggagaactcttcctgagaactctttgagcacagcccttcagtgcacacacatttatttacaagccacatagatttctgtactggtacataaaatgaaccttaaataatacactaaacagacattttcagaaggagggatttaaagtcttaagtttttttttttaattttgataacagtacaaaagatgattttacactggtgatttgaagaattcatagctggacatgctgcagtatagagactcagaaaaccacacctgaatctacttttgttgttacttagagttcattaaccttatggctgaaaaaatttacccttcaaaagggcaatatatattataaaataaatgctttgaaatgtgtgtacttgataaaaataagcataatttatataacataatgtttaggtaactgtgtgagtctgaaataatttctttttacagccagttactgtctgtggtcactgggtctgacgtacattccttcagacgagcatctcacatatacaaatggatcagtctgacattttctgggtgttccctaggaatttactaattccacatatttttgcatgacttttttttaaaggaaggtatttgacttgtaaaggccaaattgctttaaactaagagttgtggactgaaaatccacatatgcagtcacataaacacctcagtgaaaacacacatgagggccttattgtcatgcctctgttccctggaacaggtatcttccttcgggatagtttaagttgtaagggccgcacccaaacagctattagagactatgtgggcacaacagtataaacccataaactggttataagcttcatttgtgggcctacactatgtccatgcgctctgacatagcaacaactagctgccatggctatgtaattgtaattagaatcaaataacattaaacactgcacagttgtgtcacatccatttcaagggctagtaaaacactacagatccatcccagaaactctagatggagaagggaatgcttccaacacgagagaaagatctggtgtcagtggatagagggcctaacattttcactgaatagcccaggttagccactaaatagccgaggttagcctgtttcctattcaggctgcccacctctttggtgaaacctgctcttaaaggctcttgtgattatgccctggcataaagcatggctctgtttgcctttcgcagatattaacgagtgctccttgagcgacaacctctgtagaaatggcaaatgtgtgaacatgatcggaacttaccagtgctcttgcaatcctggataccaggccacgccagaccgccagggctgtacaggtaagggctgtgggctactccagtctgcatttcccatctctctgaccaccaagtttcctcaccaaatatatcctaacacttacaggagtcccttgtactataaatgaatgtgagcagggggtccagaaggttcgttggtgttttgcagaaaactcactgaccctaccataaagaaatgctccatacaccatcgctatgctattctgagctcgttccttctcacacagtagactaaatactacttgaaaggaagtaagggggatttaaggaagaatagcggtttaatctttaagcgatacaaatagaaatggcaacaaacccaaagcaaggcaatcatcaactaaaagaagacgcactggccgttgccgtgcatccgtgtggacttagcatttgacacgcttgtgtaatgtctgcgcagatatcgacgagtgtatgataatgaatgggggctgcgacacccagtgcaccaactccgaaggaagctacgagtgcagctgcagcgaggggtacgcactgatgccagacggacggtcgtgcgcaggtatggccaagatttttttaaaaatgcatttcatggatgttctactaaaaacgtggctccagactttgtccagtcgagctgagtggagaaagtgtatctgggaccgatgaaagccattcctgctttgaccggaggctacctttgtgtcatcagatattgatgagtgtgaaaataaccccgatatctgtgacggcggccagtgtaccaacattcctggggagtatcgctgtctctgttatgatggcttcatggcttcgatggacatgaagacgtgcatcggtgggtattggaaaccaatgataatttcctttttattgttctttctccttgagaccttcacacagagtggaagttaccccatctccatctcttcccatatctcttcaaacatgtctctctcccaaccttgtctgtttgtctttggcctctgagtccagtttgtgctatccatatgtgcatgggtgtagggacatccactggagttcagaaatcctaccagtggccacaccctccaaaaaagcaatggttcttcctccctcagcaactctctactgacccgtagttcctcagtagaggctgggacctctaaatggcccatctcatctatgctgccactttagctggctcggtcttgtgcaggtcttgtgcaagtaaccacagctgctgtgaatccaccttacacgcagcacttacacacacagcactcctcccaagcaaatggtgacttgatacatacaggaacacatgtaaacatggtgagaaggctttctcagtgttactttgaaattccaagccattttgccagaactgcaaaatctgagaaggaagaattcttttggaaatccttaaagacacatagttagtttgcccttcaagacaaatctttcaagtgaattgtattttgcattttgtcggttcattgcagccctgtgctaacattcagtttaaaaggtggtttttaaattacggtgatagagacaaaggtaactggacgacacaatgcgtttttttccagatgtgaacgagtgtgacctgaatcccaacatctgcatgtttggggaatgtgagaacacgaagggctctttcatttgccactgccagctgggctactcggtgaagaaggggaccacaggatgcacaggtaggatccccatgcccgcctggcttcagcctcagggggttcacaggctagcatcattccagcattcaacatcccaggacccagtcaaccagaaaacacctgccagtgtgaggagtaactggctcttagctatgccattcactgtccctgaggtgccccccccccccccgcctgagccaccctgcagggaggaagtagtagtgaacccgccctgcttctggttgatcttgcagcatcattaagtttctcggcttgatggcagcccaagtggaggacccgtgtaaagtaggaaatgaaagcagcggtcctcagccttcctgaagctgcagccctttagtacagcgcctcatgtcgtggtgactcccgaccatacatttttttttttgttgctacctcacataactgcaatgttttgctactgttacgaattgtaatgtaaataaatatctgtgttttccagtgtcttaggtgactcctacaaaagagtcattctgacgcccaaggagtcatgaaccacaggttgagaaaaccagtggcttaaaagatccaaattttcatttgacttgtaatgttaaactgataaaacatcctagattctatttggacttttattgccttacttaaatggtttctcatcccctctcccctttctccctccctctccccccaccccccgttacctccctcttttcactgcggtggttcactccacacgatttatcttctgtctcctttttttactctttagtttcacccctcttgtacagatgggactaggagatgtcaattgaggtgtgagctacttgtccctggcatgctcactttaaggacccttatgggatttagctcaaggcatcagtaaggagctcagggtattgcaaaccttttagctgaccatccaggaaaaggtagatgatgagggaaggtctgtcctgtgatccttaccaaaaaaaaaaaaaaaaaaagaggatagaagccagtgttatctgcagtgtccattcggcagcggcagcttgtagtcagtgagctgttagaacacacaaatcacactctagaaagctttgggaggaccgaatctacatggcttgtatgagtgcgtttgctatgtgtgcatacgttcacccaactgtgtattactttgcagtagggatacattgcaagaaatgggtccttagatgagtttatcactatgttgccatcaaaacgcatacttattcaagcacggctgcatgccaaggcaatgtaagcttaggaggccattgtggtgtcccttggtcccttggtcactgatcaaagtatcaattaggttgcacatgactgtacatacctgagtagatcacacatgtgtcacatgactgtgcatacctcagtagatcacacatgtgtcacatgactgtgcatacctcagtagatcacacatgtgtatttctgcagaattattatgaacataaacacatactggaaagcagtggtcctcttccaaatcacatcaacagagaacattcttgacatattctcagataagaaagagaaaacaaacaaacaaacaaaaacgtacacatatgcgaccgtttatgaaacctctagatatatagtcttgatttgtgtgtgcggtcctggaaattaaacctagatgctcacccatgctaagcaagcactgtaccactgaaccacgttagggttgtaacttttaaaatgaagggtggcttttttctaaaatgtcatccttatcttcatgaaaaatatgtgagaaatattaatagaaaggaacagtgcagtccttctcaaaatccctcctgaaatatgtgtctccatattcttcccacagcctttgtaacatgtggggggctgacactcagatcattccaggacattccacaacagctgcactttctcattccaggaggaagtggctagcaagttcctgtgacgaagggcttgtttggtcacgatcatgaagttatagatcttgctgaaatttaaaaaaaaaaaaaaagagttaaagacaataagcagttttagagctttctctgtaccgtctcatgtttatcctaaatggttgtcttttcagaaacatgcttggaagcacagttaaccagctcatgcttcatcttctttcttttcctttttcaccctggtttctcagacgtggacgagtgtgagattggcgcccataactgcgacatgcacgcctcatgtctgaatgtccctggaagcttcaagtgcagctgcagagaaggctgggtgggaaatggcatcaaatgcattggtgagtttgcagacagaaagacccttccggaaggcccagtgtcgttactgaccgttcttcgcacatttgttaacccacacgcctcccacagggacccgctgcccgctgtccctttattcccctgtaaatcaaatctgtctttggtcgtggggatcattcctgcctgagcgtttcctcagctttaatgtaaatggtcagatcacaacagagtgcttaggcatctgcctcctcatgcatgttgctcggtaaaaattatttgatgtgcagtcagtgatctaaacagctgtaacgtggaaaaaaaacaaaaaacagcaacaaaaacggctggtgtgttttcccggcctttacacagagctgtcagtgtggagtgagagccagtgaagtaagtggagaacacagaggggttcctcacgtggccttgagatgagagcaagcaaaaggttcttagcagaaaggatcacccttacagacaacgctgaagatttttcttgaattccaagaagtcttacttgaaaagggagactagggaaatctttttctcccgggttctgtaattcttgggctgaaagcctaaaaatagtgcagagccccaaggcagaggactggattattccctgtgtggtcattcatagaactttttaatacgctcctacagtaaaggacatttccaggtggtaacaattacccaggtcaaagcaagccatcagagctgacctccccgtgactgacgacgaggcagtaaaagcttatgggcccacagtgaggattaaaacaggaacccttaatatttctcaccgataatgtgaattaacttgaataaaacctgccaatcctgccaagtgtttcatacgtgtcaaatatttaaagccaatttacagaatatgtatcatcatagtttccaaatgactttgctgtgtaacaccctgtgtctgcgtcccccagaggctaatggaagcccatttccatgcctgtcctatgtgcctgctagttgttgttgctgttgctgttgctatttgttcccatttatgttcttcctggcaatccgtcagtctggccaactgatcacatgactgcctgctgcacgacgagattacagggtccaggcacttgtgctcctatgcccattcctcctttctgtcttcatcctgtgcttagccatgtttcccctcccttgctccccctacctgctctgtcccctctcctcctccaccatcctcctgaccccttccctctagaccctcaccccatccctcttcttcttctcactcccttccctcctctgtcctcccctctccctccccccatattcactccatgatcctcctgcaacttactcttctaatatttaaggtggcagaacccttaaacctcttctcacaattcccatttaactctttaactctaggagaaaccatcccagtttccaagccaccgaagccttttctggcttcagctgccgctgccctggcccgtgtacagcgccttgcctctccagatgccagaatgccacaccctgtaccttccctctttagtggccctgtgtgctctgctctctgtgagaggcactcttctctccttctgctcactgaggtcgggcttgctcatccttggaggtgggggcatggtgcttcttccgtgggcctcactggttccctgtgatccagattcggttgttcctgtaaccctcttttccttttcttttaagatttatttatttaatgtagatgcctacactgtagccatcttcagacgcaccagaagagggcatcagatcccatcatagatggttgtgagccaccatgtggttgctgggatttgaactcaggacctctggaagagcagatagtgctcttaaccactgagccgtctctccagccctgctgtaaccttaatagtacatagaaaaacatgtaatcctttcttttttgtatttgacagccatcttttctggtagcccgttagtcccatgcgatcaagaactactacatctctcttcccttcttacaaaataaacttaaaactatatgtggattctctcctgtgaagatcattgttgtcttaagcaaatcctcttccagccatagaggaaccaacagtagaagcaacaataggtcgagtgaaatccgactccagttttccttaaatacttcccacagcactagaatcagtacccagtacccggggccacagttaggacatgaatgttttggattgtgaacctaaaatcttagtgcccttccagataaaaccaaaccaaagtccgtttggactggctcataatctccacaagccaaacccttcccctgcatcagactgtgccatcttcatctctgatcctcttggttgtgctcgcttgccacacagatctggatgagtgcgcgaatggaacccaccagtgcagcataaacgcccagtgtgtcaacaccccaggctcctaccagtgcgcctgctcggagggcttcacgggagacggctttacttgctcaggtgagtgacaggctgagctcccacgtgtccatctcagaacaccaaatgtgctctccttgtgtgaagaaaacccataaagaagaccaaagtggctgtttggagtttatgtttgacccatgaatgggcacataccctttcttatccattaaatgcagaagtctaaaaaggtgtctgtgacattggtaggtgttttaaagtaatggcatatatcacctcctgttctgttaatggctgtcattgtctattactcctttataaagtaatggtcaggaaaatgcaggctttggataacactgcctgggttcacagtatctccaggctttttccctgctatcaacctcagctcatgagcatcctgtgtggcttcagctcttcttgtgttaaaataggaatagtgaccttagcagcacttcttatcactgagtgggtggtccagggaacttctcagcccttgaagatgggatgtgtaatgtcacacatcaaaggtaagtcatccaagctgccacttctccccttggagttcgatagctgtcctcacagttgtgaaaggaataagacatgcgaaggacgtaggaaaccatactgatggagatttcactcctgcccctccccagggctcaatggtgaaatgttgtctcattacattcatatataagactaggccatcctttcaggcaagaaaattactttatgagctttatgagctgatcttcattcacgcttcaacctcacaattatgaaactaaatctgtaattatccacacagcgtgctgaactcatcagactcagcccccccccttttttttaagatttatttattattatacataagtacactgtagctgtgttctgacacaccagaagagggcgtcagatctcattacgggtggttatgagccaccatgtggttgctgggatttgaactcaggacctttggaagagcagtcagtgctcttacccgctgagccatctctccagcccctcagtgtccccttttaagaaagtgtgtttatctggtactcctcctctttaaagcactggctcttttgtatttcctggactttgtatgtgctgtagtaccaaagaaaggatggttttgatggtaaacacatctgcaagcacaatagggttcagggggacccttgcagctctgttgttggcttctgtcagcctggatgcacctggtgagctggacgaaagccacacaccaggtaacagccacttcacctggcggctcagtaaacactggtctctgtcctcctcctctttgctgcttcagagagttaagtaagtcatagggcaggtctatgaaaagtgtctgcctgcatcattttaatcagatgttaggaatagaaaagaaacgttgcttctatggtatctctgatttcctttgtgccacttcagcgaggaaagccaggaaggggcgttgctgtgctttcagatgaatgtaattccagagctcttggtcacatctactaatattgctttaatactgattcatccgtgggtatgaagaagaaccaagagaaaccccatcgatatatattctagctgagtgttctgaatgcaagttatggatctctgatctcaggccacacatcccaaatctagtgaatggggttaaccattgcttcatattaatgaacaccaactctagccactaaaaccgatttcatcaggaaaaaggaaaaatgtgtggcgaaacctggaacttaacggagacgtctttttattcggcagatgttgacgagtgtgcggaaaacacaaacctttgtgagaacggccagtgcctgaatgtcccgggagcttaccgctgcgagtgtgagatgggcttcaccccagcctcagacagcaggtcctgccaaggtgggtcaccacacttccagttcactttccagttggatcagctacagtgaaggaaaccacgaaaggggctggaacggcctccacctggaagcagactgcacggcacatgttgcacatataaaagctactcgtttaagcatggattattttgtggaatgagtaatgaggaaggctggctttcacctctgatgaattttttctggccaagagccagtagttgaaagtttggccccatcttctcctcctcctcctcccctcctcctctccttcctcctctcccccctctcctcccctccctctccccctcttcctcctcccctcatcttcctctcttttttctccccctcttcctcctcctcctcctcctcctccttcaaaataatttccttttttcgttttgtgtcactcattgaatgacatgtgacatgcctcttcagtttttaagtggtgatcaactattgcctgctttggcagtcagtgtttatcacagtcagcaaagtctaagtagcttgtttctggcatttccttttatgtttgagtctacagtgtgtgtgtgtctgagacttgaagcctcacaagtccatcaaggacttgttcacctcagctcagagataaagcaccttaaacctaagatagttgaaacaaattagtgtgactatattaaatgaccagaagacccttttaaggttgagatacaactgtttcaagatagcagtgtgaaatggcttttctgtgcaacttgaaaaatggtcagcaagtaaagtgcttgccaacaaggctgatgggatgaggtctgtccatgggacccgcatggtggaaggagagagccgacttccacaaatcatcgtctcaccacacaagccatgcatgcacatgcatgtgcatgcacacacacacatggacacacatgcacacacacgtcctgtctaaataaatgtaatatttaaaaatcatttgtaaagaatcatttccttagaaaagaatgacttttctaatctagcctaaaatgtcatgggtgggctgcattctctcagttattgagcagtttacatattaaaatctccaccctcttctgtgagtacaaacacattatttctacagctctgtttctacactgtattgtgcctttgaggcatgcatgtaagagtgataacttcgcatttattgaccttgggcttcagcctcatggaaatagctttattggctgaatttctggttttagtggaaatatacattttatatttttatctctgattacatggctctgtgtgtggtggaacagggcggtgtgtgtgcatgagagtgtgggtgtctgtggagcccagaagagggaatcaaacccctgaagctggacttgcaggtaatgagtcactcaaggtggccgctaggaattaaactcaggtcctctagaagaacagtggagtcttgactgccgagccacctctccagctctgttactagaggtattttaataaaatacgtaggtatttatgggtagtgaactgaaccgagttatttcatggtatagggaacagcattcttctctgtttataaatgatttttgtggtgataggtcagattataaaataaataaaaatttaaagtattaaagaccttttaccaatgtacttaatattaagtgttatgtaatttcatatttcaatttgccaattacaaaatgtgtactatttgctttaattatgtagaacctttcatttgtttttgcttttgaaaacttcactcatttgatgggtttgcatttaatttgtgtagtttgctaatacgtctaagctagttctttctatttgagtatattgcaatccagacagttataatattagacgtacaggtctggggtgtagctcagtgataaagcacttgcctagcatgtgagaatctctctgttaggtccttaacactgcagaagggggaaagtataagatatccactgagccaaaatagtgcttgttttatccctttcttatcctgtgcataagatatatttacagtttatactatttatctaggaaaaaaacaacagagaaaagtgttacttcttataaatatccaagaatttagaaaatgcattgttacatattaaaatctttaaatatctttgtaaacaagcggtgaccttatcttatttttcctttttcttctttttctttcttttttgtcttcagatattgatgaatgctccttccaaaatatctgtgtctttggaacctgtaacaacttgcccgggatgtttcattgtatctgtgatgatggttatgaactggacaggacaggaggaaactgtacaggtgaggacagccaggatcaactgcgtttcattgcttggcaccagtactccatgctaaacatataaactcctcagagttttccggaaatatctgtacattaggctgtgcatgtttccaaaatagaaaagtatactctggtatattcaccttctacaatgaaacgcatttgtgtttagataagcagcttcattatttaaaacaaaaacagtaattacatatgtgtgtatgtgaatttttacgtatatatcacatttcttatttttttaaataaaatttactataaacaacctgtagttaaaagccatcacatactaaaattaactaggaccatggtctgtgcctctcagtgaacttctatatgggctgaatagtgattctgaacctgtggagcacttaaatttcttcctcagaattgcaacttttagttattggttatatgttaggatattaaatgacattgttgaaaatattataattttctatgagttccaggacattctacatagtgaatttcaagtgagccaggactatatagtataatactgttgtctcctgcctccctacattctgcaaacacacacacacacatacacagagggagagagagagagacagagacagggacagagacagagagacagagacagagagacagagatgcaccaagcatccattaaatccttaccattgcagaacctattttgtgtttaggatgaatcttagtctttagttagctgagtccttcacagtgacctttagtaacctgggagagaggtccactcagtttcttggaacagcactttgtatatggaagtaaagatgttaacacgggcatctggaatgttcacagatattgatgagtgcgcagaccccataaactgtgtcaatggcctatgtgtgaacacgcctggtcgctatgagtgtaactgcccgcctgacttccagctgaaccccactggcgtgggttgcgttggtaagtgaaagctaagtgaaataaatagaatcacgtaaagttgaatatttcaactctcgacaatgaactataataggacaattttgagtacaaaaccaagaaaggaggtaataaatatttacatgagtagtgactaagtccttactaaaataatgagtttttttcagtatagatttgctcttctataaactctatttttaaaattattttaaaacattaaaaaggatctgctgaatgcagataataaagaacaatggccttaacttctgaagaacctacaaaccataaatttgtctggcttcatatgccgaagatattaacacactgattctttgacagatgtgggtaagatttgtggtgatacagattaagaaaccaatttaatcaactgtgcagatgtttttaaatgcaatccaagccatcaagaagctgaggcaggaggattgtgtattagagtctcgcctatgctgcaggatataacctcatctcaaaacaaacgagaattataagcatttggatatcatagaattcatgcacagtttgtccaaagagcaagcatgtcagatacgtgacaaaaatgtaatttactgaaatttttaatggacgcattaaaaaccgtttttatgagagcacacacagaagctattatcaggtcattggaatggtccaggaggaaaagaaaatcaggaatggagaatgaagatttgaaagggggaaagagaaaggaaggaatgtcgaatgaattcaaacctaataggggagggaccatgagttaacttgggtctctgtacccaagatttggcaaccgaaaaaaattgaagtataaccacgagaagcagccagatggctgtgctgtgttcagccagaagtgaaaggtactttgtggactcataaaaactttcaaaatactctggttgggatgagacctctttggggggagggggcgtggcctggcccagaacagttcttctgaagaattactttggctacaaagacaaaaacagattggacttgggccaaagatgaaagctgagatacatacgagttgggaaaccattgcaatcatctaggtttaaaaagaatgctgatatggggaattcaggctaaggggaaaaggcagcggtgacgtaagtcgtcagatgcatcttgaagataaagttagcaagccttattattactggtgtgaaaggagaatgagtgtaaagggttagaaatggcagcaaggctggacagctgaaaaagataagggaagttccatcgcttgaaagccgctaagacagggggagaggtagcacagagagaggagtgtccaggttggttgttgggcatgttgacttggaaacaagtagtaaagaaataagcagaaaggtttagaactcagaagaaaggtgagagaattttgaacttgaggtcatgggtgggacttgggggaggagtaccatctaaagccaggggtcaagatgatgagtgtaaatagagacaggcagtcttcagagagatgcagtttgccagactgaacaatccgcaactgttgcagtgaagattaaaataaaaccatcgggaggggtgggtgaaaggtagactgagattgttaacatgttacggacttagttacatttgtatgtctccgaggtgtgccaccacttcttcacaaactcatgaggcagattagtaaaaccccagtttctcttctgttcacactacttgaaatgtccagagggcccccaaataagaactgcctcactttcttgcttataccacaaatagacagaaatcattctgtggtttctagtgactgctgctcaccatcttttacagttgacttgatcttgtgatgtttaaaagccgaagtttatagcaaaagattgtattgtgctaagaattaggatgtaccttccctgtcaacgtacaaaatcttgaacttggtcctttaaatgccttcctgagaatttctccccacagtggggaccactttaagctcttctgttgctctgcagacaaccgcgtgggcaactgttacctgaagtttggtcctcgaggagacgggagtctgtcctgcaacacagaggtcggcgtaggtgtcagtcgctcctcctgctgctgctccctggggaaggcctggggaaacccctgtgagacatgccctcctgtaaacagcagtaagtatggaacagaaaggaaggaaaacacttctgtttctgttccaggatctagaaacaagttgctattgtatcctggactgtgggcagcgggaggggtggccttggactgttgtcagtggttatgctgaaatccgccaagagtgttttatagagaaggaatttcagttctgtccttcctatttttttcctatcgtgtttctctttaaaaaaatatcatctcaaccacaatgcagtctgaatggtcataatatggactatgcgtgggaccacagataaaggctgtccccagtccttcttggaggttgtttgttcaagttcataagtggagtgtatcctgaagtcagtcaccacggagcactttaaaagaaaacatgtgttctgatatgtacagaacccagacctttgtaccatagactcctggcatttttttttatttacttgccaaaatatttgtgatatgaattatctaaaaggaagtgttttcttaaaaaaaaaaaaactaaacaaacatggcttttgttatcctactgcaagtcattgaagtaatgatattttgggataaaatgtgatatacattattgaaaatgcgtttaaaaggacacaggaaaatgcagacacccctgaggctgtgtgatttgagcttggcactgtctcaaccgccaggatccagggatcaaaccgcttgcttgctttccattgttttgcagctgagtattataccctgtgtcctggaggcgaaggctttagacccaaccccatcacaatcatcttagaaggtaagcccatcaccagatgtcatgtaggcttaaataagctaaataaatagcctagttagagggaagctgggacctgagactaaagtcagtgtgaagccttgccagaagaattcatgggcagaactgcaggtaggcagtctgtcacacacatgctatgcaacagttttaccaagaagtagccatccattcccggcatctggtgttcagttgttgtgcagagaaacccttgttacattgtccccagcaaattaccgacagcttgcttccattactctccccagaaaacagcaggcctgcaaaaaaggcaagaaaatcacagtcagaataaacccagcacctaacggcattcattccttgagttgcacagacgtctgtggtccatacaagatgccatgtttgaaagctgcaatattgactctttggtcatgatttttatcattaatgggttgtctcctcttgtagacattgatgaatgtcaggagttaccagggctctgccagggtggaaactgtatcaacacttttgggagtttccagtgtgagtgcccacagggttactacctcagtgaggaaacccgcatctgtgaaggtgaggaagcctgggatgttccctatggtcctgcatccttcatcctgcaggaggggtcttttgagactgttaatagcttttttttttctttttttggagcaatgctgttcatttgtatagtgataaaaccaatttgcaatgatttctcaaaaaaaattttctgagtaaattgattgatgaaccataaatggaaagcagaattgcaatatgaaggtggtgaacactgatatttttaagtaggaacaggcaaacttcaatgtgactgtaagttaatattggttgatactttctgaatgtcagatataataatttctgaatgatgggtataatataaagaagttgggatgtcgtacagattctttttccccctccccccaccagctcttgtcacataccagttatagttttatttttaggtgactgctattgtttcaagttctggctggaggtgtagcatcagtgtttgtgtgggatgaggtgttgcctctagagctgcacattaagaatataccattattacttcagttacaacctttagttttgaacttgttggtgaaatgcatctgaaagaaatgtgacttaataagaaaaagacccactagttagcctgcaatgagaacctgtgagaggcttctaatttgaaaggagggtctcatagcctgcattcagttgaaagttgctgttaaaatttaattcgaatggcatgggggatggggggggggaacagacttcaaagaaattcctcttggagaatgtgaatttccgcaaatgtatacaggcataaggcaaatttggttttgcctctttagtctatttttgtaattcatagtatttttagggttaggagctttttgttttttattttttcttttccttaaagaaatgtggttttgtggcatgtaaatgtaaacacatcatttggggtttttttctttttaatttctgaatcttataaacatgaaactaggaaatcacttgggatctgcttagtaagctacgctatataaattcatagagcaatcttaactcctggacattcctgcctgttgtagatatcgacgagtgctttgcccatcccggcgtctgtggacctggcacctgctacaacaccctgggaaattacacttgcatttgcccgcctgagtacatgcaagtcaatggaggacataactgtatgggtcagtagccctcactgagattaacgacccgagtcaaggttgctgctggctttgtacccgcggcacttccgttctcagatttgctggtccggaaagtttggaaactaaatctttatgagtggggaagtatttcagagtcctatgaactgctgctctgcaaatccgaggtttaagggagaaaaaaaaatatcaagcattaaagagttacagatcttagaaaattccgattgtctatgtttgtgaaactgcatctgcatagatgagaggccatttaaatgtcaacagttacctctttttttcagttcaattaattaatgaaatttttttcaattaagtggatattgtagtagagaagggaatacatgacacaatattgtcacctgtagaaaaataaaatgccttgcctaaaagcaggacatgtcccatttgaaaacaatgagcgagatagaagcttttccacaattgtgtcactcaggaaagctggctgagaacaagccggctaaccgcggctcactgctctggccgcctcactgacggatctctctccatgtagacatgaggaaaagcttctgctaccgaagctataatgggaccacatgtgaaaacgagctgccttttaacgtgacaaagaggatgtgctgctgcacatacaatgtcggcaaagcctggaacaaaccttgtgagccgtgcccaaccccagggacaggtaagcacagctcaggctctgggagaggctttgccagtgatacattgtcacagtgggtatgtattccatgcccaatggcaaggataggtaggcacagctcaggctctgggagaggctttgccagtgatacactgtcatagtgggtatgtactccatgcccagtggcaaggacaggtaggcacagctcaggctctgggagaggctttgccagtgatacattgtcacagtgagtatgtactccatgcccaatggcaaggacaggtaggcacagctcaggctctgctgaaggctttgtccgtgatacactgtaacagtgggtgcatactgtagccagagatgctcaatctcagagagatctaaaaagcttgatttcccaaatggcatgacccactttgggaaccaagcagtaacttctgagacatgtcccataatgtccaaatcttgaaaagaggcattgttgttagagtttatagcctttctcaatttacaattattatcaaacaagactggccattccttccttcatccatccattcatcaaatgaatttattgagaaactactatttgtcactgtgttcagcatagaaagtataatattttggcaaagtaacttaaaagctactaacttcaataatagttgtttaaattaaatcttgaaacatagattaagaagtatttgttaatgaactttgcttgagaagtatataaaaaagtatttcataaataagttgcatagaacatcttgttaatgtgttccttgtgcagttttccatacaacacacaggaacctttacatgaccacaattttaaaattatttttattattgtatgtgcatgggtattttcctttatgcatttctgtgcctggtacctacagaggccagaagggggcattgaatctccaagaactgtagtatagataattgtgatctgccacaagggtgctgggaactgaaggcagaagggcagacagtgccctttgccactaaggcctgtctccagcccagcatggagggattttttactagcacaaattccattgaaataaaaggtgagccaccacgaagaccagactagcaaccacttgccttttaattactctccgtacagacctcatgtgacctagggaatggtcctttttcatagtcatagacccctgaagttgaacggagaggacagatgagaagctgactgtgcatgtgtcaccaaatactgacactgcattcattcaagcacttcagttataagaatgctaacataagctcaaggagagaggtgtggacaannnnnnnnnnnnnnnnnnnnnnnnnnnnnnnnnnnnnnnnnnnnnnnnnnnnnnnnnnnnnnnnnnnnnnnnnnnnnnnnnnnnnnnnnnnnaaaaaaaaaaacaaaaaaaacccgagggacccttcttagaaatgacagatttattttggctcatggtttctgaaagtcaccatcctgcgggcaaaagccaaacaaagcagtttactccggagtagcagaagcttaaagcaccagcttgtgtacagggtgtagaccagggggcagaggacaaaggcaggagccagaagcaggtgtgaccgtgacccctaaagacaagccctcctggatgtcttccacctaatatgcccaacatacaatttatacaatatacaatttatctatttaatatacaattatcgataaaccatgcatttaaaaaggccgtgactgcacaaggcacagatgcgtgggaaaggttttgcaatggagacacaggccagagatgacccatgaatgaggcgagagttttgtcttcttcttcctttttaaacatccctacctgctggaatatgaaatttgagaaataaaaggaacaatttgtcatgagatgaaatataagactgtaagggttattcttacctaaaattcaccaaatcaacagaaacttaaagagacagtgactcgttggagcaaaatgttttcagtggctgttatgatacacgtgtgcacaactccacagactacagtggtaaaaatggatatgacatgtgattctaagtgccatcaatatgagatttgctcaattcagtgatttctaatagactagtcacttttaggtcagtctatctgtctgtctgtctgtctgtctatctatctatctatctatctatctatctatctatctatttacctaccttccaacctacctacctagcatggcttgcccatggagtagcccctccctgctactgttgttgatctcaacttctagaggagttatcagaaagagtaaatcccctgcttggattgcccaagtttcagatcaggtctttgatgaacatagagaccagtttcccaaacctaagcccttcatttccttccactgaaaaaaaaaatgacatttattttcccaaactagtaatcttggactttagacttatggagctttataattgagaagggtaagggcgcctccacttcctctcatggaacacagatgggcaagagaaggctaaacacacccatcaaagctgcctccacgaggaggggaaatgccccttccttactcactcttcaaatgcttggactggagcttgatacccaagctgctgctttaagactggctgtgactaatatcgcactgttcttgttggcgaaaataatggcataaaggtattttaaatgtgtctgctccacagctgactttaagaccatatgtggaaatattcctggattcacctttgacattcacacaggaaaagctgttggtgagtttgtccccattgtatttgggaatgtacatatatacatatgtaaacgtattcatatgaatcatattttgtactcacatgtctcaattcaatagtactccaaatatcaaatgatctggactccaggctaatgtgcttagttaataaaccgagcaacaatgcttacattacgttgaccaagtgttaataaaattgttatattctatcagcatagcctagcaattaaattataattactttgcaatctcaagattccatgcatgccacacataaaaatgtgaatttccttgtcatgcatattgttttacatggttaaataatctacctcattttgtgtatggaggcatggatgtgccatatgtatatatgtgtggttacatacgtgcatgtgtgtcagtatttattaaaagccagagactgacatctcatgtcttccctgtctctctctacactattttctgaaacaggctctcccactgaatctaaagatcccttattcagctagggaagctggccaggaactccagggatctaccctctctgaccctccccatcacagccctgggattacagataaaagccagtgtgtccaccatttatgtggctgctagggatctgaagccaggtccctatgcttgtgtggcaagctctcacagaccgaaccacctctccagctccacacgttattttaatcactagttagtcttttcaaaagtagagcttaaggtttcagtatatttttataccatcccctttgtttgatctcatttgaatatacagaattccttttccgataaattacttccatctgaatggacttcagttgctaattctagttttttctccatggcttaagcaatatgattttaagtctctctgaaggaatatatttgagcaagtgtataacgaaatatatcaacttaaggaaacatagctttatcagaggattggcagctgtttgggtgacctgatagaacttgtggttggggctcaatgtccccaaccagggcaagaggttcacttgtcttattgcccactaaggtcacttgctgtgttttacaaaccatcttcactgttctaaagctcttttgggaaactaactgctctgtggtctctagttcttcagaaaccacaagactgtttatgccagtttgtatttgacttgaacagagagtgcatattttcacttcaggctacacatagcatcatccttacggggtaaggtgttaaggatgtgtagcagagaaccacgtgtattttacctaatccgttccatttcagacattgacgagtgtaaagagattccgggcatctgtgcaaacggtgtgtgcattaaccagatcggtagcttccgctgcgaatgccccacaggcttcagctacaacgacctgctcttggtctgtgaaggtaatctgagaaagatagggcttctaggagggcgtccagttttgtgtttatgagctgaggacatgaatgtgaccccccacccccaaccccacccaaagcgatagtgaacagctgtttacctggacctgtcactcttgcagacatcgatgagtgtagcaacggcgacaatctatgccaacgaaacgcggactgtatcaacagccccggcagctaccgctgcgagtgtgcggccggcttcaaactctcccccaacggggcctgtgtaggtaagcaagaggcaggcggtcaccaaccacagcacaccgtgaggtcccctgctcttgaagggctcccttgcttcccctccacagcatcctctcaggatgactttagaaggactgtctaattctatctctctgtcatgctgaaaggctcccaccgtaactttcagattagtttgttgaggaaagaggttgcttcggtggatttctctggtagaaaatagaatctttgaggtcccagtcaacctacaaaacttgcatgactggaggggggggcactgggttcttgaaaggcttgcttattttcagtcagctattgttctggttcattctcagcctgtctataataattaatagcaggttagagaaatgctctgtgcaaaacaaaggaatcttaataaaactcagatatatgtataacatgtgtccctttctttctttctttctttctttctttctttctttctttctttctttctttctttcgttcttttttttttcttctttttctgttttagatcgcaatgaatgcttggaaattcctaatgtttgcagtcatgggttgtgtgttgatctgcaagggagttaccagtgtatctgcaacaatggctttaaggcttctcaagaccagaccatgtgcatgggtaagaagggtgttctgtcccagggagtgacgtgaggctgggacttaagggcagatgatggcaccaccatatgacctcagcaacgatgacgtctctgccatgctaaacagtttaaggctttgatgtaaaactggcaagcagagacaataccatactaggttctcaaatgctcagcaagtctcagcattttgctccagaagttcctatgagatgatgtgcgttcaggcacacttggggctaggtggaaatcacccacacagcatattttggagtgcaaacgaggagtaagggtgaccctactaacataagcaccatgcaaatacacattcttttttattgagaatatagcttaggacgtaacagtatcagtgtcagctttaactcttaacatgattgcagaagtgaatataaccagcgtctttaaaatggattcccatcaggcaacatagcagctacataaggaaatgctcacagtcagctattggatggatcacagggcccccaatggaggagctagagaaagcacccaaggagctgggggggatctacaaccctataggtggaacaacaatatgaactaaccagtaccccagagctcgtgtctctagctgcatatgtatcagaagatggcctatccggccatcagtggaaagagaggcccattggtcgtgcaaactttacatgcctcagtacaggggaacgccagggccaaaaagtgggagtgggtgggtgggggagtgggtgtgggagcgtgtgggggacttttgggatagcattggaaatgtaaatgaaataatacctaatttaaaaaaaaatttttttaattaaaaaaaaaaaggaaatgagagtggggcttaggttgtttacaaaggcacatggtaggggggggggggtgctctgaagcggattgccagaatgtcccaactctgatgtcagtagggggctgggcctctgccagagttcctctctgtgcttcatatttgaaagaggaaaattggatttaaaatttgcttattcagatgtagcacgctctctgtgtgggaaggccaaggctgtgtacccaatctttggggattctagacgcttgctgagtgagtgtgaaagccgggtttcaatagtgtggaagcgttcccttcgtggagtatctgtgcaacgaggagcagctggggaaagcctcagtttacccactgctccctgagtgcaccttcccaccatgggctgccccagagtgatggggaaatctctaactggcgcctgtgcggaggctatcacaagtccccgtcccctgtccatgcacattgtgggaatgcttgcttttacaagagacacgggggtctccgtctatgctcttgcagagagtataatccgcccttcgtccccagatctgtgatatttatgacccagaaattcatatgggaaaaaaaaaaaaagccgccccagtgttagcagttcttccatgataaaagtcagtcagctcctcggacctccgggacacagctctccttctaaagagctgtgcctgttccttgtacggtggctctctgcaggctggcctcccagctcaaaggccttaaagggactctagccagtccaagaatgaccgaccatcacagctctggcagaccttgtccttcctgagtcactctgcctcgctaaataaatgaataaataaataagagttagattgcatttctaaagctacccaccaaggtctgttcccttatttggccacatcctccacctgagactgactaccgaggtctagctttctaagtactgaagtcaagcaatcaaacgaccactttgagctgccctaattagcattcccaatcaaaatgaatcctaacatgggtttcaccttcaacttttataaaccaccaaccaccattgggccatggctgtctcctctccatcaagaggagtccttttgtccccctcccagacaaatacccctgtcccctctccctcattttccttccccttcttctttgttctctatctcctgtctttgtcccttattccacaacctttttccctctggggcacataagtctcctttgtgctgagaacttggttttgggggtatcctgtgctgaaaccgatccttccgggccctctgtctcctgtctggaataaaactgttcatgccaggaattttggaaagcttatgattaattctaaatgaactccttggatttcactatttcatcaaaggggctaaagttttccttctgaagttaagatatataaattctttaataagtgttaagaatattttgctatttgacaagcaagcccgctctctgcaacatctctgccggtggcacgcctctccgccctctgttgctgagaattgtactgactggtagggaattaaactgttttctccttcgtaaattcataagtttgatttgcgtcccccttttcaccttcttatttttattaagtaagcttgggtccctagcactctccttagtgcgggcaagaagatgttagaggtgcatgcctggttctaggtaaaagctgagttcttcttggcagatgttgacgagtgtgagcggcacccgtgcggaaacgggacttgtaagaacactgtgggatcctacaactgtctgtgttaccctgggttcgagctcactcacaacaacgattgcctaggtaagtctttctgtcctcggacctcctttatccctgcagaatgtaccgaaataaaaaaaaaaaaatacataaataaaaccaagagcacgggtgacttttgttgctaaacttgcacgtgtgccaggaaataggcaaagccattgcgaacccccagttgccctcagtgggccgtgtactgtttccagacctttcttacaaatccagtctatcagggtgaaaggtcactgagatgcctgtcagtggatcaggactgatttagtttaggctctctgtcccctcgtggtgagacagagggaccctctcttactcccgtgttacacctcacaagttgtacgacttcattcctaatccacacttgagcctccgcagatttctacacacacaggtctgtgtcttaaaatgtccttgtccatcagcttcaaaagcctgtatgcctttccccacccccactccccaaaaatgcacagcaaacaggttttgagatgaaccctcaaactgcagtggtgcctagtacagggtttcagcttttgcctcacaatcacatacaattaggacatgggaactgatgctggagatgtccccgcaaggaggtggagcaaagataaaaaaaaagggtaacagtgatctattccctttgtcatttgtgtacgatccttatgtacaggtaaaggaattgggttatatcccatagtcctttctcctctgccaaaagaaatactctccaactggggggaaaaatggaaagattcatcttcaacctgtaagactttagtttataaatgtctaaattatagctcacgcccttgaaaaactgaggagtccctccatgttcccgatagggataatgtgtgccgttttcttttctgttattagagtgcggtgtagaccttttgtaagtgtgtgtcgacacgttccccactgaagcactgactcctctcttgctttgcagacatagacgagtgcagctcgttttttggccaggtgtgcagaaacgggcggtgcttcaatgaaatcggctccttcaagtgcctgtgcaacgagggttacgaactgactccagacggcaaaaactgtatcggtaaggaactggtggcactcgcctttaatcccagcactcgggaggcagaggcagggggatttctgagttcgaggccagcctggtctacaaagtgagttccaggacagccagggctacacagagaaaccctgtctaaaaaaaataataatgataaaattaaaaaaaaaggaagaaacgaaaagaagagaaagaaactgaagctgcgcagctaatgagacaatatgaactcccacaggcatactctgctcatccacatcacatcgcaggactgccacgacctgtgtcggggtattaactgccacctgggaagacatcatagggagagtttttattaggggtagtgcttgagagtaggtctcaataaatgtacatgaaggaatgaatcataacaattaacagccttatgaaccagctacaatatcggaggagtgacagggtgtctttgtccacagtgacccaacagatcagagggcccaagtggaatctatgtcactgtcatttagcagacagatgtctgcaatgattgtctcatgtctgggttacattttttttttttttggtcttctttctctctaaagatactaatgagtgtgtcgcacttcctggctcctgttctcctgggacctgtcagaatttggagggctccttcaggtgcatctgcccccctggatatgaagtgagaagcgaaaattgcattggtgaggatcgggttcattctgaggtcatgagtcgtgggggagaaaaaagcgtgtgggagaaaaacaaacatcaaccccagccactgtgcacatggaggcctccgggattaaacacatagctgcctgcatctgttttattgagccatcaaaaatggttgggttagcagcttagggatgtgggcttgtttccatcaacagaagtcttacttcgagtcaaggggttttccttatactctgtagccgcattctaaatgtcggggaagaccatctactaaattttaaaaatgtctacagtgtaatctttggcacgtgattttaaaatagctattaaaggtgtccaggctcatgaaaatatgaagcagaagcagaagcctcgatggttctcttgaccgtttcccctcttgggtaggtgttacttatacaaaagtagaaaatattagtccccttggatagctggtgtcttctacggaacagaacgctgttcagcctcagaatgggccctcgggatgccctgcagacccgatgagggcgacctccgcacagcccacttgatcccacgttctgtgaattgctcttgctgcatgattgacatctgaagcagccgcatccaagtgagggtttgctagcgcagagggatctcaaaggatgtctttgtctctgaggctttcattccatcacccatgtcaagatcctgaggatgaagagctctgatgttcacattcgagacagttgctagttaaaagggctacggacttcacagaattgaactgtgtttcagaccaagtgactagggagtatgagtatccaaagtcattctatatagtatatatagtttactatgagatccggtcatatcttctagccaaaataataaaagcatagtcaaatagtcaaatcaactggtaaaacgtggtaaaaagtttcttgaaagtttaagattatctctgccattttgttaaattttgtttgggggatatggaagaggaatttttatttgtgtatgtatatgcacagatgattttacagcaaagtaacaaagaaactctgtagtccatcaatccctttctttaaagctagcagtattaaccacaatagtgtggtgtgtgtgtgtgtgtgtgtgtgtgtgtgtgtgtgtgtgtagtgtataagcatgtgcatatgtggtatggtatgtgtgtggacagtattcatgtattgcaagtatatgtgtatttgtgtgtgtgtggtatgtgtgtgtatgtatatgtgtgtatagtgtgtgnnnnnnnnnnnnnnnnnnnnnnnnnnnnnnnnnnnnnnnnnnnnnnnnnnnnnnnnnnnnnnnnnnnnnnnnnnnnnnnnnnnnnnnnnnnnnnnnnnnnnnnnnnnnnnnnnnnnnnnnnnnnnnnnnnnnnnnnnnnnnnnnnnnntgtgtggtgtgtatgcatgtgtgcatggtgtggtgtataccatgcatatgtacaggtattgcccttattcccttgaaaccgtctctcactgaacctggaacaaggctcgcaggcagctagccctggtgatcctcatgtatctacatcttagagctgaggctacagtcacatgtgaccgacccccagccttgacagtaaattctggggacttaaacttgggtcttcatgtttgcacaatagccagtgagctctcaggtttggtcttcatgttcaattttggttcttcattgtatccactcccgccctcatatggagtgatcacgacagctgcatgtaagctagtggtatgggaatagaaacatgtgtgtttccgcaccgtagcatcataggtacctctgtcttgttgaaagcacccacgtctatgattcagtttacatttcattcgcattgcctttcttgacctaaaccttgctccttggacaactattatcttcctaagaaaagtttgtttttagttaaattactttaccctatactcattctataccaactaagtgtctcttgtaccagtttttctcagatgagattcctctaacatggtcatgctcagatgcaaacacacacagagttgtgtgcacacatacacagaggcatatgtgcattccacagacacggtggtgagaatgtggcagctctgatatatcacagtgggcttacagaagtgcagatttgacttttatggggtctcctacctaactggagagacatagtttgtgaatgaacctgttgaaaagcttttccttacaatagatcatggtgagccctgaacattaggtgtgtccgggatgtaacaacactttagaaaactgacgcaggtgtgaggtggcatgtcacagacaccagccacaaggctcagcagtcacccaaagtccctcctaagtactggataggaatttactaatcagagaaagataaatcataactagaagagatgctctggaagtgggcaccatagcattgggaaggctgaacttggtcctgtaagcatcacgagggagggagtttttaaaaagggatgtgatctgactcgtttattaaatctttagagagttaaattgaaagcatgtgccagacatcacagtgggggcagaaggcacaacatgagtcagatatggcacagcacagtcttggtattgcattctaactttcttgaagttgtagtattttgtctcttgaataaaataacctgctaaataagcatctctctctctctctctctctctctctctcacacacacacacacacacacacacacacacggtgagagagacagagacagacagactgaaaaccaatgggaaagattccttatattaaagtgtcagtctgggctttgggaaacgatactctcatggtctcgttccattgaccacatcattcagtaaaatcagtcgcatgtttagaaggtggcggtgtgaagagaagaacagagaaaagatgcagccactggtgaagaaatgtacagtaactgggtggtatccaaaactgtgtagagggtactgagtagtgtaacaggcagctactcacttgtgtgtaggcatcaaaaagccagagggatcccgggttgggtttccaaaggaggtgtttgggagagggtccatgggtcaaggctcaatctgtgagacatatatgtcagtcgtgtcagatagacagagaggtcccacccatagttatcaagtgtcaggacatggaggtgggcatgggaaactctggcatgtggctggctcaaattggatatgatctttcacttttaaagcaacagtttaccttaaaaggataaattcgctacctacagagtgtcatctgcagttccatttagtaaatatcctttaatgaatgaccattggagtatggacaggtagatttattttcaactgtagaaaggaatattgattaacaaactctcactgttctgtagatataaatgaatgcgatgaggaccccaacatttgcctttttggttcctgcaccaacaccccagggggcttccagtgcatctgtccccctggctttgtcttgtctgacaacgggcggagatgcttcggtaagtggtagactggcctcctctgtcgccctctctcttcattgggctagggctttattatgacaaaaatgaggtctacttataatacaccatgtgcaactgcaacccagatttctcagcagcgtctcagagactggccgtagaacactctgttagcgttattaacacatactctctgattttatgctaagagagaatttgtctcactgtaccgtttttatttcattgctggcatgagctgttatgtatcagtacatgagttgcctcgggcacagtttaatttactgaaagttaaattcgttgtttttatacagctttgatggaagagtcaacgggggagactgtgggaatatgttcccgacttaggctgattttacaaatccctaaacacatcataaaaacattttagatctaataacattttgtacgtggatcactttaaactagcaaatgaaagtgacccatggagaatgcccaggcctgtctcttaactactgatcttgtgtgtgccctgtgtcctgctcatgagaaatgttcgatcagaaccagtcacatcatattgtcccacgtgtttaaagagcggtgaggagctctgctgtttgctttcccgattagatactcgccagagcttctgcttcaccaactttgaaaacggaaagtgttctgtacccaaagccttcaacaccaccaaggcaaaatgctgttgcagcaagatgccaggcgagggctggggggacccgtgtgagctgtgccccaaagatgatgaaggtgagagcaatggcagggagacagagaaagagagggagagggggtgggggatgagagggagggagaaggagagaaggaggaagaaggagagggagggagggaattttgttgagactttgtagagggggaagttatacctttgtatagaactttgtataggttctgtgagcagccacttggcaagatccactcccgccccaacattcatgcacagcctgtgtacactgataccgagaccacccacttacctttccttctaacgtattaacactacgtgctttctgaaaacttaactgcagaggcgtggacagaagaggcaagaagaggatggaaaataaactccacacgactccacaagtcccaagctgaaagtgctaaagactagcttgccagtagagcataggactaacagcagcaaggctagagtttaatctttaccatcaaaaagaaatacatagataagaaaatcccatgtcggtgtaatttcatgggccgtggttctcagaatgttacacaagattccgagaactaaaatcaacacaatggcccaaaagcccccaagggatccatcaacaccagtgaattatagagtaacccccagcgaggacaccctggggagggtcggtcactaggttagaaatggtttctgtgtgtataaaggacagggacgtttttggacttcctggtgttaaacagagacagagtcctcaggctggtgcgatcctagtagaagctcagatagcctctctgagtctgctcagcgttgggtattaaaacaaaacaaaaacggtcatgtacagttgtgtaaacctttacacccagcactcgagaggcagaaagcaggccgatctcatgagtgtaaggccagcccggtctacagagcaagtttcagactctgttgcaaaacaacagaccagaaaaaaagatgaaagaaagaaaaggaaaagaacacactcttgtttaagatggctttgtacagcgttgactggttaaaatgaagctcttgagtgatggaagctctgtttctccacagttgccttccaggatctgtgtccatacggccatgggacagtccccagtcttcatgacacacgtgaaggtaggctctggcgcagtttatttttactgtcacattttataaaaatagataaatttctcatttattttataaatcatgctaattttagaatgccctgtagtatagtatgttatatctaaagaatgattttaatagtttatgagtcatataatatatatatatatatacacacacacacacgtgtgtgtgtgtgtgtatcatatgactatactgatacgtgaaatatctgtttttctgacaaaagaagtatgtatgttccattcatgttagttgtgtgcttagtagatgtggatatattagcatatcattctatatgagtgagctcatgggagtgtcctattttagatgtcaatgagtgtcttgagagcccaggcatttgctcaaatggtcagtgcatcaacactgatggatctttccgatgtgagtgtccaatgggctacaacctggattacactggagtccggtgtgtgggtgagtattggctctgtttcccatagctccgacgccctgttgtattcttctgtctgcccaatggcccctcaggtagctccagtggtggtgggaagatttagaaaaccaggatgagctgataacagtatcttcgtctctcctaccttttcccatgcaacttgactcgttatgaagatggagtttcctagtatctgtctgtaaccaattatacaatctctaaagccttgggatgtagttcaatgataggttatatgtgctttgcatgcataaggccttagtttggtccctagcatttaaaacaagcaaacaagcaatgaatgaatgaataaatgaatggcaaagcctgggtaggagaataactaggagaactgtctgttttgtctttgcatccttcttgaagcagatgtccacagacatcctctggcttcgggactgttgcagaaagcattaccatctgggactgagagccttgcaaagtggcccttctggtcactttatgcactgtataaaagctgaccagggccaaagggaaggtgctgggaaggggtgatgtgtcactatgccctcatcggatccttgaaatgtgtctgggcctctgcacggcttcctctgttttgcagacaccgacgagtgctccatcggcaacccctgcgggaacgggacgtgcaccaacgtgatcgggagcttcgaatgcacctgcaatgaaggctttgagccggggcccatgatgaactgcgaaggcaagtcctcctgccttgaggctcgactctctcttcctttgagaatacagaattcctttttgaaaattgcctccacctttagtcactgtgttattctcctgttcatactcatgccacgtaatttccctcacctcgttgagcagttccaagggttcttctacaccctggtctcctgacagcatcccctgagtggctcggggacggccttcatcattttccctttctttaagactatgttatgttttctatattttcgtggcttcccaatatattggttaacttttaatttatatactctggatattgggaaggatacatcgtggactcagttacattgcgttcatgccttttttttttccctatagcagagttaacttgtgtagacacagtcgcagcctgctcaggcctttgaaggctctggtttcagttctacctttggaacctacaggccagcttctctgggcttcgtcccaagcatacatagtacagtcagcagcctaggctgtgtacacagaaagaaaaaagtccacccctctctttcctggtgctcctttccagaacctcactcactctggagcaccatggtgacctcaggattgtgtcccctgcacagaatattaggaagtttagatttagctaccaggctgccacgggcaggctactggtcatccttagggcggatcgggagaaggaaagagggagggtgaggtcaacaaatcgttaatgttagtccttgtagtttcctagctctgaatttttactcatcatcagcactccaggtagcttttgtaattcttcagcatatagctgttagcttcctggaagacagttttgccaggttctgtattgtatgtaccagaagcaaaagtcctggtacctcgttgcttcctatatgatctgtgagaaagcacattagtgtctctttcaagaaataactaagaaggcgagatgtcctgagtctctcacgctgaacgcgtgcccatttctttggccagacatcaacgagtgtgcccagaacccgctgctctgcgctttccgctgcatgaacacttttggatcttacgagtgcacgtgcccagttggctacgccctcagggaagaccaaaagatgtgtaaaggtaaggaaggccacagtcagggggtgagcggcagcttgacctgcctcctcctgcaccccttgacctctctggggcacctttgtcagagtgttacaggggggaaagggggtggagggggtgtcagctttgctgtagacttcctctcctagataacaggacacttaaaagtctgtgggtaagatggctcgagcatcccgttgctgtcacgtgcccaggcccttattacagcaaaagtcaccctcccctgacctcattctaaggaccagtcctgaaagtgttatacatctgggctgggcgtctttgtccctctgtcacaccagatgacaacatgacaagagtcagaagtacgactggagaattgctaacacctagcccgagaaacagaatgtgctgtttgtaaccgtttcccccttctgatgcatctttaatcaatgctctctagatctggacgagtgtgccgaggggctgcacgactgcgagtctagaggcatgatgtgcaagaacctgatcggcaccttcatgtgcatctgccccccaggcatggcccgcaggcccgatggcgagggctgtgtaggtaagttcccaagggagggtctctgagcaaggctgtcgctccaagccagatgtaacactgatcccagaggagctaaacctgagacggctccattccccgctgtactgaggctagccttcatgatctccacgtccagggtagcactcaaggctctggatcatgtggggcggaggggggggagggttcacgctgctggaaactgtgggggtgtcgttatttgtgagcctctgtgatttgtgtaagcatcaaactcagatgtgtagaaactgtccacgaagtacctctacccgtgcagccaaatgaaagtttaaggctaacagtctcaccttggtgtcctcaccttggtgtcctcaccttggtgaggggagtagataaggagcaacccagcattactattctcttaccccatcacctaacacatctgagtttcaatgcactcattgttaaagagatgaggtaaagctattacttcatggcccgtgccagtctggcctccctcacgccagcgtgtcagggctaccgtagccattgtctgtgtccttctttcctaaaacgctgtctgttacctgagccactgcagcccactgtatgggcttcctcctccctaagaacaggggctgtttaacttagaacctgttactcccctgccaacctccaccacctagggaaactgaggtctttttgtttttttaaagaaacaacagtcattaataatttcctgtttcttccaaaatgaatgccaaaataaaaaataagatttcttaaaaatgaatctcctccacacagttgcctgctacccaaagttagaacagggaggggctgcaagtggacaccagggatgcccattagggatgggaacgctaagattacactgtagcgacagttgtgcaagcctataattgaccaaaaaccattgaattgcacacttacaaattctatggcatacaaattataccttggtaaagctcattttgcaaaaatgaagccacgacaggaaaagagatacagggcatacagcgttacgctgtttgttctaacaaaaaaataataagggaatgaaaccaaaatacccattatagacacgtagatagatgcatagtggtatgtgtatgctagaaaatatacatagctgttaaaatgagtatggcaaatgtatatgcatccggatacggaaatagccgtgaacgtggagcaaagccatgtaaaataacatgtcattttgtaagaaactgcaagtaatatcatgtttcctgtagggtacatagggaagcatgtagaagacataggaaacgctttaaaaagagaaatcatgggtcacccccagagtgaaccaccgagaaagatacctcaattagaggttattcatctagagtggtttttacctttatctgacaattttgatctttggcaggactgaatttctaaagaacatgtatagatagcatagaccttaaaaatgcagcacccgattaaattctgcctaaaattccaacatagctaccctcttcctcctaacttactgcctgagatagcatatgaagaacaaaggttgtttgggttcatggctacacactgtctagtccgtgacccatgggcccatgcttcgaaattacaaccaggcctctcactgcaagagggagaacactcatccccaaaatgaaaacgctggagagaggctggggctggggtcccaccatccccttaggggacaagtctgcagggaccctgacaccctcctactatgccccatcttgaggtttcgccacttctcggtagcgccatctggtggccagccttcagcataccagcctttaggatacgttcaatgttcacactaaggcattggagtgtattgtgacttaacaaactctgtttgataatggtcacttggttgttgttcttgtccttttttttttttttaagtgtcacgttaagagtttagttacaaagcggttgactcaaaaccactctccgtgtagtacctgtccatttttaagggctgcgcctaggctccaaaatcaaagcatacgctcccgttcctcaaatctggcacaaggcaaagttgtaacttgtgtgggaaggagggaagaaacaccctgattactgtgcctaaggcacatgtgatcccaggtgctggtgtcacaagctggagccgccgtggcaagcctcggggctcgcatcttttcttgtgtattttgatgatagaaggtacaggtctttaaaaagtttgtcaggtccccaagcctttctgttataaaatgctatgggcaaggccatggtgatctcacagttagaaattccacacaaataaacaagatcctataaaaataaagtgtgtgtaaaatttaggatggaaaataaagtcaatatgaacgatgcgcatgcagatgcctcagagtccaagaaaatctctcagagttgatattcataaaactgtaaaccatgacaagctaaggactctatgtaggacatagaagagcccccatcaagaaaacagtaaagttatccagaggagtaaacttgatcctgccctatattgtagtcaaacaatcacttcttgaacaaatcacaacaaaatctaatcattaggaaaaaaaacacatcgatttgattaaatttggtcaaaaatgcatttataggcatctgaggttgtaatttagaagaaggcggtgtttattttaaagatggcatagagagatgtcctcctcaaccttgaagattttagaaatgtcacgggaagggatgagtcctggactatcctgccttaaagacccagccacagcagacagtgatgggcgtcctctaaacggcgtgtgcggttccaaccacagcgcagcggtttggtggcctgttgtccttcagactttatctagctatttccgttttcagaagtttgctcagaagatggtagacgagagacacgggagtacttctgggcaggcccattgtccccctacagtccccagaaagggagttgtgggaggtggcttggcacggtgctgtttgaatatagacaaacaggtccagacatggacattcctagattgagaccgaaaggtcggggacgaagcggtcaccagagagcctaaggcttagtgaccatctgatttagtataatgacccagggacagaaggcatggcaggtttattgaagatgttcatatattgagtccataggttccactttacgctattgacctgctgggttcctttcccagcaagactgaacagtttacacaaatatgtgcgtaatgcaggccgaacagaggggaagacaggaaggaagataagaagtggactggagacaactggaagaaaagggtgatttagaaaagtcactttaaccatctcttgaggaagataattaaagactcctgcgtggttttaaagttaccaatgtaatgatagaagctcagaagagaaatgggcccgcaggagagtttagaaacctctttagaagtaatggagtagaaacggggaagggggaggggtgctggagaggtggcccggtcaataaaggtgacgggcatacggtgcaggcatgaggacctgagtccaacccacaacacccaaacaaaatctgggttcagcagtgagcacctggcatcctagccttggagaagtgaaaagtctgatttctgggacttgctggctagccagactagccaaatgatgaaaaccgggtctagggagagaccctgactctcaaaaaataaagcaaactgaagcacaaaagaggaagatacccatggtaacgccaacctccatgcgcacctgcacacacatgcacatacgcacatctgcatgcatgcatgcatgcatgtgcacacactcacatgatagaaatgacagaaaagatgactagaaatgtgggtatagaacggatcagtaaaatgatacaaatggaagacaggtgtccacaatgtgcttacaaatataatcccttcaggaaaagacaaaagaaagctaagcagataaaaggtagtggagtgtatgagtattttagagaagttcttagggaaaagacttaaatctccatcaaaaggaaaagagacagacggacatggtcatgccctatagtggtaactacgccttttaaggaaaataaggttttgcaattgggcaggagatacttaagagagcaccttgggatctaatgaagcgacccctggacgctacaacatagactggaaaaataaagaaatgttgttaataatgccgttcctataaggagtctgtccgttgtaaggaggaagaagcagaagaagtgaggtcatttaggtggctatttaaaatcatctagactggggccatggtgatctgtggacagatctaggaaaaaaaaaaaaaaaacaataaacgaatcaacttctgggattgctgatggctgattaacaggatagaggaagggaaaaaaagtataaaagatgagaaggattgttaattgagtgagttgattggatggtgttactgtaaatatctatggaaaagactagaaaaagcagagtaatgggcatgaaaagagcagtagttggtggtccatgtgtgcagaaattgtccaaagagagatggtagatgctgagaatcaagatgtcctggatggtgtagctccacactgaggcacaccctatgaaggctacagatgttagcagcagtggagaatctggctttttgcaaacaaaacaaacaaacaaacaacaaaaactcattgccagcggcagaagagtaaaagttggagcacgtcaagttgccattcaaaggatcagaccttatgttaggcggttcatgcagccaaagctttgttggagagttgtttccaactgctagattataaattaatataagtatattaagcagggcagtggccatgcacgcctttaatccaagcacttgggaggctgagacaggtggatttctgagttcaaggccagcctggtctacagagcaagctctgggatatatgctgtatgtatctggatggatggatgcatggatggatggatgggtgggtgggtggatggatggatggatggatggatggatgggtggatggatggatggatggatggatggatggatggatggatgggtggatggacggacggacggatgggtggagagagagggagcacaccatttgagagagactcagatctaggagtagccaaactgagccctcagattctagaaacaaccaactagaaaactcgaaattcacaatctagctcattatttttgtgagtacccttaaaatttcataataaagttttccccccacaaaccagaaaatctatggattcacatcattatgaatttcagaatactaaaagcaaaatgaaaatacttaacacttttagagggggagggaggatagattcccttcaaataaacaaaaatacagggtaaatgaaatagcagattatcttcaatatttctaagggaaacaattttgaacttaaaatttcaaacttagtagtgtgtaaggccaatcaaagtaaggcattgtcaaaagcctatttggtaatttattttatattcacatgacctctctgaactaattaacaaactatatatttgaatttgaatccaagagtcagtgattacatatgtatagccacaccttagtcccaccagcatacaagttactagctaaagacgtttaaacagatggtgtgaaataaagagatggggcaggacctgaggaggctgaggtaagaggaaggcaacctcaactgcatcctagatgacacaggactagcttcaaaatgaaaaaaagcctagagacaaaagcccagtgggtaagcacttgcctagtgtgtgtaaggtactagattcaatgcatagtctcaaaaaattataatttttgaccctggttgagaattcagtaaaagaacatttcaaaaccatttaaaggatgctaccagaagagtggagagaaagtggtagtagccaaacctgagttggagacacgaggaaaggacaggaaattagattggcttgacagatgttaagagaagggggaacatcaccctaaacgtgaaacgtatgaagtggcaggtaagcttggaatagcaatcgtgcactggatcacagatacacacactttcaaagttcttttgaggaccagctggatgcttctgtaagaaacacaccaagacaaaggggtgagaggatggtgtgaaataaagagatgaggaaagacagtccaggcatctgttagtaaaaagacaacgcaaaaggatgtcagaacactgaagactaaacaaggaaggaaggaaggaaggnnnnnnnnnnnnnnnnnnnnnnnnnnnnnnnnnnnnnnnnnnnnnnnnnnnnnnnnnnnnnnnnnnnnnnnnnnnnnnnnnnnnnnnnnnnnnnnnnnnnnnnnnnnnnnnnnnnnnnnnnnnnnnnnnnnnnnnnnnnnnnnnnnnnnnnnnnnnnnnnnnnnnnnnnnnnnnnnnnnnnnnnnnnnnnnnnnnnnnnnnnnnnnnnnnnnnnnnnnnnnnnnnnnnnnnnnnnnnnnnnnnnnnnnnnnnnnnnnnnnnnnnnnnnnnnnnnnnnnnnnnnnnnnnnnnnnnnnnnnnnnnnnnnnnnnnnnnnnnnnnnnnnnnnnnnnnnnnnnnnnnnnnnnnnnnnnnnnnnnnnnnnnnnnnnnnnnnnnnnnnnnnnnnnnnnnnnnnnnnnnnnnnnnnnnnnnnnnnnnnnnnnnnnnnnnnnnnnnnnnnnnnnnnnnnnnnnnnnnnnnnnnnnnnnnnnnnnnnnnnnnnnnttgtttgtttgtttttaacttgttacttatttgtcaccaagcaaaagagtgccactgcctaaattctcctccctgttaatcacctttagaggccacagctgcacccgggatcccacgcaaagccttcttccctggtccccaccacctcagtggaccatctctcttcccacagctgtttcctcccctttcagaagctggccccctctttcatggaatgcttcctctctgggggagtatctcgatgtccacaaggacactatccctctcctacaggggctgggtcaagaaggaaactttcagaaaggagtcatctgattggatgaggtgcactgggagcactggtcatgtgaccgatttaatcccacctcctcagtttttttgtttttgtttttttttctgagacagggtttctctgtatagccctggctgtcctggatctcactctggcctcgaactcagaaacccgcctgcctctgcctcccaagtgctgggattaaaggcataacgccaccactgccttggtatcttgtcaaaggcttttaaatacgatgagaacaccgaaagacagttaggaagctgtggttttaaagctgctcgtaatttttttttttcctatgaagatgagaacgaatgcaggactaagccaggcatctgtgaaaatggacgctgcgttaacatcattgggagctacaggtgtgagtgcaatgagggattccagtcgagttcctccggcactgaatgcctcggtaagtgaacacatgactatttccctgggtgagtatagcacgtctatgacgtcatcgcagaacagctcggcgcattcacccttgtctattgaacagaccttgtacaaggccagtactccacacgccccgcccccgcccacagatacccatctattaaaatgatgtatctctatgcctacgccttacacgcccatgtaacaacctgaaacagtctttccaaaggggagattagttaagctctgtggaaaatgtgacttcagtaaggctgacatcaggagctgatttaattccaaaaaaagaaaatattttcagtgtgaggtaagctcccccaatactaatgcaaagcaaacgccgcacgtctccaaagcgcagcaggggttaatttttacattccagtccagaaaaataatttctaattggaaatatgacctcatgggcactgtagcacgctgaaccgatgctgaaatgtatacactgtagtgggtgctgttaatgacgggcagctgtaaacgtagggtgtggtcaacttaaaaggaaccgaagaaagaggagagatcaactggtaggtggcccggtcgggccaagcatcagatgctcatcagctcatcagcctgctgctttcattcctagggatatttttatacccaacaatctattttattacctgttgtctccgatctaggtctttcccagacgtatgtctttaaagacactactttctgctcatattatggtcttactaggacagttggcttatgagaccatgctgaaggcttttctccatgattgcatcacagaaggctctgtacttatattaatctgctatctacaatgcaccaagtcctctccctgtagacagtaacagcataactaccacgctcgtaacatagtcttaaatttattcttcatttccctacctagcatcactttgtctaacaggaaaaaacttctgatgtttcttcctcttgggttttctgggactatagctcctaacttgcctatcactttcattgaattaaaaagaatataattctatttctattgaataactcattcaattttccattgaataacttttgtcaagtttaatactctattcctagtataaacaccatgggggagggggtgtattgtcaacaagcaatcgctaagcatcggccactcacgcaagaacactctgagttttgaaggttttgcctagaaggagagcatgatggtccactgaaaaccaagctgactggtacccggtcttgactctcatcttgtgttccgctccagacaaccgccagggtctgtgcttcgccgaggtactgcagacaatgtgtcagatggcctccagtagccgcaacctcgtcacaaagtcggagtgctgctgtgacggtggccgaggctggggccaccagtgtgagctgtgcccacttccaggaaccgcccagtacaaaaagatatgtcctcacggcccaggatacgccactgatggaagaggtaatgcgctgaggggacttgagacgtcatatcagaccagttgatttcgtacatccaaattaatgtaaaagaaatgtaagaggctaattctttcaaaattctgcctgaaagtctggtactctatgcacgaatcaaaagaatattcttatattcttgcctaatactgtatacaggggtgtgtgtgtgtgtgtgtgtgtgtgtgtgtgtgtgttgcacacatgtgtacgcacttgtgtacacatgtgcacgtggaggccagaggaactctccaagtaggccaggctggcccgactatgcaccttagggatttggctgttttcatctatctcaccacccctggccttttaaaatgcagggtctggggctctaactcacatcctcaagcttgcaaggcgagagctttacccagagttatctccccaggccatgttccacaaagagatctattcctatgtcaaacccaagggagactttactgctctcacttaacagaggcggaaacggaagcacaaacctatggtaacaataaataatgtcccggaaaacgtgggcaaaccctatctgaccccaaaggccttgggcactaataacctccaaactgcacttgccttgtttgaagaaacggtgcacagctgagtgtgggtaggaattcattctgttttcaagctacttccacgctagcaggtttcatgattagctagaggtttccacttttctgtgtgtatgcatccaagtgttttgtggatgttatgaaagataaactggttccctccattgctgtaaagactcccagccagtacctgactgctaactgaagccttccttcagagtctcaaggcaggtgggacctggaggcccagatttatggatagtaagttatcacatatttcaagcggcatctttctaacacgtaccaaaaatggtaactcccacttagaatacaaaatgaagagtccggcatgagccttccggcatagccctctcgtggttttcttcccgtgtctctctctccctgcctcctcagatgcctctgtttccctcccagattgcccttccctgagaagtgaaaagggactttcccagaacttccctggtcgttccacctcaccccttccgacatcctcctcccgtccagctgcctccactgcgcacacattagcttctctcctcttgctctacagatatcgatgaatgtaaggtgatgccaagcctctgcactaatggccagtgcgtcaacaccatgggctccttccggtgcttctgcaaagttggctacaccacggacatcagcggaacagcttgtgtaggtaagatgtggctgtacacccggggtttggcaactcctgctgcctacagaccgagcaccgtcaggggagcactggcctatgcctcctacagaccgagcaccttcaggggagcactgagctatgcttcctacagaccgagcactgtcaggggagcactgacctatgcttcctacagaccgagcacattcaggggagcacaggccttttcagctttcactatgctgaccggaagtctcagtaatgatcctcttaatgacagagctcttgtttggtttgtttgtttgcttgcttgattgattgcttaactgtgtgggacacggggtccaggtcatctcagattctgtgcagtgggggaaacataaaaatcaaaaaaaaaatgagttttcaatatgttcattttaatttaaaacttacaaacgcatatctatttggtaaagaaaaggaagtgggcttttcctgtggatccggtgtgtttgtgtgtgaagaagaattcatttttaataatgtctcatgaagtgcagcaactaagcatcatctaaaagctctgcttgcaaagaaatctcaccaaagcatcctctggctgtttacatgtatttctcttctttaattcataatcatctgatctgtgccattttctgacaaacagaaggctgtggtagagccttcttgtacactttcaaacagttcttatttctatttccccggctttatgagacaccctcttaaattaccaactttacaaaggttaagcaaaaccgaccaactccacaaaagcattttagtcacacagtagaaacagcagacaggggagtagccaggagtgggatccaaatcaggagtttctgcgtgcagcaggcctccgttcatcccgggagctctgtggaggaaatggagattgtctgccatcagtcacagtcctggcagtaaagagttggcatagcccagagaggacagacgaagtatagcttagcatcaagattgtgtcagtcggtggttctcaaccttcctgatgctgttgccctttaatagagcccctcatgttgtgctaaccccccgtgtcctccccccaccataaaattatttctctctatttccccataaaattattttcgttgctactccataactgtcatttttatagaggagcagcatctcagtttgtaagacagtctgaaatgttatttcccaatggtggcgaccatcgtaaggttgagacccgacccgctgctgtaagtggacagcggggtgtagagatgccacaaagcaggggttcaccagagcttatgtaactccactctggggccaaacaaaaggaacagaggggaacgtggtgagaccctgagagaacagagtgtgcagagagcatctgtgagaagctgccgcaggaagccactgtctcagcataaacccacgccagagagacaagaggaaatgggagtgttcctaaggtctagtctagcctgattaagttgaagagcttcttgagtttggatttttttttttttttgagcctagacagtcgtctagacattacaagatctagccaagatctgtgcattgatcctcgaaatacgccagtctgctactttagagaaaactgttcttgctggatgaattcactgtatgttgtagagggaaagcaagaaggacggagtgagaatgtggggaggatggagaggctggtcctttctggtaaccaggactctcatgttgctctttcctctacttagacctcgatgaatgttcgcagtctccaaagccatgcaacttcatctgcaagaacaccaagggcagttaccagtgctcctgcccacgggggtacgtcctgcaggaggacggaaagacgtgcaaaggtgaggggagtctcagcagccactgcccatctttctctctctcttcaggaacgtttgcatattagccttgttaaagtgctgctccgggaaactttaccagggctcctattctagaagaaatggggacttaaaaatctaaattaaaatatgttgctccttagaaatgaaaagaaataaagtctgcacatatgcacacacacagacacacatagacacacacagacacacacacacacatacacacagacagacacacatacaccacacacacacattcacacacacacagacttacaccacacaccacacacacacacacacnnnnnnnnnnnnnnnnnnnnnnnnnnnnnnnnnnnnnnnnnnnnnnnnnnnnnnnnnnnnnnnnnnnnnnnnnnnnnnnnnnnnnnnnnnnnnnnnnnnnnnnnnnnnnnnnnnnnnnnnnnnnnnnnnnnnnnnnnnnnnnnnnnnnnnnnnnnnnnnnnnnnnnnnacacacacacacacacacacacacacacacacacaaaggactattttttttttagccaaggacctcaaatttacttcaaaggaaagtggttggaactgcttgtcatcacattaagcaaaataagccagcctctggaatgcaagcatcctgttttctgacatatacacaatctagactttcttttaggagtattaaaatgtcataatgaaacccacgacttcgtatgctatcctaaatattttttaaaataaaatttaaaaagaagtctgccatgaaagtgcagaactcttttggggaggtggtcatgggagagagggtgaaacaagacgagataatggggtggtaaatttgagcaagtcacacatttataaaataataccataaccccccccccattcatttggtaacttttaaaaaacatggatgcaagagttggtaagaaccgtcaggacctggagttctggtagctgccaacctcaggccccacctcaggcctacgcgcatccgcgtttactgcagacaggtgaggagtcggagtgtatgcgttaatttgtgcacacacacttattaaaaacaattagcatgccaggtctgatcactaacatggcttcagtgctgtgtttgattttataggaacccaatggtccgaacagacagtttaactgtgttctctgtgaagcaacattttctttccaagctatatttaaaaatcataacaataattacacacacaaaaaaaaaagtagcaagtgctgggattttcttgaacctgttcaaggaaatggttcggcagagctgactttttctgcccagtgtctgtaaaatgcttggaactcatacttccactgtacatgggacttactttgaatgtattttcccaaattaagttttactcaaatcaaaatcagattttgaagagtccagatattcactctaagtttatagttgttctggtcttgcttgtggggggcagggggggtgtgtgtttgttgtttttaagacgggtttctctgtgtagccttgtctgtcctggaacccactctgtaaaccaggttggccttaaactcacagaaatcctcctgcctccgcctctgcctcccatgtgccactcctgcctggcaggagctgtggttttgcttcttctcttataagtaatggtgtgcctgcccatttggatctggtaaccctccctccatttccaatctctgctgtgcttttatttaatattccctttaataagaatatgtaactatctatgtaccaaaccacattaactacaagatgggacaacttttccatgttacctttgcaaagggtggacctgctgtgttttagccatccagtttcttgttttaagacaattttgccctataatcctttagccacgctgtcccaattagcagccttctatacttaggctgctaaatatgtacattcaaaccctccctcatacacatatgggaacctacagactgcagctgaagtttaaacccaatccctcccacccccggaaaaatgcatgacttctcctgggcttctctgtcatttcagacctcgacgaatgtcaaaccaaacagcacaactgccagttcctctgtgtcaacaccctggggggattcacctgtaaatgtccgcccggtttcacccagcatcacacggcttgcatcggtaaggcaaatcgcagtcaggatctttgacagacggctcaatctggcctaaggatacagatgtttgctgaccagaacagcatccaccaggaagaaggcctggacatgcgtttgcacacacagtggccacactgtacggtgtctcggcatcccatcctcagtacagttgttagatcatggaagaagtcctgccatgcagctgtacagcaggcatattttaaaccatacttcagtgtcacaagccaaacacagctatgatgctcagatacaatacgattaaaggctgtcctggaacttctcaattttattacagaaggcacatttcaagagatccttagtctgtattatctaaaatggtgcctctagtaactctaaaatacattctagttacaagtcactgaaaaacccacgctatgctgctcttgctaataaattctgatctgacttaaaatgcttgccccaccaagtgaaaacatgggcttgtgcccctcagtttatttcatggagtgagatttaattgacagaccacataaccagggagcttgactctttccctctgtctcatggctttgctagataacaatgaatgtgggtctcagccttccctctgtggtgcaaaggggatctgtcagaacactcctgggagcttcagctgcgaatgccaaagagggttctctctggatgcctctgggctgaactgtgaaggtgagtccacgtgcacagggagcctgggtgtgggggcttcagaaatggttccataaagcatgggccattcaagcctgagctcagatcccagtacccaggtaaatgccaagtggtcgtgggacctcttctgtaatccccatgccctggaggcaggattggaatctgtgcagcaggcaggatagctacactagaggaatccgcacggtctgggtttagcaaaagaccctgtcttaatatacaaggtatagcacaatacaggaacacatacacaggcacacacacacacacacacacacacccctccctgcgtatccacatttacccatgcacaaaagaacatgcatatgcatacacaccacatacatatacacagacaaaaataatatttagactctgcacccatggtgcctcccacacaataggtatttttctcttaggaaatccaaaggaacagctgatggggagaaaaataagaaaactatcacatgggggtcttcagtgtttacgtggcacgtgctgacgtcacattcaggaaggcaacgttagcgttgtatgtctcggattctgacaccagccacatcacctttatgcttttgcattgtgttatagtttatattgtcctgttatccttttttaaaagttattcctagaaatagaatggttttccattctagatacaatcaaaatgtgaaatatgctctttgtacgagttataggacttttacatgcattttcagccctttttatttaaaacttttaatttttttgtatctgaaatcaatagacatcgaagcattctgagcctacagctgcttgccatgtgtgaattcagctcgtgaccatccacataaaataccatttattaattatccatgtaaatttgttacacacacatcagacatgccaattttatttcactcttttggggtagatttcaaagccttagttgtcattccaaaagtgtatgcatatattaacaaagaaattattccatatgtcgtaccacatcttgcctaaaaataacaacgaattcaaatactttaaagggatttgcatctaattagtcttgactgacaataaaaaaatatttgcgtgcaaagccattatattttacagataactccttagtgcttatatcttctccgcaatggggattacacatgaatcacttttgaatcaactacaatcgttaatacataatttaccaaataaatcataccacatggagctagtcaattcaaatgtaccacatttgtggcgactattgttgatttgctgaaactaagctgtgactcggagccctggtgtgctgtggttgctgggacagcataagaataaggtgatttcttatctcagccattcattccttgcaccatcactgactcagaaccgtgctgaagaaaagcccagtccctccataagctgtgcgttgtttatttgttcccattaaaggttgtgtttgagatgtgttcaccaagggagtgtgcagagtgtacgggggttgtttttgcagatgtcgatgagtgtgatgggaatcacaggtgccaacacggctgccagaatatcctgggaggctatcggtgcggctgcccgcagggctacgtccagcactaccagtggaaccagtgtgttggtgagcattccttggtggcccagcccttggcttttctcaacctcagtgtctggataagctaaataatagatgttacagttgcaggacagactcctaaaacctaaaagccagtttaaccatgtaaggttattgtgtgagagggctagggttagctcaggggaagagcacttgcctggcatgtgtaaggtccagggttctatcccacctctacgcactgttaaaagggcagacaggaaaagtctgcataaaagcattgatacacaaccgggattttattgtgctcatctctgtatttgtgcatgtaacaaaatctatcataaacatgtttttggaatatttaacggcacatcaactagaggtgtcgtcattttgacttttgatgtactgtgaggttggggctggtctcaaaaccatgctctgctgcttttcaatactaatttgttagatttagttcacggaagtgttcacccattaccctggtctaactctaaagggccctttccatccttttgtgacagggcctcctgtctataacttgctatgtagccccaggctatcctagatcctgccacctctactcccccagggcaaggacttcagacatacattaccgtgcctggctaggaattctaagtccccaagaatggtccttccgtcctcacgtatcacatagacttaatgagtattgcaaagttgctttaacatagaaaaagtaactagtcggaataaatgctgctgacaactccagacaaaaatgtgtataaaagaaagcacaacaggaattctgttctgttctctgcactgatagtaatcacggaagtgctccccataagaaacccctgatcaaagagaccgttattcttcctgagtagcctgactgaggctatacccaatttcgtagctctatttgaacacactccatagctgccctgtccaacacattgtgagagtagaagcttgcattgcccaacaggagagcagcagacccccttccccaaccctacaccagagagcagcagactgcttccttgtctctgaagtgaagatactacacacgccattcaaatgtgccgtaatgatccaccaaacgaatggattctatatgatcttttatgttcctctcaaaagaattttctaatggcagcttaatgagctgagaagaaaaccaaaggttttgtaagagaaatgaggtccataaagttcttcttatctgctctgtggcctcctgccaggccaggggccgatgcttcgccacagcagatctgcacatctgtgatgggaggagaggcagacagcctgtgattcagagcaaggcctgatgactacgtgtggggacgtgtcaccaatgaaacccattgttttgcacactggctaaaaatgataaaaaaataattttaaaaacgtgcagctagcaaagaaagataaggctaaagctttaaacgattatcaaagcgttgagttaaacagccaatcaaacgattgtataaatataattcacttctttcttttttcttaatggaaaaaaaaatgttgtggaattccttaagccctgatatattcatatactgaagccatgtgctgtcaagccctttaaactatagaaagtagtgctttgactattaaagatgatgtagaattttattttattttatttatttattttgtatttatatgagtacactgcagttatcttcagacacacactagaagatcccattacagatggttgtgagccaccatgtggttgctgggaatagaactcaggacctctggaagagcagtcagtgctcttaaccgctgagccatctctccagcccaatgtagaactttattatattacggtgtttgtaaactctccaggcccatcatttaagtaaggactgcaggcttcatggttagttttgtagaacttaaggcagaatgagtctctagtagtcagtttacacagaattcttggcttcaatgagaactcaaagagaaattagaacacatagaagtcaccagttcaagtttttacacttcttaaagttttgatccgtaaacaatgcagtgcaaaaccatctgcgtgagcctttagtaactttgaggtttctgttgaggaatggcctgtgtgcagcttgaagaggtgcggtaccatcccagtttcctttccacgagttcatgagttaagtgctttatttagcctagacctccagagtccagacccaggcctgcgagtctcctaatcagagaagcaccttgagcagagccaatagtgttttcaaggatgaggcgtggtagcatttacctgccatggcagcatccacagactgaagcatgaggatccaaaggcctgtgagacccattctcaaaaaaaacaaaaaaaaaaccaaaaacccactggtcaatgaaaggaactagaagcatgtaagcaggtctgccccacttgcaagagttagcttttctttcttaaaatgctcatctttaggcagtcactccttggatagacagagacagaattgcaaagattctggatccctcagggtttctgctcactcacgtctgataaaatggacactgttcttgcttttaagccacatcccatgacaaatggaattgtagatgtggcagaaaaagagtgaactttaccccagccgggaagctaatgaatgcatcaaattagaatgataagaattaggaccaagctcaggttatctgcgtctgttcatgtaaatgccctgcgactggagggaggggagagagcgtgagggctttcatgtagtcttctcctctggtgaaccatcgaaggtgtccgtcagaacagcagactccctcaagtagacaaactccaaagttcacgccgctcttcgtggtaccacccattcaagatgagtaagcagtctctgaaagtgatcattttggagaaagctctccctacgaattcccaccttgtaagttttcagctcattaccgcagggacttgagagagcatcctaggacacagactatctggatgcaagtagggttctcgactaccagcacgtattgtgatcgtttgaaattgaaaacgggcagcagatatgaacatttgcatataaagaaaatgtttcaatatgcaaatttttttgccatttactgcagataactttcagttctttctgtattataagctttcccaatacaatcccaacatagccaaacaaggcatttcaattcacagtacatctcaaacaagcccatacttaactaaattcctacaatgttaccatgttatatatttatagcatataagtatgagaacgcttagtacttccagaaacataatcctgttttaaaatgttcttgtaaatggaatatttaaattcaatttactcaattaattggctttcttggtaatttttctgacttacacaatgcctgagtaaagtcacgttgggaacatgccattaagtttgtaatctaatttagattccatgttagaagagaaatactacatattaatgtgagaactaattatgaaagtggatgaagctttagggcagaatttcaagtctctcaaatatagaaataaaacagtgggtacattcagatcccacatagccaacctactgagaatttatgcatcttctgtgcataaaataaatgccaggagatttcgcatattaagcaaatgaccatattttatattcagtggctaagagttcttcatttacttctcatttaattctccaactgtacacattaaaatatgcctaatacctgcgctttcggtagcttctatcctgtgctttgcaaagttcagtctcccgtctagagtcctctgctgggtcccaactccatcagggaaatctccctgagcggccgcgggtccccacacccacacccaggaatcactgtgttccccgggtatgcacactcacagatgggcctgctcgcatccaggcagacacatgtccacagacattccacatgcagtcgcaggagtggaaagagttccacggaacagatgtgattcgtgcccagcatgaagtgtgggttataataaagttcagaggagtcaaacccagggctagctcatcaaccaaacagttagaagcaacctcataattcccaaagccagaagcaccttggggccttgaacctgtgataacagcagctggaagcagacctgtaattacgctcctgccaggcttctgaggacagagctaagcacttagcagtgagagctctgtgtcagtgctggcggggagggcattgtctgcaccaggcaggctctggagcagttaaaaccactcttagttcaatagagtcagttagggtcctttcctgaatttctcagggactccctcccctatctatatacatgaagagctgggggaagtgctaagggccaatgggcacaaatgctgatagagagatgggctcttttaaaaattcacatagttcatgtacagtaaaattcacccttttgcagtgccagttgaaagtgtttcggtgtgttcttctaggtgtatataagtatcaaccccaatagtcaatgcccctgtcctcctgcaatagaacccccataactgatagccactaagccactatcccctcttcctccctcccccttcccctggaaactgccaatctgttctctctctctctctctctctctctctctctctctttctcttgcctaaaatacagacttttgaaataagcttttgttaagagaataagagaatcaggcagtggtggcacacccttacctttaatcccagcacttggaaggcagaggcaggcggatttttgagtttaaggcccccttcatcccctctgcccctgcccctccccttggtaagatcttctttcttttcctttttgaacagatgagaatgaatgttccaacccaggtgcctgtggctccgcctcctgctacaacaccctggggagttacaagtgcgcctgcccctccgggttctccttcgaccagttctccagcgcctgccatgatgtgaatgagtgttcctcctccaagaacccatgcagctacggctgctccaacacagaaggcggctacctctgcggctgcccaccagggtacttcagagtgggacaggggtaagacattgtccccaaaagcatcgaggaggacgggtgactcttcctctctcctgagcggtcagggtcaggcagccttgcttcccacccctgcaagggtgaaactggaacccctgtgtgtgaagtccaagagggggatagcattgggacataggcgccatgcagggtaggagcacttcctttgtggagagcctgagaggtttgcttccatggaagcttcagtccttggtccttataatagctgaagttggttcctcttgactcaaggccagatgcagggcttaggcagctcctgtgttactgtgagtgacagatgtgtgaatgacgtcctccactgcatcactctgctgatttccacagatgctgacccagcaacccctgaggaaggactttgcctctttctctgttcatctggtcttatgttgcccagaaagggatcagtccttcccccacaaggcttgctaccccttgggtaactgcactttggcagatcttacnnnnnnnnnnnnnnnnnnnnctgctctcctcagggacacagaagtttacaagtaaataggggtgatcttcttcgaaaggattagcaagtctggcaggcactaaggggcatgaaccagtctgtccagcactgatatacagtcacacataacagaaaagattgggcttagcaaggctcgctttagagccagtgcattgctgccttctgccgactaaaacaggaatgcagaaataccaagttctagagcagagatctttgcctgtgcggtaaaactggcttcaggctcctctgggcttccatagctgcttttacctccttaagtagactgctttcaagtgcttcaatctaaataggattgagagctggggaagcccaggactcgtcctcagaagaatctcgcagtttcaaaacaagaggaaatctttcccactgtgtggcaaagaacagaaccacaaagatcaggttttgtgattaatgcagttcctcgtgttgtgctgagcccaaccataaaataatttccgttgctatctcatgactgtaattgtgctactctgggggaatcataacataaatatctgtattgtcccatggtctcaggctgacccgaggggttgcgacccacaggatgagaagagctgctagctggtttatagcttcttcctatgcgtccatgtttcctaaagacttttagactgcccgtgctaatggtaatgtctaagaatttttttgcatctcgtaaacagccactgtgtctcgggaatgggcttcaacaaaggacagtacctgtcggtggatgcggaggcagaggatgacgaaaacgctctgtccccagaagcatgctacgagtgcaaaatcaatggctacaccaagaaagatggccgacggaagaggagcgcgcaggagcctgagcccgcctcagccgtgagtagacacagagcagaagccctgctttgccaaagaaaagggaggaaagaaaaaaaggttacacacacacacacacacacacacacgtgttccttggccctgcccactgattgtctctgtctccctaggacatgtgcacctaacctctccctcagctccttcacctataaaatgaggattaaaactctcaacctctgaatgttgctgaacaggagcatgtgaagtgcttgcctcgatgcctgaagtgcacaccagtgattaataacccacatacaggcatcacataggcatataggcgtgttggtgatttcccctgagaccagggacactatgaggccaccacttacctctctttttagttactattactgagaattgctcctatcaatacacacacacacacacacacacacacacacacacacacacacaaactggctgtgcttcagtattctgggtctcaggaccctttcttatctataggaccacactaacttagccccaaaatctctgatactattttaaaattacaagtcaatgttacatgtgtttttaagtagactgaagtatccaacccgatatttaatcatgacaaatcgctcatcaagtcttcccgttgtggttcacagaacacgattctgtgtaaataatgatgggttcctcaaagcttctgtaaccataacctcacttaagcacaaacccatagcaaaacattatgggtttgtgtgtgtgtgtgtgtgtgtgtgtgtgtgtgtgtcctgtctcactaaggcagcagtcttacctcacatcccaaatgacaaattcggttcatattgtctgggccctgcttttaaccaatcctggctcactctgcagatggctccgagccttctgagtaagaaggctcctagaaaagtcacagcccagagatggtttccctgggggcaggctctgctgttgaatagcaataagacttctcgttttgaccccacaaaagagaaaattagactcgtttcttaaattgtccttttccattaaaatgtttgagaatttcatgcatgtataaaattattatcatattgatccccatttctccccctcgactccctgaagagagcccccccacaatacaacattagtcattgtcccactggatacaattagtggtacacatatacacactgtgtatgggaatatctactgaaacaaagacaaactaccagtggccacaacaccaaagagaagtgactatctctcaactttaaagttaatcttaatattgtataaatattactaaattgtataaacccatcaaaggaccctgatatgtgactattgtctgtggcctaagtcctataactttaatgatcttgtcgaggctgagtgagggtcaggaagattcacaggacatcccccgcagggtgaagcttttccccaccctgacaggaatttgtgaaagcctcttttgcagacagcaaatggccagacagggagcagcctcaacctgcctctgtgactatatcagtcaatcgcaggtggcctttgagtctgccttgtgcccgctaccaactcaagtgtgttcttgctctttccctcaggaggagcaaatcagcctggagagcgtagccatggacagcccagtcaacatgaagttcaacctctccggccttggctccaaggagcacatcctagaactggtccccgccattgagcccctcaacaaccacatccgttatgtcatctcgcaagggaacgaggatggcgtcttccgaatccaccaaaggaacgggctcagctacctgcacacggccaagaagaagctcgctcccggcacatacacactggaaatcaccagcatccccctctatgggaagaaggagctgaggaaattggaggagcacaatgaggacgactaccttctgggggtgctcggggaggctctccgaatgaggttgcagattcagttgtattagccctctgcagacttgggccttgggccccagctcagatcccagcacagccggccttcagaagtgtttggaacatcactgactgattttgaagaggaaaaaaaacaaaaacaaacaaacaaacaaacaaaaaaaaaaaaacaaagaaggccttctattcctttccttcttcctgattcagacttcggaatgttgaccctcgcagggaaggataatttagactctggtatggccaaagatttgagtgcaaaggcaaacatagttactgtattttttatataacttcatttttaaatatattaaaaaaaaaagcaaacctaaatgttcaagagatcagcgtatggcactaaatgcacaaaactaatgtgagccttcttcctgttagcagtctataacactttgggtattttgctatagttgctaattaaaaaaaatatagatgtttatttattttaatgcagtaatatatggagaaatgaacaaactatgtaaacaaaaagggaaactcgcttgtttttcttagatttataaatttgagctatttcttttagaggtgctttaaaaaaaaaatccaatacattcaagagatgttttcctttagtttttccgccagccctccaactggtgcgcacctgactatttcaaagaaagtcttgcggagctgaatgggcggtgtaatcagtaatttaaaaagatgtggaagtcgtttgatcctgtccaaaggaaatgaaagccagagcagctcctatgacaatatttcacatcagcagattcgccaggcaacaggagaggaaaccactgtagcaaaataccttgactgcttgtgagaccgttagcattgcaggccaaactgtactgtatttcttcctcgtaacctcaaggacccacacgtgcctcccacaacacctcattcttaccagggcgtgctgtgcacttgtggtcccctaggcagctgaagaacccgccgttcctttgagcaggaacacctggcgttctgtcgagtttggtgctgtcgtagattaaatggtgcatttattatgttcaagctatttcaggattgccatgtgtgcaaacaatcatgccatgcagccaaggaatatatgtcgatgtttttttttttaaacccatggtttttatttttattttattttttagaattttcattaatactgtagttatacaccatatgcctcattttatcatagcttattgtgtatgaaatatgtttgtaaaatgaattgatgtttagtttgctttagccatttgaaaagatgccacaccaggaggtaaccaataagagcacagctccacattcttctccctggagaacccgttcctggaagagtgatggaaaccggagatacaaaatggccaaagcacacaccgtcattcctctcgcacctgtgttgaccaaagagtagtaaccagttatagccaatgttttggggttttttgttttgttttgtttcgtttcgttttgtttgtttgtttttaataaccaaaaagaaaaagagaaacagtgtaaatttgtaatcaagtgtttgtgaggaaaaacgtatgggttttggttatgtttgtttttgtaggtctatgtatcaaatatgacacttttcttgcaataaagcttattttggggtagtcttacggctgcgtttcctgagactccaatggctggtccatttgtgggaggcactggagacttcgcttacagggatatttattaaagaacgagacagaaagggaggcatgaccacaggaaggtgaaaggatggtgtgccttatgcgacaaaggcagatggggcgtttgcttctagatctattcacagggggagtagaattagagcagtgggtgtttccaattctccatgaatcatgagtgtcccggggtccagttttccagaaattccactccttccaactgcacatttgcaggatgtcttattaaagcactcgaatcgtccataaggcacagaaagagcaaagtttcctgaatcgaaatcttgaagccaaagtgaactgcaggcatgtgtcaatataaatggcacatatccaaaggcaagccaaagcttgtctcctgccttgccatgcagtctactcttcgaagtaaatagatttagcagggtatttaatgtgaatcctctcttgatagattgctaaaatgggcgtgcacacacacacacacacacacacacacacacacacataggcatgcacacacacacacacactcacaccaaaaaagaaaaaaacaaacaaaactttccaagacttacaagttaattcaatccatggtaggatttatgtgtttaaaattttcatccaaggaataagagaacaagggaatattatgaccgatcttaattctgtcctttgccaaccagaaattagcttcgtggaataagaaaagtatttgccttggagtatcctttaaaacttaccatgcacatgcaacttcatctggtgtctattaatagtacagcttgagctctgcaatgtcaaatgacctggaaccggatttgactctagttctgaatatggagtgacaaggctcttactccacctttaatctcttcatgaggaagtctgaaagcctacaatgttgggagcttcgtgcagaacataaaaaaggcattgggcatgcaacaaagaagaacgctcaaagaaaatgactccaaaaagcttccacccaagtcagcactttatgagcatccacggctgctttatgacaagtgtaagttacgtcatcctatagctcaccacggaggatgttttaggcagcatgttgttattcacatttccattattttctcaaaagattcactcagcatatttttttttaatttacagaaaagtatgtcaactcaggaatctaaatcaaacccagtgactctatgtgatagtcacaatggtcttcaaatgacagcatctctctctctttctcactctcctctctttctctctctctctctctctctctctctctccctctctctctctctctctctctctctctcccctcactgtgatttagagctcttcagacctctgtcctgtttagttcttttccacgtttctgagacttacactgcatgggtgttagtcacgtttgaactctgaacatcattccgagaagcatgtaaactacaataaatccaaacatctactgctctgtgtgaacttaggactgggagccatactggtcactctgtccgttctctgaggccttacttggctttaattacctcctcggtaatttaacgtccatgatgttaaaagtgagacaacggaaaattctaaaacactggtgtgcctgagtctgtcaaaatgctagggaactataatcaatgtacggaatcgaaaggagtgaaaggcagccatgtttgacacagaaggtggcaatttagtgcgttcaacctgaccactcagcaaccttcctgtctttaagagtatgttagagataggaaagggccctgctcttcaggagactagaaaccccaccacaccgtgctacctgtggctggctcatctgcattcctgctttgcaggagcccagcagaggattacaccgcttattcaaccaaccacttccttgtctgctccagggcacacatctttgggactatgacgggttaattaggagctatttagacaagtttgttggaggaaaaaaaggaagaggacattttattaagaataaaggagtaattccagaaccttaagagaagtaatggtgaatggaaagatgggagcttactgctgcctcatgggaaataagattttcctatctggtgattgggttggttgttgggttttggctttttaagcatgctcattttctcaacatattcaaatccatgaatacttaacaagaagtatgcttttctgactatctttgaaaaccatctccttagaatcctcgcagacaatacaatgtatgactcatttcatcatccaatcactgagacagtacaatcttgcagttaaaacaacaacaacaaaaacaaacaaccctcctttgaatcgagcaaaacaactgacttccatctccttgaacaaactgtgtagcgtctcacttccctgtcttgatcttacggtgtggctccaagggttcattacagaaagcttcttatccgaggagggctcaacggggtagcaggacctccgaaaggccagcctttcctgccctttccttttgttccgtagccaccactaagaggataaaggagatcacataccaacccaagacttcttcataagtatggctctttgattactggtacaccactaaactgaagtatcatgtccagacacacagcacccagatgaacctatttcccaagtgctccacagctgtgagatctgtaaatgccccagttcccaccaatgtttccaattgccatacagctccttgcttatgggaattgtgggtgacagctcagaagtccaagccacaaacacagccagagtcctcaactacacagtccccaagaaagtgagcaaagagacggggcacaccaattgcccccattagaatgattcaccaccatgaaagctagtgacagaaacccacccatacttacaggtaaagaaactgaagcccatatttctaagagttgagtacaaagccaatttccatacaagagagaccagaaccctggttgtctggctaaagtctggtgctatgcatacttccactacatggtaagcctatttggatctcttttaagccttaaggatataggccagttcccatggttttggcttctactgaatccaaaatgttttccaagcacgatttaaacactgcttttcctttgcccatcccaccctctgtgtaactgctcccagtgtctcataaaccagagatttgtgtgtgcgctaacatgccaagatattggctgcaatatagcagaccccacccagaaccctgtacctttagatgcatattaaagtcctggcttttgaagggttaaccattttatttaaaccagaccttcgtactttaaaaaaaaacaaatacttcttttactaagaatgctcaaggaaagtacactagttgcgtgtatttcttaattgtctttgcccccttttcctggaagcctaaaaatggtaccagtagattaagctggttttctttccaaattgccagggacctacagctcacattagtcacccccgttaaggccacagattaaatgtcaggatgtactgtagacattttccaaaggaaacggaaaacacgttacatgaattttagagcaaactgtaacaaacactaaccgtaaatagccttcccagataactgcttcatatactagatccatttacgaaataacagtagaagcagtgaacaaccaagtcctaacactgtgtccaagacagcattactgccctagctgcttacatttctgccccaagggttcctcctgcctctctttttaccaggtccaacctccctgcactcaggtaacttactcttgcaagtcaagggcaggatttaagctaaggtaagggccttattttaaccctcaactgtggtccagcaatgacccccatgtcttcattattctcctaaactcacataactaaatctagaaatcttcagtgacagaaagaaggatgaggatgacgaatgtacagagtcaggctcatggagccttctcaataacaaacgaagggaaggagaaggttccgtctgcacggagtcagtttcgtggcctgcctccttgatttggattttttggagagagtaggtagctccataatagagtttactggaaatgacctgaacagatttctaaagtttatcaggtcgagacttctttatcttagaaagattgtcttgattcatgctactttctgcacctttctagggagtcctaaagactcttccaaaatatcaatggaatgacaggacatctggggcagactgaatacaagttttgttccataagagtcccctgatccactgaagctattaatgctatagtgttagtcaggggaagaggcccaatggtctttattgcaaaggaggatattgtgttacctcactacaatccagatataaaacaatgtagagaaacaagacaaccatcctgggctgcacattgttatttactcaaaggccatattgaaagtcttgcacaaagacttgcacaaaagactcccctagagtcttggggaaagggaggttggtgacatgcaatacatctaaaagaggtctcctagaagtgatgagaatgagctggacctcaaagatgcagattttgataaatgacacggaggattcctggaacacagcagtaagaacaaaagttgccctgttcatagcctacaggaacacaaagagaagagccagcctagtctgactgtccttatctgtgccataacccactcccttcagaatgtgccctgcctaccaatgacccacaggatcctcccatgcctcatacaacctttccacccgggaagatggtgcacacccaagctccagccatgtgagtctgcttgatccaccaccaatccccaccaccacagtcttccctatccctaggtccaccccaatattccaggcttggaccagaatgcacaccctgcataacagcccagttccctgtgttcacctgagttcattcaccctaagctatttccaggctcaatgtttaacccattcagacatcctcagttatgccccaacctactctttccatgtatcagtcacaaaactaataatattttttaaaatgccacatgcccagatctcattggaaaagtacaaacaatatgaaagatcggatcagaaacccctctctgaaacctacaagtcctgtagagatgcttgcccgtgattattaactggaagaaccctaggacacagaatttaaagaaaatcataagcttcatcaaatgattcaaggagtttaaagaaaacacaaagaaacatctcgatgaaatttaaagaaaagtaaccctaaagacaataaacacctgagtgatactcaagacagacaaacagaaggctgatgtaaatcatgaagaccatccaggatttgaaaacagaagtctataaacagaaacattaaagaaggctcaagctgagatgaagataagattgaaaaactcagtgacacaactagaaaacttagaagaaagggcaaaagtgaatcagaagacgatatcaggacttgaaaataaagggggatctagaggaaactagaactataaaaataaataaataaataaaatgtgaagaagagatatacaggaaatgtgggtcgctgtaaacaaacaaacaccatagaaaactttccaaaactgtaaaataatacacccatgtaagacgtcaaatagacaaggccagaaaagagcgtctccatagcatatcgtagctaaagcattaaatagacacaacaaagaaagtgttttgaaagatgcgagagggaaaagataagattcaagtaaagagagacccatcagaacaacggctgatttcctgatggaatctttgaaagcagaatggccatgaaaaacacattccaagtcctaaagacattgatagtcaacctacaataatgcacccagcaaaacaatctgacatagttgaagaaggaagaaaagttgtccatgatataaacagcctaaaaaaaaacaaaaacaaaaacaaaaacccaaaaacaaacaaacaaacaaaaaacaaaaaacatgtatatccaaaaaaacaaactcaaagagcagacaggacgcactattgtaggctgaagagaggagtaagcaaaaccaagagactgtaggaacagagaggtagccattattactaagacacaaagtacccctgagagcataaacaacacagacaaaagtcaacaatgccccaaattaacatgcacatttcagtcctaactttagatataagtggcctcagttctccattcaaaagccacagactggctgaatgggtcaagaaacaaaacacatggatctgttttctgaaagaaacacatcttggcttaaaaaaaaaaaattagggtctgccttggagtaaaaggctaggctcagtccctgcagaagaaaaccccagcctgtcttctggagaacggtggagtctgctctgcccaagagctagctgttgacatttctcacaaaacaccaagaaaaatacagagagagaaaaacctttcagtcttgaaaattatactttataatccattatggtgaaaactgtccagctaatagataagtctaacactgtagccatgtgtgtcagcccctataatcaatttagtttctttccaagcttttcctttaatattgtgttaaactattccatgagctggttgagaacataacggacatgaaggttcatgtgataagtaattccacaagtcatttttgaaagcataagtgcatttgacctaacaaggctaattcacatattaaagggccagcccttacaattgtcatgttcatcccataactatttctccaggaacctggcagtttaattcttctcctttatctttctggcctcaccgtaccaaatggttttcagaacaggaggaaaaagaaaccgttttctagcatctgttttaaatctgggttttgtctgcattgtgtgtctgactttgtccttatatttgttttacaacaaaaacaaaatagagagaagatatcaactctgtcctcaaaagtttatataagatcctcttcgctgttgataataaaagcagctctattttataacattgatctcatccatgatccacagccatccagttccctcacttccttctagttttctcttttgaacgcagatgggggattagtcaatggcatgtgcattccttcaaggtccccgaatagctgctgtgtctatagagttagtctgtccatgggtccacagataccaccgatcacccactcaccctttgaacttatatttggatcagatcagcgagaggtggtatgaagagtggtgtttaatacataatctttccataattactagccctcaagcaattcatgactcctgatgtaacataaaaccttaggtgtgagacaacccaggtctcttcctattttcctactgtgactattgagtgacagagaaaagataaatatgaggtcaaataaagctataagcttcaaagatcatataaaataatctttgttgctaattgattaattaaactgattttatttacattcatagtgtgtatctttgatctagctgagtatcgagatctgaaatcatttaacacagattccaatgccatttctattgtttgaaatatgctccttttagacttaatgaatcagaatttcaaaaaaatatgtcaagtaatatgcagactcaacagacatctattagtaaaatctacagtggaccattgctttgaactagtctactgcagcagggtacaacagaccacatagcttgttttgacgatgggaaaagcaagctatatcagtttcctaggatgctagaacaaagcattaaaaaccaagtgccttaaaaaagaaaggaatgactcaggatagggaaataccaggacagggaattgggaatgggtgggttagcaaacagcaggagggggtatatgatggggggttttcagaggggaaatgaggaaacaagataaaatatgaaatataaataaagaaaatatctaataatttaaaaaaagaaaaaaaagagaaaggaattgtcacaaatttctaaacactgacatcaaggcatgtgtggtcccatgttcattattcagcctgtagtgtagatttttagccttgactggtttgctagagcatctgttgactctcatttccagttattcagtttctgattctataggcatgtgacaagttcctctcaatgtaactttctctatatatggtctccttttataaagaccccagacatatcggggtaaagaactactgtaatccattgtgattttgttctggttaattatgagacaaggcctcatgctgtatagccttgtctggc

SEQ ID NO: 1138 - DNA, 8623 bp, Mus musculus
  misc_feature (1)...(8623): n = A,T,C or G
atggggagacggcggcggttgtgtctccagccctacttcgtgtggctgggttgcgtggcgctctgggcgcagggcacagatggccagccccagcctcctccaccaaagacgctccggccccagccgcccccgcaacaggtccgacccgcagtagcgggctccgaaggtggcttcatggggcctgagtatcgggacgagggcgcggtagcagcgagccgggtccgcaggcgaggacagcaggaaatactccgagggcccaacgtgtgcggttctagattccactcctattgctgcccaggatggaagacgctccctggaggaaatcaatgcattgtccccatttgcaggaacagttgtggagatggattctgttcccgccccaacatgtgtacttgttccagtggacaaatatccccgacatgcggactgtctgtgagaatggatgccagaacggggggcgttgtatcggccctaaccgctgtgcttgcgtttatggattcaccgggccgcagtgcgaaagagattacaggacaggcccgtgtttcactcaagtcaataatcagatgtgccaggggcagctgacaggcatcgtctgcacaaagacactgtgttgtgccaccatcggacgagcctggggccatccttgtgagatgtgtccagcccagcctcagccctgccgccggggcttcattcctaacatccgcactggagcatgtcaagatgttgacgaatgccaggcgattccaggactgtgccaggggggaaactgtatcaacacagtgggctcgtttgagtgcagatgccctgctggtcacaagcagagtgaaaccacacagaaatgtgaagacattgatgagtgcagtgtgattcctggggtctgtgagactggcgactgttccaacaccgtgggaagctatttttgtctctgtccccgtggcttcgtaacctcaacagatggctcgcgttgcattgatcagagggctggaacatgcttctccggcctggtgaatggccgttgtgcccaagaactcccgggccgaatggcaaaagctcaatgttgttgtgagcccggccgttgctggagcatcgggaccattccggaggcctgtcctgtcagaggttccgaggaatatcgtagactgtgcctggatggtcttccgatgggtggcattccagggagctcggtttctaggcctgggggcacggggagcaacggcaatggctatggccccggtggaacaggcttcctccccatccctggagacaatggcttttctccgggtgttgggggagctggagtaggagctgggggacagggacccatcatcacgggactaacaattctcaaccagacaatagacatctgtaagcaccatgccaatctctgtttgaatggacggtgcatacctactgtttctagctacagatgcgagtgtaatatgggctacaagcaggatgctaatggagattgtatagatgttgatgaatgtacatccaatccctgcagtaatggagattgtgttaacacacctggatcctattactgtaaatgtcacgctggattccagaggactcctacgaaacaagcgtgcatcgatatcgatgagtgcatccagaatggagttctgtgtaagaatggccgatgtgtgaacacagatggcagtttccagtgcatttgtaatgctggctttgaattaaccacagacggaaaaaactgtgttgaccatgatgaatgtacaacgaccaacatgtgcttgaatggaatgtgtatcaacgaagatggcagcttcaagtgcgtgtgcaagccaggcttcgtcctggctccaaacggccgctactgcacagacgtggacgaatgccagaccccaggaatctgcatgaacgggcactgcatcaacaacgaaggatccttccgctgtgactgtcctcccggcctggctgtgggtgtggacggacgtgtatgtgttgacactcatatgcgtagcacctgctacggggaaatcaagaaaggagtgtgtgtgcgtccattcccgggtgcggtgaccaagtctgaatgctgctgtgctaatccagactatggttttggagaaccttgccagccttgccccgctaaaaattcagctgagttccatggcctctgtagcagtggcatcggcatcactgtggatggaagagatattaacgagtgtgccttggaccctgacatatgtgccaatgggatctgtgaaaacctgcgaggcagctaccgctgtaactgcaacagtggctatgaaccagatgcctcaggaagaaattgcattgacattgatgaatgcctggttaataggctgctttgtgacaacggcctatgcagaaatacccctggcagttacagctgcacgtgtccccctggctatgtgttccggacggagacagagacctgcgaagatgtaaatgaatgtgagagcaacccgtgtgtcaatggagcctgcaggaacaacctgggctctttccattgcgagtgctcgcccggcagcaagctcagctccaccggactcatttgcatcgacagcctgaaaggaacctgctggctcaacatccaggacaaccgctgtgaggtgaacattaatggagccaccctgaaatccgaatgctgtgccacacttggagccgcttgggggagcccctgtgagcgctgtgagctagatgcagcttgcccaagagggtttgccaggatcaaaggtgtgacttgcgaagacgttaatgaatgcgaggtgtttcctggcgtctgtccaaatggacgctgtgtcaacagcaaaggctctttccactgtgaatgccctgaaggtcttactctggatggtaccggccgggtgtgtttggatatccgtatggagcactgcttcctgaagtgggatgaggatgagtgcatccaccctgtccctgggaagttccgcatggacgcctgctgctgtgcagtcggggcagcttggggcacagagtgtgaagaatgtcctaagcctggcaccaaggaatatgagaccctgtgcccgcggggcccaggctttgctaacagaggggacatcctcactgggcgtccattttacaaagatatcaacgagtgcaaagcctttcctgggatgtgcacctatgggaagtgcagaaacacaattggaagcttcaagtgccgttgcaataatggcttcgccctggacatggaggaaagaaactgnnnnnnacattgatgagtgcaggatctcccccgacctctgcggcagcggcatctgtgtcaacacgccaggcagctttgaatgcgagtgctttgagggctacgagagcggcttcatgatgatgaagaattgcatggacattgacgaatgtgaacgtaaccctctcctttgtaggggtggcacctgtgtgaacactgagggaagctttcagtgtgactgcccactgggacacgagctgtcaccgtcccgtgaggactgtgtagatattaacgagtgctccttgagcgacaacctctgtagaaatggcaaatgtgtgaacatgatcggaacttaccagtgctcttgcaatcctggataccaggccacgccagaccgccagggctgtacagatatcgacgagtgtatgataatgaatgggggctgcgacacccagtgcaccaactccgaaggaagctacgagtgcagctgcagcgaggggtacgcactgatgccagacggacggtcgtgcgcagatattgatgagtgtgaaaataaccccgatatctgtgacggcggccagtgtaccaacattcctggggagtatcgctgtctctgttatgatggcttcatggcttcgatggacatgaagacgtgcatcgatgtgaacgagtgtgacctgaatcccaacatctgcatgtttggggaatgtgagaacacgaagggctctttcatttgccactgccagctgggctactcggtgaagaaggggaccacaggatgcacagacgtggacgagtgtgagattggcgcccataactgcgacatgcacgcctcatgtctgaatgtccctggaagcttcaagtgcagctgcagagaaggctgggtgggaaatggcatcaaatgcattgatctggatgagtgcgcgaatggaacccaccagtgcagcataaacgcccagtgtgtcaacaccccaggctcctaccagtgcgcctgctcggagggcttcacgggagacggctttacttgctcagatgttgacgagtgtgcggaaaacacaaacctttgtgagaacggccagtgcctgaatgtcccgggagcttaccgctgcgagtgtgagatgggcttcaccccagcctcagacagcaggtcctgccaagatattgatgaatgctccttccaaaatatctgtgtctttggaacctgtaacaacttgcccgggatgtttcattgtatctgtgatgatggttatgaactggacaggacaggaggaaactgtacagatattgatgagtgcgcagaccccataaactgtgtcaatggcctatgtgtgaacacgcctggtcgctatgagtgtaactgcccgcctgacttccagctgaaccccactggcgtgggttgcgttgacaaccgcgtgggcaactgttacctgaagtttggtcctcgaggagacgggagtctgtcctgcaacacagaggtcggcgtaggtgtcagtcgctcctcctgctgctgctccctggggaaggcctggggaaacccctgtgagacatgccctcctgtaaacagcactgagtattataccctgtgtcctggaggcgaaggctttagacccaaccccatcacaatcatcttagaagacattgatgaatgtcaggagttaccagggctctgccagggtggaaactgtatcaacacttttgggagtttccagtgtgagtgcccacagggttactacctcagtgaggaaacccgcatctgtgaagatatcgacgagtgctttgcccatcccggcgtctgtggacctggcacctgctacaacaccctgggaaattacacttgcatttgcccgcctgagtacatgcaagtcaatggaggacataactgtatggacatgaggaaaagcttctgctaccgaagctataatgggaccacatgtgaaaacgagctgccttttaacgtgacaaagaggatgtgctgctgcacatacaatgtcggcaaagcctggaacaaaccttgtgagccgtgcccaaccccagggacagctgactttaagaccatatgtggaaatattcctggattcacctttgacattcacacaggaaaagctgttgacattgacgagtgtaaagagattccgggcatctgtgcaaacggtgtgtgcattaaccagatcggtagcttccgctgcgaatgccccacaggcttcagctacaacgacctgctcttggtctgtgaagacatcgatgagtgtagcaacggcgacaatctatgccaacgaaacgcggactgtatcaacagccccggcagctaccgctgcgagtgtgcggccggcttcaaactctcccccaacggggcctgtgtagatcgcaatgaatgcttggaaattcctaatgtttgcagtcatgggttgtgtgttgatctgcaagggagttaccagtgtatctgcaacaatggctttaaggcttctcaagaccagaccatgtgcatggatgttgacgagtgtgagcggcacccgtgcggaaacgggacttgtaagaacactgtgggatcctacaactgtctgtgttaccctgggttcgagctcactcacaacaacgattgcctagacatagacgagtgcagctcgttttttggccaggtgtgcagaaacgggcggtgcttcaatgaaatcggctccttcaagtgcctgtgcaacgagggttacgaactgactccagacggcaaaaactgtatcgatactaatgagtgtgtcgcacttcctggctcctgttctcctgggacctgtcagaatttggagggctccttcaggtgcatctgcccccctggatatgaagtgagaagcgaaaattgcattgatataaatgaatgcgatgaggaccccaacatttgcctttttggttcctgcaccaacaccccagggggcttccagtgcatctgtccccctggctttgtcttgtctgacaacgggcggagatgcttcgatactcgccagagcttctgcttcaccaactttgaaaacggaaagtgttctgtacccaaagccttcaacaccaccaaggcaaaatgctgttgcagcaagatgccaggcgagggctggggggacccgtgtgagctgtgccccaaagatgatgaagttgccttccaggatctgtgtccatacggccatgggacagtccccagtcttcatgacacacgtgaagatgtcaatgagtgtcttgagagcccaggcatttgctcaaatggtcagtgcatcaacactgatggatctttccgatgtgagtgtccaatgggctacaacctggattacactggagtccggtgtgtggacaccgacgagtgctccatcggcaacccctgcgggaacgggacgtgcaccaacgtgatcgggagcttcgaatgcacctgcaatgaaggctttgagccggggcccatgatgaactgcgaaggcaaacatcaacgagtgtgcccagaacccgctgctctgcgctttccgctgcatgaacacttttggatcttacgagtgcacgtgcccagttggctacgccctcagggaagaccaaaagatgtgtaaagatctggacgagtgtgccgaggggctgcacgactgcgagtctagaggcatgatgtgcaagaacctgatcggcaccttcatgtgcatctgccccccaggcatggcccgcaggcccgatggcgagggctgtgtagatgagaacgaatgcaggactaagccaggcatctgtgaaaatggacgctgcgttaacatcattgggagctacaggtgtgagtgcaatgagggattccagtcgagttcctccggcactgaatgcctcgacaaccgccagggtctgtgcttcgccgaggtactgcagacaatgtgtcagatggcctccagtagccgcaacctcgtcacaaagtcggagtgctgctgtgacggtggccgaggctggggccaccagtgtgagctgtgcccacttccaggaaccgcccagtacaaaaagatatgtcctcacggcccaggatacgccactgatggaagagatatcgatgaatgtaaggtgatgccaagcctctgcactaatggccagtgcgtcaacaccatgggctccttccggtgcttctgcaaagttggctacaccacggacatcagcggaacagcttgtgtagacctcgatgaatgttcgcagtctccaaagccatgcaacttcatctgcaagaacaccaagggcagttaccagtgctcctgcccacgggggtacgtcctgcaggaggacggaaagacgtgcaaagacctcgacgaatgtcaaaccaaacagcacaactgccagttcctctgtgtcaacaccctggggggattcacctgtaaatgtccgcccggtttcacccagcatcacacggcttgcatcgataacaatgaatgtgggtctcagccttccctctgtggtgcaaaggggatctgtcagaacactcctgggagcttcagctgcgaatgccaaagagggttctctctggatgcctctgggctgaactgtgaagatgtcgatgagtgtgatgggaatcacaggtgccaacacggctgccagaatatcctgggaggctatcggtgcggctgcccgcagggctacgtccagcactaccagtggaaccagtgtgttgatgagaatgaatgttccaacccaggtgcctgtggctccgcctcctgctacaacaccctggggagttacaagtgcgcctgcccctccgggttctccttcgaccagttctccagcgcctgccatgatgtgaatgagtgttcctcctccaagaacccatgcagctacggctgctccaacacagaaggcggctacctctgcggctgcccaccagggtacttcagagtgggacagggccactgtgtctcgggaatgggcttcaacaaaggacagtacctgtcggtggatgcggaggcagaggatgacgaaaacgctctgtccccagaagcatgctacgagtgcaaaatcaatggctacaccaagaaagatggccgacggaagaggagcgcgcaggagcctgagcccgcctcagccgaggagcaaatcagcctggagagcgtagccatggacagcccagtcaacatgaagttcaacctctccggccttggctccaaggagcacatcctagaactggtccccgccattgagcccctcaacaaccacatccgttatgtcatctcgcaagggaacgaggatggcgtcttccgaatccaccaaaggaacgggctcagctacctgcacacggccaagaagaagctcgctcccggcacatacacactggaaatcaccagcatccccctctatgggaagaaggagctgaggaaattggaggagcacaatgaggacgactaccttctgggggtgctcggggaggctctccgaatgaggttgcagattcagttgtattag

SEQ ID NO: 1139 - protein, 1280 aa, Mus musculus
  VARIANT (1)...(1280): Xaa = Any Amino Acid
SGMRMSASTLSLGSSAWTPAAVQSGQLGAQSVKNVLSLAPRNMRPCRAQALLTEGTSSLGVHFTKISTSAKPFLGCAPMGSAETQLEASSAVAIMDWTWRKETXXXIDECRISPDLCGSGICVNTPGSFECECFEGYESGFMMMKNCMDIDECERNPLLCRGGTCVNTEGSFQCDCPLGHELSPSREDCVDINECSLSDNLCRNGKCVNMIGTYQCSCNPGYQATPDRQGCTDIDECMIMNGGCDTQCTNSEGSYECSCSEGYALMPDGRSCADIDECENNPDICDGGQCTNIPGEYRCLCYDGFMASMDMKTCIDVNECDLNPNICMFGECENTKGSFICHCQLGYSVKKGTTGCTDVDECEIGAHNCDMHASCLNVPGSFKCSCREGWVGNGIKCIDLDECANGTHQCSINAQCVNTPGSYQCACSEGFTGDGFTCSDVDECAENTNLCENGQCLNVPGAYRCECEMGFTPASDSRSCQDIDECSFQNICVFGTCNNLPGMFHCICDDGYELDRTGGNCTDIDECADPINCVNGLCVNTPGRYECNCPPDFQLNPTGVGCVDNRVGNCYLKFGPRGDGSLSCNTEVGVGVSRSSCCCSLGKAWGNPCETCPPVNSTEYYTLCPGGEGFRPNPITIIDIDECQELPGLCQGGNCINTFGSFQCECPQGYYLSEETRICEDIDECFAHPGVCGPGTCYNTLGNYTCICPPEYMQVNGGHNCMDMRKSFCYRSYNGTTCENELPFNVTKRMCCCTYNVGKAWNKPCEPCPTPGTADFKTICGNIPGFTFDIHTGKAVDIDECKEIPGICANGVCINQIGSFRCECPTGFSYNDLLLVCEDIDECSNGDNLCQRNADCINSPGSYRCECAAGFKLSPNGACVDRNECLEIPNVCSHGLCVDLQGSYQCICNNGFKASQDQTMCMDVDECERHPCGNGTCKNTVGSYNCLCYPGFELTHNNDCLDIDECSSFFGQVCRNGRCFNEIGSFKCLCNEGYELTPDGKNCIDTNECVPGSCSPGTCQNLEGSFRCICPPGYEVRSENCIDINECDEDPNICLFGSCTNTPGGFQCICPPGFVLSDNGRRCFDTRQSFCFTNFENGKCSVPKAFNTTKAKCCCSKMPGEGWGDPCELCPKDDEVAFQDLCPYGHGTVPSLHDTREDVNECLESPGICSNGQCINTDGSFRCECPMGYNLDYTGVRCVDTDECSIGNPCGNGTCTNVIGSFECTCNEGFEPGPMMNCEGKHQRVCPEPAALRFPLHEHFWILRVHVPSWLRPQGRPKDV

SEQ ID NO: 1140 - DNA, 420555 bp, Homo sapiens
  misc_feature (1)...(420555): n = A,T,C or G
tggggcttgcttgggcctgatcatgtatatgtcacttccgtttgatgatgaaatgcttttgtgcacacccagctttatgaagtgtttggtcaggtagcacccagttcatgaccacatggtcatctcaggtcacgtagtaacttagtggcccatggtcaaatgttcagtttctactaaagcccagtaacaggccaagagctgtttcccgaaagaagaataattatctgtgggtgatggcagggccttgctccaaatcctaaaggccagtgctgtgattcacctacagagggctgccaaaggctccaaacagcatcttccactaacacatcaaatatcattgggtctgctggaccatatggcccaagtgaaggcataagtaagttacttgaagaagtggcccaagagcccatggttcctactcttgacacactgccctcgctctccaaacctgcacctatggcctcatagggagtatcctatgatcagctgatagagggagagaagactaggacctggtttacagacagttctgcaagataggcaggcaccacctgaaagaggataactgaagcattacagctccttactgagacatgtctgaaggacaatggtgaagaaaaatcttctcagtgggtggaagttcaggtagtacacctggtagtacactttccttggaaggagaaatggccagatgtgcaattatataccaatttataagctgtagccaatggtttggctggatagagtttgggactgagaaggaaccaaactgacaattgggaagtacatgacaaagaaaatttggggctgggtgcagtggctcatgcctataatcccagcactttgggaggcttaggcaagagaattgcttaatcccaggagttcaaaaccatcatgggcaacatgatgagacccgatctctgcaaaaaccaaaaagttagtcaagcatggtggtgtgtgcttgtagtccctgctgctcaagaggctgaggtaggaagatcacttgggcctggcaggttgaggctgcaacgagccatgatcatgccactgcatgcactccagcctgggctgcaaagtgagattctgtctcatagaaacaaagaagaaaaaaatttggaaaagggatatgtagacagacctctctgagttggcaaaggacataaaggtatttgtgtctcatgtgaatgctcaccaaatcatagcagaggaggactttactaatcaagtggataggatgactcatactgttgatttagaactggtggtggctttccccagccaaccctgccattgcccaaaaagctcatgaacaatgtggccatggtagcaggaatggagtggatgcatgagctgagcaacataaactttcactcagcaatgtcaacctggttatgccatcgatgattgcccaaactaccagcatcagagaccaacatggagcccccaagatggcacaattccccaggctaatcagccagttacctgacaggttgattatattcaacctcttccatcataaaagggcagcgtttttgttgttactggaatagacattactctggatatagatctgccttccctttgcatttccggcatacaaagcttctgccgaaactaccatccacggacttacagaatgccttacctaccatcacgatattatacacagcattgcttctgaccacaaaactcaccccaagaccaaagaaatgtgccaatgggctcaagcaccagaattcagtagtcttaccatgttcctcatcatcctgaagcagccagcttgatagaaaggtgaatggccttttgaagactaagttacagtgccatctagctgacaatactttgcagaactggagcaaggttctccagaaggttgcatatgctctgaatcaacatccaatatatggttctgtttctcccatggccaagattcatgggtccagagatcaaagagtagaaatgaaagtgacaccacctcaccattactcctagtgacccactagcaaaattattgcttctgttcctgtggtgactttatgttctgctccctagagttccagaaggaggaatgcttccactaagaaacacaaaaatgcatccattgaactggaagttcagactgccacttagccattctggactcttcacgcccctgagtcaacagactaagaagagaattactgtgttggcagtggtgattgatccagattatcaacaaaaaattagactattactcaacaacggcaataaggatgaatatgtcagattacataagatctcttagggcatctgttagaattactataccctgtgataaaggtgagtgggaaattataacaacccagaccaggcaggactacaaatggcccagacccttacagaatgaaggtttgtgttatctttccaggtaaagaaccataaccaactgaggtgcttactgaaggcaaagggaatacagaatgggtactagaagaaggtacttataaataccagctatgatcatgtgaccagttacagaaacgaggattgtaattgtcgtatttcctccttattttgttaaagataggtttatgtgtatatatacatatagtaagcaaatatcttggtttttgctcctctcattcatttatcatgtaacataagattcatcaactttatattagcatttaaatattgttaattttatatcattagtttatgagtaatcagcaaactgtaaacatcactcaaggactttaccttctcttctgaggaagacattagtggattttcgcttgaatgcaggatagctgcatcatgttagattgataggtggaaccttgttattgtctttatttgaaggtttagtatggtttaaggagatgagtatgggtgtcaaattgacctggggtggatttataacgattaattttaggtgtcaacttatattaagggatacctagagagctggtaaagcattatttctttaccagatctcatctgcaagcgtgtatccacaggaaattggtgtgtgaatcactgggatgagtgaaaagatctgccccaatgtggtcgggcaccaaccagtcagctgggaccaggatagaacaaaaaggcagaggaaagatgaattctttgtctttcttttctggggctgggatgcccttcttctcctgcccatggacatcagaactccagattctgtggcctttgaactttgggacttgtaccagtggtctcttggactttgaggcctttggcctcagactgagtgttacgccatctctttccctggttgtgaggccttcagacttggactgagctgtgctactggcctttctgggtctctagcttcgagatagtctatgggacatctcagcctccataatctctgagtcaaatttgctaataaatcccctcatatctatctatctattatctatctatgctattgattctgtctctctagagaaccctgactaacattgttacaagcctggagaaggctttcgaaatagacagtggaagttgttactggagcccagagaaatgtgtgaagagagatgccttgcaggagctttgggcttcagtagaggaatacagccaatatatgagggtagaggggtgagaaggggaataaaagccttgacctcattttcttgtcctcagtctaatttcctgtttgtgcctcccattggccaaactgtagggatctcatagatagagtatacaaaggtcaacattttgaggccgaggacatgatacagaaggatgaacagtgcctttggaggaagagatgccaattcagaactcatgaactttctcataatatgtatgaatgcacatgtgtggaggggagggaattttcttggaaaaataataaacacagcagttgctgatcaacttcattggtcattaccatgaaggactgtgggcacaattttgccctttagataaggcttaaactctcctgtttgccacagtcttcactttgttggttatttatgttatttatgttagcagcctggccttgtagacttttgtgtctatgagttgtaaacttccaagttgttgtaaatattataatgaaggtatgcacaagataaattgcttattcctgcttggggaaatagagaaaggatttctagaaggcttgatgtttgaactgagtcttaaaatatagatttcacaaggtggatattatggggaaggcacgccaggcaatggaaacaatattaatgaagacttaaaattgctttaacatacagttgaagaaactaaaaggtatttaaacatggttgcagcaccaggttgttggggttattggtagagatgagaaaggaaaggcagccaggggccacataatgaaaggctgacagcatgatgccaaggaatttactcttcattctgtagatcactgtttcccacttctaggaaagagggtgatcctcaaaccacataggaaactatcaattattgtcacctaagaagctgtgaaaatgcaaaatttctagactccaatccagacttcataaatctatactttttattaattcctcctgtgattctgatggctatccaagtttagggatcctagatgtaggttttcaaggtctactgcatgatatgtaatatggtgggtgccttagcagagttgcctttaagaaagatcattctagatgcagtaaaatatcagccagaaattgagagaatcatagattgggaatttattcaggaaattattataattcagaagaaaacaggggaacttgataaagagatgaatgagttcaagactaatttcagaggtgaaattaataagatggtgaccaattaaatttggcaggtgagtgaaagggaagagttaatataaattttagatttatggaattatatatcagtgtatgttgtgagtctagaataccaaaacaagaatggattttgaaaaagatatttcatatccatggaatgtggggttcatgtgtggaatcaacctagaaacattatatatcatttttaaaatctgacattctctctttgaaggttctggttttgtaaagatttgttccacaaattattcctcttaaaagacctcttaacccagcatagctgctgcttttctccaaaatttctagaaccaggtaaaattttcaactttacctttattctcactttcatggaaacagtcgtttgtagttttcatcttgatagaagagattcatttctatgcctagaaaggtaaatattgttacatataataacaatgaacagcacaaaatgcctaactgcatattaatgaaaagtaaacttaagcagtccttactaatagtatataataaaaacataattcaaaatgccattaggctagcctgtcagcagtcaaaatgcacatatgatattgtagaatttagacataagaaaaactctttatgtacacacagccatttcttctcagtaacgaataaaaatgcaaggtaaacactaagtgaagcataaaacgtttggaattaatttgactttttttacccagcttttttaagaggttctcacaattctctgaagaaattctgatccatgaactatgtaaattgctcctttacatgacatttacagtagaaagatatactcaagagattgggttgtcataagggagagaaaccttaatccagaccatttattgtaaaagcgtatacaaattgtattaatatgtagatgttctctggaaaaaataaaatacttctctcattcatccttgctgattccctatagatgataaagagactgcctttatctacattttagaaagctgaatttaaaagagttgattcgacttctacattttttagtaatatcttctggcaaaaattttatttacatatatccaggaatatccttataaatatgtgaaattgtacatatgatgtaaattaaaatttcattgaagtctctctacataaaaatttattaagtttaatacctagaaaatatgttaaaattatgctgagtcagtgacattaaaaaagaaattgtgactatctttgttgattaaaaggaaggtactccaagaaaggtaacacattttaaattttgttatcatttacatttattcaaaaatatatcgtatcacctccctccttaacatcttgctgagatcagaccactaaggaaggaagtgtgagggaagatgaaagggtgataattttatataattttaagtttctagatagaagtgtttgaagatgtgcctctgagagcagcctaaactccctgacacccagagaagtttggggaaaataagtatgcaaagcaaataaaccatgcaaaataaataaactatgcatagtaagccaaagggaagtttcacaatcttgacaatgataatccctggatacagcatgtatcgttattatacctttgctttctctactctgcctgtaccactaccactatccgatggcttatggaatgctggacccaccatcatgaaataccacacagcataggatcagaccaggagagcatctgtccactgcacagtaagggaggtaccaaagtaagcccatgactatgggatcctctgggtgtgtcctttaagaaaggaaaagaatagtaaatctaattaaaattcttgaccaacaaagggtattaagaacagaatttagaatgcatcatcctatatatctaaggaccaagttgtacaaatatttgtatggtcatgtgatttcatttcctttggtgaaatacctaagaatggaattgctgagtcctttggtaagtgtttaactatataaaaactagattacaaaaactaccaaactgttttccaaaggtgttgcacagttttgcactcccactaaaaatatacgagttccaggcactccatgtactagcaaaatttttgtgttgtcagtttatataattttaaccattctagtggatgtatagtgtcatctcactaaggtttaaatatgcatttttctaatgaccaattaatgacattgggtatcttttcatatgcttattgggctttatatatcttcttttaaaaatacctatacaaatcttttgccaagatttaaatatggtatttgtcttcatattattgagagaggggaattcattacatgttctgcatactaatacttgagtcaaatatatgtatggtaaagtttgccttttcattctttatactgtctttagaatgacagaactattattaattgtgttgataactaatttaccaatatttttcttttgtggtttgtgcttttaatatcccttaaagaaatctttgtctaatcctatgtattgatcccctttcataatgctgtaaagaactgcccaagactgggtaatttataaaagaaagaggtttaattgactcacagttctgcatgtctgtggaagcctcaggaaatttacagtcatggcagaaggggaagcaaacaccttcttcacaaggtggcaggaaggagaagtactgagcaaaggtggaagagccccttataaaaccatcagatctcctgagaactcactcactatcatgataacagcatggggaaaccagccctattattcaattacctttatttggtgttccccttgacacatggggattatggagattatgggcattacaattcaagatgagatttgggtggggaaacaaaccctaaccatatcaccttcactatgattcacttaccttcacctcatctctcccttgacacatggggattatggggattataaggattacaattcaagatgtgattttgttggggacacagccaaaccatatcattctgttcttggtccctacaaaatctcatgttgctttcactcttcgaagcaagtcatgccttcccaatagtcccccaaagtcttaatttattccagctttaacccaaaagtccaagtccaaagtctaatctgagacaaggcaggtcccttctgcctgggagcctgtaaaatcaaaagcgagttaattactttctagatacaatgggcgtacaggtattgggcaaatacaccattccaaatgggataaattggccaaaatgaaggggctaaaggccccatgcaactctgaaatccagaggggcagtcaaatcttaaagctcggaaatgatctcctttaattctatgtctcacatccaggtcacactgattcaagagctgggttcccatggtcttgggcagctctgtcctgtggctttgcagggtatagcctccctcccggctgctttcgcatattggtgttgagtgtcggcagcttttccaggcacatggtgcaagctgttggtggatctacaattctggggtctggaggatggtatccctcttctcaaagctcctctaggcagtgccccagtggggactctgtgtgggggcttcgaccccacatttcacttccttactgccctagcagaggttctccatgaggacctcacccctgcagcaaactcctgcctggacatccaggcatttccatacatcctctgaaatctaggtagaggttcccaaacctcagttcttgacttctgtgcacccacaggcccaacaccacgtggaaaccaacaaggactagggctttcaccctttgaagcaatggcctgagctgtatgttggccccttttagccatggctgggatacagggcaccaagtcccaagattgcataaagcagcaaggccctgggcccagcccaggaaaccattttttcttcctagccctctgggcctatgatgggatgggctgccatgcagacctctgataggccctggagacatttttcctattgtcttggtgactaacatttggttcctttttactcatgcaaatttctgcagccagcttgggtttcttctcagaaaatgggtttttcttttctatcccatcatcaggctgcaaattttctgaacttctatgttctgcttccctactaaacataagttccaattccaaaccacctcttcgtgaatgcataaaactgaatgctttaaatagcacccaagtcacatcttgcatgctttggggcttagaaatttcttctgccagataccctaaattatctttctttagttcaaagttccacagatctctagggcaagggcaaaatgctgccagtctatttgctaaagtatagcaagagtcaactttattccagttcccaaaaagttcctcatctccatctgagaccacctcatcctggacttcattgtccgtttcactatcagcattttggtcaaagccagtcaacaagtctgtaggaagatccaaattttcccacatctttctatgttcttctgagccctggaaactattccaacctcttcctgttacccagttccaaagttgcttccacattttcaggtatctttatagcagcacccctctctctgaggtaccaatttactgtattagtccattttcatactgctataaagaactgcctgagactgggtaacttataaaagaaagaggtttaactgattcacagtttagcatggctggggaagactcaggaaatgtacagccatagtggaaggtgaacaggaagcaaggcaccttcttcgtaaggcagcaggaaggagaagtgctgaacaaaggaggaagagccccttataaaaccatcagatctcgtgagaactcactcattgtcatgataacagcataggggaaaccaaccctactattccaatacccccacttggtgttccccttgacatgtggggattatggagattatgggcattacaattcaggatgagatttgggtggggaaacacaccctaaccatatcatcttaactatgaattttttttatacttctcttaaaagtttggcagtttagcttttatattgctctaattatctattgctgcataacaaaatgtaccacaatttagaagcttaaaacaacaaccatgtttatttggctcataaatctgcatttaagctgagtttggtaagcactgcttgtctttgttctactcaatggcagttagggcacctggaatggcagttagggcaactggaaggctgggagctgaaatcacctgaagtctcattcactcacatgtctgatggttgatattgtctatcaggtgggatcatagctggtgttgtcaggcagaacacttacctgtggcctcaccatgtggcctggtcttttttataatacgataccatggctgagttcaaacttcttgagggaaagagccagaaacaaaatgtcatacatcatatgacctagcctcaaatgtcatggtatcacctatagtctcttggagtgagttgctaaggctggtcatattcaagactggcccatattcaaaaaggctctgcattttgaaatgtggttaaatctgagcagatgtgtttaaaaccactacatacttttaaatatatgatccattttgagtaattttttagtatggtgttaggtaagaattacaagtaattatttttccaaaaggaatattccatttcagcaccattagttgaaataaatactgttttcctctttgaattacattagaatcttgttctacaaaaattaaataaccacatatgggtgggtctctttttgacattattctttcattctattgatttatatgactatcctaacaccaatactattttttttgataactacagttttataataagtcttgaaatcatgtagtgtaagtcctccaactctgtccttattttcaaaattgttttggctattccagttatgtttatatataaagtttagactcatattgtcaatttctattttttaattctattctagttatatttacatataaattttagaatcatattgtcaatttctattttttaaaaattctactgggattttgatcagatttggataaaatctattgatcaatttgaagataactgacattttaacaatattgagatttccaattcatgaacacagtgtgttgctacatatatttaagtatttccctagggatttttgcatatattttccaatgtacaggtcttacacatatgctgttatatttatccctaagtatgttgtattttcagacacttttaacatggtaattaagaaacttcatctttcagttgttcattgctgttatataaaaatataccattttgatttggaggattttgacctttcattctgcttaattcacttaataattttagtagctgttttgtagattcctttgggttagctatgtaatcatcctttctaacctgtatgtctttcacttctttggcctggtttatatcaggccatggtacattgtttaatagaggcttcatagcaaacctacttgctatttctgatctcaggggaaaatattcaaccttttactaataagtacgatgttagctttacatttttgatagacaccttttttcaggctgagaaatctcctttctattcatagtttgctgagaacttttaacacaaatgagagttgaaatctgtcaaatatgttttggagtagtatttactaatatgatgacatgagtttctccttaatgctcttaatgtagtgaattatatttgattgattttcaaaggcaaaacgatccttagattcttagaataaatgccacacaatcatgatgtattatcctccttttatgttactaggtacaatttgctttcattaataatatttacatctaagttcagaaggaatattgtccaaagttttctgttcttttagtgtttggttttggacacagagtaacgctgaactcataaaatgatctgggaggtattcctgacacatctatttcccaaaacagtgtatataggatcgatacaatgtcttcctaaatatataatagaattggatagcgaagccatctgcccttgagcttgtgtatgtgtgtgtgttgaaaacttttgaattatgaattcaattttagatagatacagatttataaatgtcaatgtcaaagtccagttggttgatgtcttctatatactaatattctgtcaataaatcactgagaaagaagtgttcaatcagcaactgaaattgtacatttgtctgtttcttcttgcagttctataaatgtttgtgttatgttttaaggtgcataaatatttaagattttttacattcgcttgatgaatttacctctttattattatgaaatgatcctctttataaaaaattttttgtgattaaggtggtagttgaaaccaaggtttagaatgatatgtgaggataggatagggggatatagaatgagaaaaagacaaagattaaccacagaactctagggaacaccaatgtttaaggagcaggccaaagtataggagcccattccagaaattaagatggagccaaggacaaacttgaagaagtaccatggaagagtagtgctacagaaacaagtgaaaagggaatttaataagagcatggatattgtttggttttgtgtgcctgcccaaatctcatgttgaattgtaatccccaatgttggagaggggtctggtgggaggggattggattgtggaggtggatttcccccttgctgttcttctgatacagagttctcatgagatctggctatttaaaagtgtggagcacctccccccttgctcttcctcctgctccagccatgtaagatgtgactgctttcccttccaccatgattgaaagtttcctgaggcctccccagtcatgttttctctgtggcctgctgagcagtgagccaattcaacctcttttctttagaaattacccagtctcgattcctgggcaagatggccgaataggaacagctccagtctgcagctcctagcaagatcaatgcagaaggcaggtgatttctgcatttccaactgaggtaccctgctcatctcattgggactggttagacaatgggtgcagcccacagagggggagcagaagcaggatggggcgtcacctcatccaggaagtgcaaggggttggggaactccctcccctaaccaagagaagccatgaaggactgtgccttgatgaacagtgcattctggcccagatgctatgcttttcttacagtcttggcaacccacacaccaggaaattccttcgggtgagtacaccaccagagccctgggtttcagcacaaaactggatgaccatttgggcagacaccgagctagctgcaggagtttttttttcataccccagtggtgcccagaacaccagtgagacagaaccattcactcccctggaaagggggctgaagccagggaaccaagtggtctagctcagcagatcctacccccatggagcccttcaagctaagatcgactggcttgaaattttcactgccagcacagcagtccgatgttgacctgggatgctcaagcttggtagggggaggggtgtccactattactgaggcttgagtaggctgtttcccccttacagtgtaaacaaagccgctgggaagttctaactgggcagagcccactgcagcttggcaaagccgctctagccagactgcctctctagattcctcctctctgggcagggcatctctcaaagaaaggcagcagccccagccaaccgcttaccgataaaactcccgtctccctgggacagagcatataggggaaggggtggctgtgagcacagcttcagtagactgaaatgttcctgcctgctggctctaaagaaagcagtggatctcccagcacaatgctcaagctctgctaagggacagactgcctcctcaagtgggtccctgaccgctgtgcctcctgactgggagatacctcccagcaggggtcaacagacacctcatacaggagagctctggctggcaactggtgggtgcccctctgggacaaagcttccagaggaaggaacaggcagcaatatttgctgttctgcagcctctgctggtgatatccaggcaaacaggacctggagtggacctccagcaaactccagcagacctgaagcagaggggcctgttagaaggaaaactaacaaacagaaaggaatcacatcaacatcagtaaaaaggacatccacacataaaccacatctgaaggtcaccaacatcaaagaccaaaggtagataaatccacaaagataaggaaaaaccaatgcaaaaagactgaaaatcccaaaaaccagaaaggttctgtgatcctccaaaggatcacagctcctccccagcaagggaacaaaactggatggagaatgagtttgatgaattgacagaagcaggcttcagaaggtgggtaataatgaacagctctcagctaaaggagcatgttctaaaacaatgcaaggaagctaagaaccttgaaaaaatattagaggaatttctaactagaatatccagtatggagaagaacataaatgccccaatggagctgaaaaacatagcatgagaacttcatgaagcacacgcaagtatcaatagctgaatcgatcaagcagaagaaaggatatcagaaattgaagatcaacttaatgaaataaaacatgaagacacgattagagaagaaagaatgaaaaggaatgaacaaagcctccaagaaatatggaactatgtgaaaagaccaaacctatttttgattggtgtacctgaaactgatggggagaatggaagcaagttggaaaacattcttcaggatattatccaggagaacttccccaacctagcaagacaagccaacattcaaattcaggaaatacagagaacaccacaaagatactgctcgagaagagcaatccaaagacacataatcatcagattcaccaaagttgaaataccagaaaaaaatgttaagggcagccagagataaaggtcattacccacaaagggaagcccatcagactaacagtggatctctctgcagaaaacctacaagctggaagagagtataggggtcaatattcaacattcttaaagaaaagaattttcaacccagaatttcatatccagccaaactaagcttcaaaagcaaaagagaaataagatccttcacagaaaaacaaaggctgattttgtcaccaccaggcctgccttacaagagctcctgaaggaagcagtaaatatggaaaggaaaaactagtaccagccactgcaaaaacataccaaattgtaaagaccatctacattatgaagaaactgcatcaactaacgggcaaaatatccagctagcatcataataacaggatcaaattcacacataacaatattaaccttaaatgtaaatgggctaaataccctaattaaaagacacagactggcaaattggataaagagtcaagacccatcattgtgctgtattcaggagacccatctcaggtgcaaagacacacataggctcaaaataaagggatggaggaatatttaccaagcaaatgtaaagaaaaaaaaaaaaacaacaggggttgcaatcctagtctctgataaactgactttaaacctacaaagataaaaaaaagacaaagaaggccattatataatgataaagggatcaatgcaacaagaagagctaactatcctaaatatatatgcacccaatacaggagtacccagattcataaaacaagttcttagagacctacaaagagacttagactcccacacaataatagtgggagactttaacaccccactgtccatattaggcagatcgacaagtcagaaaattagcaaggatattcaggacttgaactcagctctggaccaaacagacctaataaacatctacagaactcgccaccccaaatcaacagaatacaatctcctcagcaccacatcacatttattctaaaattgaccacataattggaagtaaaacactcctcaacaaagggaaaagaacagaaatcatgacaagcagtctctcagaccacagtacaatcaaattagaactcaggattaagaaactcacccaaaaccacacaactacatggaaactgaacaacctactcctgaatgattactgggtaaatgacgaaattaagggagaaataaataagttctatgaaaccaatgagaacaaagacacaatgtaccagaatctctgggacacatttaaggcaatatttatagggaaatttatagcacttaatgcccacaggagaaagcgaggaagatctaaaatcgacaccctaacatcacagttaaaggaactagagaagcaagagcaaacaaatccaaaagctagcagaagacaaaaaataacgaagatcagagcagaactgagggagatagaaaaacaaaaaacccctcccaaaaatcagtgaatccaggagctggttttttgaaaagattcacaaaatagatagaccactagccagactagtaaagaagaaaaaaagagatcaattagacacagcaaaaaatgataaagaggatatcaccactgatcacacagaaatgcaaactaccatcagagaatgctataaacacctctatgcaaataaactagaaaatctagaagaaatggataaattcctggacacatacatcctcccaagactaaaccaggaagaagtccaatccctgaatagaccaataacaagttctgaaattgcagaagtaattaatagcctacgaaccaaaaaaagcccaggaccagacagattcacagccatattctaccagaggtacaaagaggagctggtaccattccttctgaaactattccaaacaatagaaaaagagagagactcctccctaactcattttatgaggccagcatcatcctgatgccaaaacctggcagagacacaacaagaaaagaaaatatcaggccaatatccctgaggaacattgatgcgaaaatcctcagtaaaatacttgcaaaccgaatccagcagcacatcaaaaagcttatccaccatgatcaagttggattcatccctgggatgcaaggctgtttcaacatatgcaaatcaataaacatgatccatcacataaacagaaccaatgacaaaaacaacatgttaattgatgcagaaaagtccttcaataaaattaaaaaccccttcatgctaaaacctctcaatacactaggtattgatggaacatatatcaaaatgataagagctatttatgacaaacccacagccaatatcacactgaatgggcaaaagctggaagcattccctttgaaaaccagcacaagacaaggatgccctctttcacaactcctattcaacatagtattggaagttctggccagagcaaacaggcaagagaaagaaataaaggtattcaaataggaagaggggaagtcaaattgtctctctttgcagatgacatgattatatatttagaaaaccccatcatctcagcccaaattctccttaagctgagaagcaacttcagcaaagtctcaggatacaaaatcaatgtgcaaaaatcacaagcactcctatacactaataacagagggtcaaatcatgagtgaactcccattcataattgctacaaagaaaatacaatacctaggaatacaacttacaggggatgtgaaggacctcttcaaggagaactacaaaccactgctcaaggaaataagagaggacacaaacaaatggaaaaacattccatgctcgtggatagaatcaatattgtgaatatggccatacggaccaaagtaatttatagattcaatgctatccccatcaagctaccattgactttcttcatagtattagaaaaaactaccttaaatttcatatggagtcagaaaagagcccatatagccaagataatcctaagcaaaaagaacaaagctggaggcatcacacttcttaacttcaaactatactacaaggatacagtaaccaaaacagcatagtactggtaccaaaacagatatatagaccaatggtacagaacagaagcctcagaaataatgccacacatctacaaccatctgatcttggacaaacctgacaaaaacaagaaatggggaaaggattccctatttaataaatggtgctgggaaaactggctagccatatgcagaaaactgaaactggaacccttccttaaaccttacacaaaaattaactcaagatggattaaagacttaaatgtaatacctaaaccataaaaagccagaagaaaacctagagaataccattcaggacagaggcatgggcaaagacttcatgactaaaacaccaaaagcaatggcaacaaaagccaaaattgacaaatgggatctaatcaaactaaagagcttctgcacagcaaaagaaactatcatcagagtgaaaaggcaacctacagaatgggagaaaatgtttgcaatctatccatctgacaaagggctaatatccagaatctacaatgaagttaaacaaatttacaagaaaaaaacaaacaaccatcaaaaagtgggcaaaggatatgaacacacacttctcaaaagaaaacatttatgctccaacaaacatatgaaaaaaagctcatcatcactggtcatcagagaaatgcaaatcaaaaccacaatgagataccatctcacgccagttagaatggcaatcattaaaaagttaggaaacaacagatgctggtgaggatgtggagaaatatgaacgcttttacactgttgggagtgtaaattacttcaaccattgtggaagacagtgtggtgattcctcaagaatctagaaccagaaataccatttgacccagcaatcccattaccagggatatacctaaaggattataagtcattctactatgaagacacacgcacatgtatgtttatttcagcactattcacaatagcaaagacttggcaccaacccaaatggccatcaatgattgactggataaagaaaatgtggcacacatacaccatggaatactatgcagcaataaaaaaggatgagttcatgtcctttgcagagacatggatgaagctggaaaccatcattctcagcaaactaatacaggaacagaaaaccaaataccacatgttctcattcataagtagtagttgaactatgagaacacacggacacagggaagcgaacatcacacacccgggcttgtgggggctaggggaaggatagcattagaagaaatacctaatgtagatggtgggttgatgggtgcagcaaaccaccatgccacatttacacctatgtaacaaacctgcacgttctgcacatgtatcctagaacttatagtataataataataataaaagaaattaccctgtcttaggtatttctttatggcagcacaagaacggactaatataagcatgtttaaaagtgtcaaatgttgcagagtcacttttaagatgtctaaatattgataatagaaggtgattttgagaagtttatcaataaaccttagcaagagcattgcaataatgagttggacttagattggatatgaaaggaaggaaagagaggtcagtatgttgaaaatatattgagagaagggctatgagatgggaaagatttgatcatgtttatgtactgacatgaaaggagaattttgaagatacagaagagaggggtgattatgatcttagtgagaaggaaataaatctcgtagttataagctgattggaacaagaaccatagtatactgccaattattaattgccataattcataaaaacaacattttattactctctataaacttcagctatgatcatttctacatattttagggcactatttaactttatttccctcctaattttctttgcaggagaaatactaactacttttgacacatctggcttatcacagaagaactcatgatttaccaattgttttcctttggtttcatcagtttcctctttgtgcagtgttatgcctcatcatacaagaatgtcatgtttccccattatgttagtgtatacaagatgaagaaaatatgttttccaagtaacattctgaacataaagtacatattttccatcacttctaatttagagcacaacagtttctttctggtttctaacaggacacaaactaaatataaaatttgaagaacaccataattgcaatgatatataaaatgctatttgtgtaaatactaataaccatacatttttcttattcacatgtcaatgtgtggttttcatatacgttacatatttttaaaaggtcttaatgatgtgatgtatctgattacttagagtggcagaggcactcttcactggttactaattactgctctatcagggtttctaatcatttttgaatcacagataagcttgagaacctgatgaaaatcatgccccatgtttctagaagaaatacataaacctggacgtatatgcacatataaatttgcatacctttttggagattaaaaagcctgatttaaaggaatataattttgggatattggggttaatgtcaaaggaaaaataaagagcataacattgaaggcatagcaacatggtttgtttgtttgtttgtttgtttgtttagttagttagctaattattttgagacaaggtttcactctgtcacccaggctggagtgcagtggctcaatcatggctcactgcagcctcgacctcccaggttcaagtaatccttccacctcagcctcccaagtagctgggactataggcatatgccactatgcccagctaatttttttgtatttttttttttgtagagacagggtttcatcatgttgcccagaatggtcttggactcctgggcttatgcaattctctcgccttggcctcccaaagtgctgggattacaggcctgagccaccaggcccagcagcaacatggtttaaaagcaagagttttggagtcagatttggattcaagtcttgacccagcacttagcagttgggtattctcagccatgttacttaacaactcttagcttaagtatatacctatgtaaagtgaggttggagaaaggattcaattagataaaaagcaaagtacgtgacaaatgcatataatatgcagatagtcgatgtttgttttaaattccagggaaacagcttcaattgaatggttctcaaaggcatgggaatttttcatttagattttgttgtttatgtttaaatctatcagatttggattaagaatctcacagaaagttaatctcaaaatccagctttctgattgctgagtctgatagaagtattgctgtgctgtatacacaccgctcaggtagtgcgcatctttggttggggtgaccttctaggggtcattcggtcaccaagtgacaggatgccatggatcagtgggcacaactaattctctttagtatttgaaatatcccatagagtgacatgttttacaaggttgttctcaatattagtcagttaaataacagaatgaaaaggtgcttaactttggcagaaaagaaaatacacatattccacaaacaagaaagataattgtgataattttatcaaatgccctaagtcaccctcatatgtttcaattatcaaaagtaatattcttgttatataataatatataataaaattccagattttaaaatgtgttataagatttcaaggatcatactagttgtgatggcagttcatttggctaagattgacatttttggcttcttaaaacagtgctctcagtcctgtagcttcagacacagcttcactaacgagggtaggaccttaatttcaatttcctcatctgttctcttatttcagccaacgaacagtatcctaaggctgtgtgctgacctcggaacatgagtctagacagaacactagaaaatgcctttaaaaggtgccatgaacaatatccaaaatatcatctcttgattgggccggacaatttattgtgccaaaatccttctatgtgtggttgcacccaaagcaggtgcttctatggaaaatatatccaagacaatttctgtctcattttactttgagcaaagccaatttttaatttaaaaagtacatgcttagatgcctctgagatgttttcctgacatagtaatccaagtaacttctgactgagacgaagggaaggtatctctctctgaagagccttatcatagagtgagagttttaaagagttttgggaaagctctgcccttctgaaattgaattttgttcaggatattgagattttaagggcattttgcctccttgccaattttattataccattattttttatttaaattacagattcttttttgtctccttctctgcaagaggctggcaccagatcacctcctgagtagagcagacattccaaaggatgtcctgccaacaataatggaaagctggatacaactgaatatgtaaaatggtacctgagatgcttagaaaactgtaaagtttaatgctgcatatccagtgcaaatgtcaaacactacagctgctgcttctacatgctgcatgaaaagcgtgtttgtgtgtgtgtgtgtgtgtatgtgtgtgtttaaattcatggcttcttttttctttgcttatgaatctctgcacatctgtcttttaaaatgtcttatttatagggtcaacatttcttgtctaatgagatgggccaaaaagatctttaatcactcacatactcacaaggaaaatgacatgtcccaaataaaagattgagcaggatttatttctaaaatatcttaaatgttctccaataacacttgacaaatataattttcaatactgactgaacttttcttccccttaggagttctacactcatttaaaataaatagtatatcgttgatggtttttgaagtctcagaatgttaagctgccttttagaaattctgagttacatagaaaacattaagaatctatcttcttaatttaaacaaatggcatggtacattccccaaacactcaaccaccataaataacactgggaatactaagaatgcatgattcaggagatgcagaaaaattgtactttcccagaaaatctgcgttttataaagaaaggcacataacctttctggaagcctcaggtattgcaccttcaaagatgattcttttattcaaccttaacctaaatcacaggattatgacaaagcataagtttaaaaataaaaaattgcttaaaatattgaaaatgtaaattcctgaagatttgaagacacatgtaatttcataagaaggggggcttcatatggatatacagtacaaaaaatgtcttcataaagaaacaatgacttgaattgatcctacactttagggaagctattctttttaaatgagactttgaattggggacaaagaccttgacactggagtacccactatagtgtagctgatttaaagcaccaggggtttaaatggtcacaatatattattttcggtaagtacacttctggaatgtttcagtttggattaagcatcctgaaacatggatttaattaaaggagcccttcagataattatgggactgattttcaaaggcatgctagatgattcagattcctagcaacattctgagctgcatcatttaaagactggtctggaagggctatcctctgagaatttatcattttccaagaactgaagaaatttcctggctgaacatctagaagtcaaaaactgagacctggagcatctttatcttaaataactatcaactttgagtgacatttaggagcctcttagaaaggcctcaaaagagcaggctcagatttaccagaataagaaaacatattgtctaaaactgagctaggaactctgggatcatccccaaattctgaccagtgaagagactcctatgtgcactcaccacactaccacagctctgctgaaggatggataaaaacaatgatctccaaaatggaagtttaggaacccacaggaattggaaaaacaagccattttggtctggaaagacaatattataaattctatctatatccactttttaattatgtccttaaaaactttttatgtatacatttaaaatgtacctaataaatgtaatatgttatgtaatgtataaataggtatacttctgtgcagacatgtgatcagcagtagataccacaaattctaaaacagtttcactttctgggacttctcatccttctcagaatggggtgtagggtcaatgggtctgctgcctggcagtacctgatagcaagctgtggggatcagctgttccatattattcacgataaagctggtgtgctgtggattcatccactcattcaacaaatatttcccaagctatgaggatgaaacagtgaaccacggagacacagttagatctatgttcacggagcttacattctcacaggagaaaagataaacaagcaagaaaatgagtaaaatgtaaagctaggcaacatcacatatccctaacgtaagacattactcatgtgatattcctgccaaaaatgattaactgtaatctaatcatgagggattaactaaaacaatgaaatttaaaaagacattctccaaagttgttaataagatgaaagacaaaaaaaaaaaaaaagctgagaactattccagattaaaggtgactaaagatatataatacaatgcaatatgtgatctttgttagaatactgaattggaaaaaaacagctataaataacattattggaacaattaaataatttaaatattgactgaatattaaacagtataattgaatccatacaatttttcctgatgcgatcattgtattgtgattatttaaaagaatgaccttgttcttgggaaatactcatggaagtagataaatccaggtgaatggaataaggtgttcattaaatattcttgctgcttctctctaagcttgaacatgttgcaagtaaaaagttgtagaataataaacaaaagctgtgtgtgtgtgtgtgtgtgtgtgtgtgtgtgtagcaatataagagaaaaaaagcaatgagggtggagatggagataattattttatgttggtgatgagagagatcctttttaaaaatatatttgcatttgaacaaagatgtagttgcagaaagaagtgagggaacagactatgcagctatctgggagacaagactttcaagcagcatatctgccatatttgaagacagaaaagataccaatgagacaaaagcagagtgaacaagagggaagacagaaggagatgaggtcagataagtagctcagagtaaggtcattgttgaacctcataaggaatgatggcatcattggaattttactctgagtaggagaaaaatcactggaggtttttgaaccaaaatatcatatgatctattttgatgctactataaatgggattattttcttaattttattttacacttgttcactgctagtacatagaaaaacaattgattttgtgtactgatgttgtatcctacaaacttattaagttttagcactgcaaaacatttcattgtatgaatgtatcacagtttgtgcattcacctactgaagggcatctcggttactttcaatttttggcaatcatgaataaaactgctataaacatccatgtgcaggtttttggtatggacatagttttcaacccatttgggtaaataccaaagagcatgatttcaggatcatatgttaagagtctatttaattttgtaagaaactgagcaagactgttttctaaagtggctgtaccattttgcatttcaccagcaatgaatgagagttcctgttgctccacactctcatcagcatttggtattgtcactgtttttaattttagccattgtaagagatatgtagtagaaattacttttttaccctctataacgaacccctcccccagccccacgcacacacacacgaatttaaagtcaaagctgaagtatcaaatcatcactttttggactgaacatgaaattttttcagtagacgaatttgtgctaagcttgaatcacaccacactacacaaggtgagagcattgtaagatgctctgttttcatgcctgcaagtgatagattatgccagagttgcaggtttgaccaacattcatatctgatatgagcaataagatgcaaatatacatggtctgaataaagtgccattgtgcacatattctttaaatagattccttctagtctaagggttctaacagaacatcttgtaaatgcgtggcatcttcaataaaaatcttataagcttttcttaaaagatttcaaaaagcatctttttcttgaattttaaatgcagaaagaccttaaagtttatttagaccaagtctgtctttttttaccagcggcagaggaggcccagaaaggtaaagtaatttacccagcttatgtgttggattatttgtggtagatcagtcacaggaactctactccacaccctttccattgtataatacaatggtgccccttgaaattggctgtgaattatgtctttccagctgcaaattctgctttcctgtctacctaagcaactacaactcacctatcgtcgcatcttctgcttcataaaagctctatctccttttgaaatgataaatcttccacttataacgttaaaattgatgacagtgataattccaaaattgactactcacaagtttaaattttccttaaataaatttcaaagccaataatctgtttatctgaattgtttaaaattttcccatccctctttttctgtcatcttcttctcttaaaaccctccccacatagagtgagccatgatttcctttctatgctttccctgcactttggcatctcttccttccctagtggaatctattttaggttcatgaaatctcctattttaatgatctcttgggcaactatcttttacgttctttttattttggggatttgtatacttcaccttctctgttcaaatcctatgattccaatctattaagagatatgatgtactgtagattagttccctagtaacagaaatgttcttccatgtcagttataaaataataggaaattatataagcaaaaacagcagcagtaatttgttccctgatttcataaattaagaaaaatatcatctgaacaaacatcaaaatcatgttatgattaaaaactctattaatcaaagatataattagtgtgctcaaatatgagattgctgaagtattgggacttatgactagaagaatatagagaagcttccatgaatattctctggaaaaattaaaaatgataaataaataagaagccaggaagtaactgtgagtgaggagatgcagatgtttcagagaaagaaaacatcgccttaatgttgctatggctgtatttaaatataataagtgtacacaatgacagattatcccaagacaagaggtaatcattatgagatacttataatagctgggttctacttcaatgtctaattgaaatatcagacatcacacatgttcagcagatataattacaccataatcatcctaaagatagaatgcaaacttaagtatgatgctaatggagatgaagaggatgggtttttgaagatatggaagaaagttggattagaaatagaaaataaaccagttctctcagacatcagtggttgatacatttcattcacattgttcttttattttattaatttattaatttagtctatttagactagtcacactattattattattattatttttgagacagagtctcactctgtcactcaggctggagtgcagtggtgctacctcagatctcggctcactgcaagctccgcctcccaggttcacaccattctcccagctgcagcctcccaagtagctgagactacaggtgcccaccaccacacccagctaatattttgtatttttagtagagacgggggtttcaccgtgttacccaggatggtcttgatctcctgacctcgtgatctgcccgcctcagcctcccaaagtgctgggattacaggcatgttatttttttctataacatgtagtatgttcaatattcaaacttttgagaaagtaccatgacagttaaatattgaaactatagatactgtaagcctgttcctaggaaagacttcagaatatatatctctttgctaaacatttcagtgtatttgattattcaatactaccatttaatgttatagtgtacagaatagtactggacaaacacaactcattcttgggatgcaatcttaaaacaacattttttcccccactgcctgttaattttattaggagaggctagactttccttatccttggaaataacagtttcaatatggatagtaaaatgtctagaactatgtaatagttaaaactctgagtttatttaaaattagggtatctctcacagtatagagcatgtactccttcctcagctcatagaaacatgataatgccctcacttcccttggtcaaggtcccttcatccttcagtctaggctaccctcttagacaggaccttccccatgttaacgttcatctccagaacctaattcacaggttacttgtatacattccctaataccaataaaacctcaaagtgcaggacgcccagtgaggccactctcctcttgctaattgcaaacatgcagtttgctatttctcatcctagagatttcacacatgacagcaagatcccactcttggagtggtctcattaaagcctcctttctacatgtcagactaacaggtaatgcaaccttatccctttgaggggagacatggctatttacagcactcagtgctctctcttaagaaattttccttgcattgtctcattaaagacccttttcccaggaaaagggtctttaagcaaggagatttttgcatcagacctctaacaggtctttctaaagaaattgtccccagatcctctctgaacctgacacatactgatccttttattttgcagatgttaatgaagaattgaagagcactgtatctagttttctgctctcccctgtaagtattaacatttatactgccacttcactttggaatgtcatattaattgttctcagcacctcagtttaaactaccaactcttttttggtagtaccagctaccagtaattccacacaccaggattaaatggcaaaaacctaagtaatgatggtgaaaatacttcaagaaatgtatatagtttttaaaaatcgaattatctgtcacctgagtcatttaatgtttataaatagaaagccttgattttcatgtggctctggataattgcagagccattctggcgtcaaaactaggtccaacagaactttagggaaacatgccccagtgcttaataaatacttgcaagtagaagatgcaaaacggtccactgaacaatctccatctaggccctttgcatctggccaagatgaagtgagcgggggtgcctcagttttatatctaaatgcccagcatgttcaggtcatcagtctgtccatgacaatctgggattacggtacaaattagcaagaccagcaactcaaactaggtccattgttggtcaagccattatggcatctatgctggttcatgtgtctggcccaggcagcatgagtgtgatagacagtgtgcctaaactattaatagtaagtatatccagatcatcagtctcttcacaatgggcactgttgaagagttggtccagatgttggccatatgtttcatctttcatatatatccttaattatggtctatgctctagctgggaatgcctaaaggtggctgtggttgagtaggaggagtgggatggggttttcaccagcatttaccaagatttgggtcctttctgccttctggcctggccactaggcctcttagatgagttaactccaaccccactggatggagactctgtcacctaccatcctccacttctacctcattggttctaccactgtctcctcccaagccccctaagaaaaatacttcagcaatagtgcacaggactagccataggagatacttggtctcctcgacactgtctatgtggccttagaaaggtcactttagttctctgggcttcactttcctcctctttaaaattagaacaataataatatttgccttgtagggctcttgtgaggatttaacgagctcattcatgcagcaactctaagtcactaatcaatacatttggtggatactagagattttactgattagagagatcacatgaaaacttcttgcaaccaaacacagcacacctaagatataccatatatgcacataatgtggtatatacatatagatataagttctacacactgacaggtatttgatttccttcactacatgctttgaaatgttttgctacaattatagaattaagtttcaaaaatacatgtaatggtgaaaatattttactcataattctaaggtaattatccctgaaatatttatttttatatattaaaatttgatatcaagtattcacttctattaagaaacagagatggataagtttaagtgtcagacccaggagcaaatctttgccaagacctgttaagtaagtctccaactcacaaaaatgcctattccacatttatcagatgaaggcaagtggagaagaagggatttctttatatcttttgtaggcctccaaggattaggtcagtgaaatgaggtcctagtcctaatctgacactggctctgtccagcaattgaaagatttactatttgtggacctcgattttcacatgtgtcagtgaagaggttagtgcttgattgctttgtgctgcaatgagcagaaagccccgtctcaactattttaaacaatcatgacacatcatatctcaagagtaagacttccataagttgaacgggctccatgcacagtagttcaggatcactgcactgctcctctgtgatgctcttggccccatgcttgtccatgttcaggcttcagaccagctggcttcactcatgatcacaagataggggttactgagccacatatcacttacgccatgataagatataattgaagaaggggtgatttctatgaacaagaaaacctttccctggttcactccagcagtctttcttcaggactcattggctaggatgaaatcacatgtccctttccaaaagcagtcataaagtttccacaactgggtaaaataagatttactggagtcatgttgggaagtttgttaattgctttaagaactaggcttttattgaaaaggctttggagcaggcaacgaatggtgcttgctatcctcacttaggtatcttttagttgtaaaagaatgagtctgaggtatttctgtcattgcctgattaataatgccatgctaagtcatcatttaatgcaacattgaaatagctggcttcaagaagacaaataaagattgtatataagtcatgggggaagcaaacaagatttatgttcaaaagaggttcaaatattctgaaaattacatacgtagttttggaatggcccaatgatagggcaaaaggggtggtgatcaattatacttcctttatttacatttccatgaaataataaaatatgccaggctttcctaagataccaaaggaaggctgggaaaagcaaattgcatcctggctaccaagtcagaagtcagcctaaaccaagaagtagatcagcgatgcttaaataatcagaaatgcaactgtaatcagaaaaacaatcttgtgaaagctcagttcttaaaataaattcccattgtttccatctacagttattctctatcttttggatagtagagcatagtcaggatttccattagaaaaaaattttttttgttgttcatgtgctttccttcttccttgggcttttttacctatctttctttctttctttttcttcctttctttcttccccactaatattcccctccctctttctctttctgtcttattctcttaagaccagtaacattgtttctccatttgggagaaaatactcagtggcgttctgaagatggctcatactggctcactacagctaactgtgcacatccttccgaactctgaggtcagtaaaagtttttaatagcttgaaattgtccacaatgggataatttacacaacagaatttggcaagcactacaaatcacagcttactctttttggtttcttgttgtttttccagaaagctagatcaccagcataccactagagacagcatatcagaatgactaacagcaaggattctggtctgatactattttagttcgagcacagtcatcctttggtatccttggggaattggttccagaacccccctggataccaaaatccatggatgctcaagccgcctatataaaatttatataacctatgcaattcccccacatactttaaatcatctctagataacttataatacctactagattataaatgctatgtaaatagtcattaaactgtattgtttaaggaataatgacaagaaaaaaagtctatacatgttcagtacagatataaccattcattttcaatcggtgattggttaaaatcacggatgcaaactccatggacacaagggccagctgtactgtctttcccatttaatttttctgaccatcagtaaaatagtaataataatacatatcccataggctaagaatagaatgggacaatgctttttacaagtgttattatttgtggtaaagatcatcacaaattctttgtttaaaaggcacaatttgtatccccttccctagaatgagtgtggctttgtgactgcttgtacaatacactctgatgtcaggaatgatgttccagtttccaggcccaggcctccaagaaactggcagctttcacttcctgtctcctgaaatgttctttctggtgtatattagggatcttcagggaagtataacccataggatagataggtgtatatataaggcttttttttttttttttaaagtaattggctcacacgcttgtggggactggcaagtgtaaaatcttcagagcaggctggtaggttggagacccagagaagggctgatgctgcggtttcaagtcaaaggcaacttggaggcagaattccttcttccctgggcctcagacttttcctcttcaggcattcaacttattggatgaagcccactcacattatggaggatactctgttttacccaaagtctactgatttaaatattaatcacatctaaaacacaccttctcagcaacatctagacagtcatttgaccaaacatctgggcactgtagccaagatgacacatataattaatcatcacatagggtagccaactccaggtaggaagtccaattatatggtgcagagatcaaatacagaggccccgagactatgtggagatggacaggggacaggctgagaccagccttccaaatttccctatcaaagcacaaaacatgtgagtgaagccatactggggtcctccagttcatcccagttgtaatggttaatgttaggtgtcaactcgattagatcgaaagatacgtaaatggctggtaaagtattgtttctgggtgtgtctatgggggtgtggccagaggagattgacatttgagttgttagactgggagaggaagatccaccctcagtatgggtgggtaccattcaatcagctgccagtgcggctagaagaaagcaggcggaagatggtgggataaccttgcttccttggtcttctggctttcttctttctcctgtgctggatgcttcctctcgctcctcctgcccttgggcatcagactccaggttctttggcctttggactcttggacttgtaccagcggtttactgggagctctcagaccttcggccacagactgaaggctgcactgtcagcttccctggttttgaggctttcagactcagactgagccactactggcttttctcttacctagcttgcagatggcttattgtgggacttcaacttgtgatcgtgtaagccagttctccctaataaactttctttcatatatacatatatcctattagtcctgtccctctggagagttctgattaatacagattttggtactggggtggttctagaggaatgaattttaaggatggatttctctagtcggttttggggttcctggctctttaatctggttagacctaaccagattaactacttaacgactctatttctaatagtgtggagagcactgatagtccttggcgtgaattgtttagagagttgtgcaaaataaacgcatttgatattcctgattcaccactcttgaaaggcaaggagtttagtgactctatacatgatacctttgaacatttgtagagaaccaaggaatataatgaagttgtttggttgctcctaagtttgctggagaaagtgatgaaagaaaagaatgagctcagggattccatctcccatctcctggctccagaagcacatacttagcctcaaatcttctaagattgccctgggtgagagtcttatgtcttgtagacaaagggctgaaattgctaaaaatcagacacgagttcttcatgtgaatagctgacctgcaacaaaagatacaggctcagtctcaccagatgtcgactgttaaaatgagggcattcattgggaaagaatgggaccctgtaacttgggatggggatgtgttggaggaccttgatgaagctggagacactgagctcctaaattctgatgagccttttgtgtcagaggaaatggcctccccacccctagtggtggtaacatcccctccccacccaggctgccatcagcctttccacctttgtctgagattgcactgcctgaggcaacagtgatggtctcccctgatgcagttgccaggcaaggaaatgctgattctcctcaggaccaacccccaccacccctctttgcttctaccctgtaactagactcaagtcccagtaggcccctaaaggtgaggttcagagtgtgacccataaggaggtgcgccatactccaagagaactacttgagctttctaaattatataagtggagatccagagaacaggtatgggaatggatattaagggtgtgggataacggtagaaggaacataaagttgtatcaggcagaatttattcatatgggcccactaagcagagattttgcatttaaggttgcagcagggggaatttaaaaaggttctaatagtttatttccttggttagctgaatcatggatcaaaagatggtccactatgagcgagctggaaatgcctgatctcccttggtttaatgtaggggaagggattcaaaggcttagggagattggaatgctagagtggattagtcattttagactttctcatcccaactgagaaggtccagaggacacatccttcaccaataccttgtaaaatagatttgtgaggggagcacctgcgtccttgaagagctctgtgattgctcttctcggtatgccagatcttacaatggaaattaattttccctcaatgggaaaacttaaatgcaataggaataattggatcccaaggtggcatgggacaagtggcagcactcaaccatcaaaggcaagttgggcatagttactgtaatggacaacagaggcaaagcagcaagcagaatagtctgacacgtgtagagctctggcattggctaattaatcacagtgttcctggaagtaaaattgacaggaaacttactgcattcttacttaatttgtataagcagaaaacttccaggtcaagtaaacaaaagactaatttgaattatgaaaacagagcatgatggcttttcaatcaattttcagatttgagccagtttacagacctagaaccccttaaatggaggggaggcctcttcccttaaggaaggaccccccactacactaccaacaatttttactgttaatctttctcccatccttccccaaggagacttctggccttttaccaaggtaactgtgcattagggaaagggaaatgatgagatcttctggggactactggacactggctctgagctgacattgattccaaaaatgtcaaaacatcgtgatcctccagttagtgtagggacttatggaggtcaggtaattaatagggtgttagtttggtccaacttacagtgagtccagtgggtccccggactcatcctgtagtcacttcccaatgtcagaatgcataattagcatagacatatgcagcagctggcagaatccccacattggttctctgacctgtggggtgagggctattatggtggaaaaggccaaatggaggcgattagagctgcctctacctagaaaaaacaatattgcatccctggaaggatttcagagattactgccaccatcaagaacttgaaagacgcaggggtggtgattcccaccacatctctgttgaactctcctatttgttctgtgcaaaagacagatggattttggaaaatgacagtggattagcacaaacttaaccaagtggtgactccaactgcagctgctgtaccagatgtggtctcattgcttgagcaaattaagaaacctcctggtacctggtatgcagctattaatttgacaaatgcctttttctccattcccgtccataatgtcctaccttatgggtatatcaactctcccgctctgtgtcataatcttgttcacagagatcttgattacttttccctttcacaagatatcacactggaccattacattgatgaaattacactgactggacccagtgagtgagaagtagcaaccacactgagaatttgcatgccagggtatgggcaataaatccgactaaaattcagcaactgtctacctcagtgaaatttctaggagtccgggctgcggggcctgtcaatcaaaaggtggaagtggaagtggtatcactcaccatcacccctagtgactcaccaacaaaacgtttgcttcctgttcccatggcattacgttctgctggcctaagaggtcttagttcctgagggaggaaagctgctaccaggacacacaacgattccattaaactggaatttaagattgccacttggccactttgggctcctccttcctctaagtcaagaggctaagaagggagttacagtgttggtggaggtgattgaccagacaatcaggatgaaatcagactactctacaatggaagtaaggaagagtatgtcaggaatacaggagatcccttagggtgtctctcattattacaatgcccatgattaaggtcaatgggaaactagttacccaatccagacaggatgaaaaatggcccagacccttcaggaatgaaggtttgggttccttcaccaggcgaaaaccaacaacaggccagggtacttgcttaaggcaaaaagaatacagaaggggtagaagaagctagtcatcaataccagctatgaccatgtgaccagttgcagaaacaaggactgtaattatcatgagtatttcctccttactttgttaagaacatgtttgtgcatgtataacctgtactaggaaagtatcttcattttatttcctttttcctttatcatgtaacataagttttattgatttcctatcagcatttaagtgttgttaggttaaggattagtgcacttccagtcgtatgaagcatagttgtattatgttaggtccaattatgaccttattattgtctttatttagggattaagtatgatttcaggtgacgtatatgggtgccaagttgacaaggggtggacttgtgatagttaaggttaggtgtcaacttgattgattggattaaaatatacctaggctgggcgaggtggctcacacctgtaatcccagcagtttgggaggccgaggcagatggatcacgaggtcaggagttcaacaccagcctggccaagatggtgaacccccatctgtactaaaactacaaaaattagctgggtgtggtggcaggtgcttgtaatcccagctacttgggaggctgaggcaggagaaccatttgaacccaggtggcagaggttgcagtgagttgagatcacgccactgcactttagccaaggcaacagagtgagactccgtctcaaaaaaaaaaaaaaaagatacctagatggctggttaagtatttgtctgtgagggtgttgccagaggagatttacattttaagttgctggactgggagaggaagacccaccctcaatgtgtgtggacaccatccaatcagctgccagtccagctagaacaaaagcaggtggaagaaggtaagataacttttcttgttgattcttctggcttcctgctttttcctgggctggatgcttcctcctgctcctcctgcccttggacatcagacttcaggttcttcagcttttggactcttggacttgcactagtggtttgccaggagttcttgggccttcaaccatagactgaaggctacactgttggattctctggttttgaggctttcagacccagattgagccactaccagcttctctcttccccagcctgcctatcgtaggacttcgctttgtgatcaaggagtcaattctccctaataaactccccttcgtatatacatatatcctatcagttctgtccctctagagaaccctgagtaatatacaccagtcatcagctgaataccaccaacttctacccagtcaataactatgtggagcaaaaggatcacccagctgagtcctgcttgtatttctgacatacaaaatcataatatatttaaaatatttatgcagtaagtcactaagttttggggtagttctttacacaagaagagataactgaacactatctatctttatttaaaccaggctttgtttaggatatagttatgctataattaaacttatttttaggttattttaggtttccaagcctcatgatgagattaaggtgtgttccttgtgtgttcctttctgacagcagacaggtctgaatttgtccaagtgcatttgcatgaaaaactgaggcgattcctggaaagtgaaagattctgaagaaaaactagttttgcagataatcctgacccactttactcatgaggatgcataggcttttgtaaaagtgcttgctctctgcctttctactcagcctcacatgaattagtgccttatgtagaaatgagatcaccatgtgctgggagtgagctgtggggaggaagaacactataattaaagcctgaaggagttatctcagtcaaattttcataagctatcaatcacaagcatcttgtaagtacccctttttgacaaaacatagctttggttcccccaaacctcagcacattagaggaatagtgcccaacaggtcatggcaatctttaaagagcgagtatgacatggtttggctctgtgtccccacccaaatctcatctcgaactgtaatccccacttatcaagggagggacctggtggaagttgattggatcatggggacagtttccaccgtgctgttcttgtgatagtcagtgagttctcacaagatctaatggttttaaaagtgtttggtagttccctccttgtgctctgtttctcaccttttgccatgtaagacttgccttgcttccccttccccttctgccatgattgtaagttttctacatgtaagccatgtgaaactgtgactcaattaaatctctttcatttataaattacccagtcttaggtagtatcattatagcagtgtgagaatgaactaatacagaggggttataccagtcaggagtggcagaacttaacagaagccatgtcaatgcccattgactccactgtgcctggcttgctagaatcagggagaaagggtcaggaaaagagaaatcaaacaggagatccatgtgttcatcacaggagagcatgagtaacaatctcccaggcacacttgactattagaaaagtttcaggaagctgagattctgcaggtggagtgagaaccgtcaaaatgtgcgtctgcactctcttaacccagcaccgtttatccagctctctagattcactaacttccaactttccccctgtaaaacaattagaataatgcctgtggcatgacaaacatgcatcagtaggaagccaatctctgccatggccacacaatttggctgtgaccacatgagtgattatcaagaatcagtcattctcctacaaaatatatcatatctattactgcaaaaacaaatttgtgttaaatatgtaaaccaataaaaatgtatgtgaaaattgtttctctgaaaaatacctcagtaagctttcaataaagactttaaagtcactataaaagatactgtcaatttgggcaaatgtgataaaattgtcaaagattaaaacaaaaatgtagaaaaattctgcattcagattccttcacaactctaagttcttgtcacttcttaaagaaatcaaatctggaacttatattctaaggggaaaaagtcttgatatctttaggggatactaaagataacctttgtctttcttgctttgctctgatagcctttgagaatcaaatggcattctataaagtgctgttccatctccttctataaacctcatgtagagggtagatttaggctaatattcatttgcacacaccctcctataaaataggattactttttttttgactgctgttgatttaacttatttttctgagtttctccttttcttgaataattcttgatatttagatttagtatatgctttctatatttttaaattttcattgactattaacaaataatttttgtgcttgtctaagtttgtcagcttacacaatctcatttggaaagtgaaagaccgaattgtccatccttgtataaaaacctggtttcttatgtttgatgtgaatttactaaaaaaaaaaactccagatatgaaaagtgtgcatcgattctaaccctttgttctcagttagtgtaagtaaactagcttccatacaaataagcccttaagtctcggtgatgtacacaatatgagtccatctctcataccaagtttggttctgagtttctggttagcatcattttggaaccataacttttcccatcatgtggttccagtattccttaaagcctgggaatcctctcctggattctctacataagcccagcaaactaatgtagagaataagaattggaaatggtgcaaacattttcagtggaccaggcctgaaagagaaacacatcaattttgtgcatattgcattagatagtattcagttactcggcaacatcaaactgcaaagaaactgctgagtcaaataaatgcagtcaaataaatgcagtcaaataaatgggatatgtagtctaactgtgttttctggaggaagtttgaatgagcacatagcagcctctttctcataagtcctccactacatataatatttccaatacataatgataaacttattctgtgtcttaaaatgatatttagaagtaaacatgaggaatgcagaggaaaactttcttcttttcaaattgtattgccctccctaacataaagaatcaagaattaagctaaacctctcctgtaatgagctataatgtattatgaattactgctaccagtgaacaagctgcttcatcattataatgtgcattgtaaattgccttccatagtgttacacaggtagttttgtaatgtaggtattacttctataaaaataaaaggaaacactcagaaaatatgaactattagggaaataagccctgagtagagatgatttttaaagcaaatttgattgttattgcctattttcaattgaaacaatgtagttgcttgattgacttgagttttttaaactaatgttaaaaatgttttaattgcacaaagataattacaggttacagaaacttgatttgtgttcactttagactctagaagtctgtataaaaaccaaatgtgatatgagaataatagaataataatttaatatgtggagaatatatttcatgaaagcttactccaaagaaaaccaagctagaattacataaattagagctctaaaaacattcttgttaatttataatttggaaatgaaataaccatatttaacttagaagaaatattcaaaatgattaatttaacatgtttcacccaaaaattctttagatgttgcatagcattcttaaactataatccagataaactttaaactatgacagaaaatatctcagttgtgtatacctaatgttttaaattaatatccagaataaatacattgtatattatatagcattaatggactctcttcttataaaacgccacttctgcagtccctttaggagaaagataatctgcttgtctttctgtcttctttgaatgacctcctgaaaaaaaagaaaatgatgcctccttggccacatttaaaaaatcattttctagtcagcagtgcttaattctccccatccatttattcatccaagcacaggccaagaatattctggcatatttcagagctagaggattgaatgggtggtgtctgatagtttgctttttggaacagttatcattactggtggaataatgatttatttgaccagagtgtctgaggaacaaattggagaagcctgggaagctgaactgagtgcaaataaaacagtgtagtagatgagatttatgttcagcattcttgatcacttcattttcactaattctccctccttaagttcctcactgtggagctcagctggtatgtaacttcaggcagtgcactgcaatctgaacctttatttctcttctttctttcctcttggattccatttcctctagccctcctcattaacctggatgacatgcattgaataatcaattaatctttagtaatatgtgagaacacatcagtgccttgatatattactcctacatatcattagtattttcacacagaactatgggacatgaaaagctttaatttctctcttggcaactgataaagaattcaggcaggccactccctggctttcaaatctgaaccatatctgtaatatatatgtagccttctccttcaatagtgagccattagttttatttcctccttaatatgttatgagataatgggtttatatgaagagaataatctattagagatttgtgtaactcacattataagaagactctgattgttgtgttattttagactacattaactctataagatgttggtcttaatctcaaatgcctacaggaattaggtaaaataatggtgtgaatctggcagtacatacacccacctaaagaattgaaattcaactgtcttaaactttatgtgggctacattaaatgtgtttgcatcctctgctttaaagcctgtgataacaagacaatacctctgtggtaaaagacaggaggcttcacaggacaaagtgatgtcttgggctcttcactttgggatacaagaattgagatctcaagaaaggtcgaggttactttgtctttctcggtcttgttgatggaggaaaagtcaagctatctaattggcaatttagggagtagacctgatcaccaaacagtaatattcaatgtttctaaaaacatgttcatgtgtaaagtaaacgaatggtgagattatgggaatttaacttttttcctcataatttaatctttctttctttctttctttcttttttttgacatagtctcattctgttgccaggttgaagttcaatgttgcaatcacagctcactacagcctcaacctccacagctcaagccatcctcccactccagcctcttgagtagctgggagtacaggtgcgagccaccacgcccagctaatttttgatgttttgtagagatggggttttgccatgttgcccaggttgatctcaaactcctgagctcaagtaaaccacccacctcaacctccccaaatgctgagattataggcatgagtcaccgtgcctggcccaatctattttaagtgtaacacaataagcaaatgctgcttttataataagataacaatgaagtttcttttcattaagatcaatatgcttacaaggcaatgtttacaccaatatgtttataagactatgtccaagaggcaggcattaggatagcggcaaccacagggagccaggccaggatgtgaggaggtctcctaagaactgtgggtgcttgcatctccagaaaggatgcaaagcacagccctctgtactagtagactcagaatcatgtactatgcatgtcaaactgtctatattgcttacacattctgcatatttgtcatttcttcactggttgttttgaagctccagcctgcctaagctgggttaatggaaataagagaaaaagcttctgtccatatttgagcagaagggtagagaggaacaaactcctggaaatccactgggcgggtagagtgtacatctgaaagtcagctgagcctgtttatccttccaaagtcatgctgggaattcaggatttacacctgggacgggaggacagtccccataataggtacagaataagtcagctcataagtacagaaattgagggtgaagtttagaaaacttttatgatgatttgacattaatatgacataaaagcacataatttttttcctaaaaatttatttccattataaggtattattctgtaatagattagagatttttttaaaagactggtcttttaccctacataatttaaaacacaccattatagaaggctttgaaaatgtataatgggtacaattttatttttccacatattaggtcagattcactcactcaaacaaggtcctcctttaaaaagtgcagcatttattctaaattcgggaataattttttatattttcagagttaatgctgattgaaaccataaagcacacaggtaaattctatactcatctcacaaaccataccaagaatagctattatcaacaaattatgacaccttttgcactttcagcaattcccctaatgaaacatattatctttactatggtagttcttttaagaattctggtaactacttagaaatgttaacaagatgattcacaagcaaagggtagtacaaattctcctatgcctaaacaaggatatatttctgagtgtctaagatttcccctgacaaaatacattaaataaagaaaatctttgctattgtctttccatttcaaccacaaattgggatgacccaggagcttgggcaaggttgcatgctcagaattttcgttcattttaaccaaaatgaacattattattcatttgttcaacaaatatttattgagggcctatcatgtgccaagcattcttcttacatggaaaaagaggagtaaaccaaacacacacaaatcactatcctcctggaaatgacaccctagcacggagttttcattctaagggagctgttctggggagtgcacatctctgctgcctgtgcccctccttgtccaactctttcataaaccctctttggtgctcagcccatttcttgcaaagcataataacattgaaccattattttttatatacaaattatgagacgtactgggatctagttctgggattctctgtaagaattcattctaaggtgacaaatcaataagatcatgagaaggctgtttatgtctgcatgtgaggatgtgggagactcttaaaatacctagagagatatgattttggacagaagagaactgaggttctgtgtcgtaaaaagtggtagcttcaagttaacaaatttgagaactgacatttttctaatatatttgtcccaaggctatgtgaaaccttggttatacacttaatggcccaacaccccaatcaacttttctatcatcaattcctcacctttaatgattaataattttggtaactaatagaatgactattaatgattaaatcacccaaaccttataacacaaattttaacccttctattccagagaagacttggcctaggtgaaagcttagctctgtaggtaagcaattaagaaggcacggtgttaaaaaggtattgatgaaggtgtctgcagatagaagggacaacacacatttgtttattcatgagtaaggaattgcccagatatatcctcattttagtctgcatcaaatcaagtttccagggagtcgcaggagaagttctctattttagtttttaacgtggctacaattatgaggacattaaatgtctcattatcttcaaggtaatattaatagcttaattttctgttcagtgtgagtccacgaatgtacatccatggcctgcacttaatatgtagttttcattattggagacttaactatggaaatgcttccctggattgaaatgtatgcatagaatgtagacacatcaattcatttatttactaaaattgcacagactatttataaatgtgtttttcaaaatgttctgttttgtgtaagcattcacttagcagatttattccatctgggcttatgcatgacaaagattctttacaagtttacagaatgatggactgagctatagcttccagaaaatattttttagttaacaagtgcaggaaatctttaggtccccattgaacagaagataatgtggatagttcaaccatatataagaccttctccctcccacccaccccaacagatacacacacacacacacacacacacagactatatttatatagacagagacagagacagagagacagacagagagaacatgaactccaaagtaaggtagaaagaaatttcacgagcttaaaaggtcccctttctttcattaacatgcccttccatcttcatatactgccctctaattgtcttataagtgtaatactggaaggacataatctgtgcctgcagagtgcaatggacttgtataaagtgatatggctagtcacttagcagaacacaggcttctagcaagaattccagagcctcccattaaaccacagagcaagttatttaataattgcaagacttattctctaacatttagtcccttgttactagttgaattattatgttctcaatgataagaaagatttaattcttttcttcaagggaccaatggcttgaacctgcctgtagggttctcccaatttgcactgtgtgcttctgtctattccactcttccaatacttaccacagttcagtgatcttatctctgtccattgtcatctctgacactaaactcctggaggacaggaactgtgttactgtcattcattcatttatttggcacatgttattgaagcatccttgtcttagtctgttcaggctaacaaaataacatacactgggtagcttataaataatagaaattgatttctcccagttctggagtctggaagtctaagaccaagacactagaagattccgtgactggggaggcctgttttacaattcactgatggtgcttttgctgtgtcctgatgtggcggaagttgggagggcagatctctggttcctcttttctaagggtactaacctcattcatgagaggactgccctcataaactaatcagctcccaaatgtcccacctccaaataccttcacattgggtattaggtttcaacatatgaatttgagtagggggacataaacattcagaacacagcactcctagtacttggccttgtgccacgaagttagaaacgaccacactgaacaaaatagacctcatggaacatgcagtctgacaaaaaagacagacatcagaaaaacaatcacagaaacaaatctataattacaaagcactataaggaatctgaaggaaacatgaagggtgtaattagagagaataccaggggatcttattcaggtagaaggataaatgatggcttcgttaaagacatgacatttaatgtgaaacctgaaagaaggagaggagcttttcaggaatagacataaacaagagtgatccaggcagtgggagcataagtaggggagatgatgtgaactgaggccagagaggtagcaaagaccttgtacgggcatgtcaaacatgctggattttagctaagtgccattacaagtattggcagttttaagtaaagaaacagtggggatagaatgaatttttagaaagaacacctggttggtagtgtggagatggactggaaggatcatcgagaaaccagggagagcaactaggcagcactacagtcccccgaagggctcataaacttcgagcttgccatgacatatagacctttctatcaaatattaactggactttttggcttccattgggtggagagactcctacctcaaatatttactttactttactttggttagaaagaccttaaaaatgctatcccatcatattcttctgggagcttaaaatatgtttctttcactagagattatctaacttgtaatgttaatgtaactcgattaaattccatgcacaaaatatctatcacatcaactggcctattataaatgatcaaaaaaatcaactcccagctgggcgcggtggctcacgcctgtaatcccagcactttggggggccaaggcgggcagatcacgaggtcaagaggtagaaaccatcttggccaacacggtgaaaccccatctctattaaaaatacaaaaattagctgggcatggtggtgtgcacctgtcctagctactcaggagactgaggcaggagaattgcttgaacctgggaggcagaggttgcagtgagccgagattgtggcactgcactccagcctagcgacagagcaagactctgtctcaaaataaataaataaataaataatagctcccttgtgttgctctttttgtgaacttctacacaacacagcatcacattggtgacactgactttacaacttccttgtaagaaacccaacatagtctattctaagttttgagaatttcactaccgaatgaacgttccaaaggacatcaaagttatacatcattcatctatacaaccaagtgtactacagacatcaataaaaatcattagacaatcattatccatgtgatttttgaaaaggacaaaaccctagcgaacatttttctgaattggcagatactccactgcacagagctcagaatcagtaagacagaagtgatagatgagttaacaggacccaatatcaataaatactctacccacatggattttatccaaggcagttcaaaaattttgaagagaaaaaatagaccaatggcagagatcctggaaaactaaaatattttggaaaagttttggaagacctataatcagaataacttccaaagagaataaagtaggtgaaattagggagactgacctaaaattgtgaagaaaagcagtatggttgacatactgaataaattcttgttaaaataagagggtagaaattttatagatgattacacatgtgaagtattagagatttcagttgacttacaaattgatgcacttattgacttatcttggattatatgtcagttcttctgatatgccagaaatccctcacttaatccctccaaatccactctccactctccacccttccatcttgttcactaactaggaaagctgacttgcctgggttacatcaatagaattgcatggcctcttgcttccagttggtttgaccagcagaaagctgaggggaaggaaattgagcacatttgggcagcctgtgttccttgacagaaggttattttttcactctagatggctgctgtataagacattctctccttctggggtctggtaatgtcttcttcccactgtccactcagttctaaggttggtacaagcttgtttctgctagcttcaggtttctccactatcccttgtgtttcaccaccaccaaaccccacacctctttgtaattagtcccttgtataaataaactctccttagttattctgagtgtgatatctgttccctttaaagccctccctgatctgtaattcctgatggactgtatttctaatagacctgtttttactagaccaaaacttcacttatttacatatgaaccctgtagccagagaagtctgagcaattgatcttggttttcatcccacagcactgagttcagaaatggccttgaaccagatctggccagactgggatgggaaaaggtaataaattagggctgtgttcctggcctgtgttctgtaccaaaatgggctctgtgtattttgtattttgtataatacagagacgaatgaagtgcaccaggccaggatgaggggtctccagcatgcagccaaactagcctacctacaaatggctcgagacttatgtattgaaattgaaactggagggaatagctgagcttctagaagctctaatgtgaacttcagtgactcatgttattacctgaaattgcatgaccccagtgaagattttgagatctagaagcgtgtatatctgcccgtcctaaaaaatgttgctgatcttgctattgtggatcgtagctgctctagtttcattctccagcctttgattgtgtaaactatgtctaatatgcccctgagtttctgagtctgctctcaccatcaagccaaacctactcttgatatttgtcaatacagcagtcatgcagcttactatcttcatgatttatgctttatctgcatatcatttttaaaatcaactttaggccaggcacagtggctcaaacatataatcatagcactttgggaggctgaggagggtggatcatctgagctcaggagttcgagaccagcctagccaatatggtgaaaccccatctctactaaaaatacaaaacgtagttgggcatgatggtgtgtgcccataatcccagctactcgggaggctgaggcagaagaatgcttgaacccgggaggcagaggttgcagtaagccgggaatgtgccactgcactccagcctgggcaacagagcaagactctgtctcaaaaaaaaacaaaaataatccattttaaatccacttctaattttaatattacactatgtaaaatatcagtaaattacagacacaagcctcaaagtccattcaaaagagggaaatctaagaggagtggggctcctccgcttatgaaacttggactgtcaggtcatgagctctttcaggggaagcagaaacattcttccctcaaacatcaactcttcaccacttagacactgagaaaaggagaaaaaaagtcattgttgaaagttagaaactagcctacttcatcctgaacctataccacctaggcagaccaaaataacccaatttgtaaatgtaattcagagtgattatgagagtataatcctcccacatacttagctgaagcaaacacaatccagtctagtgattcctactggaatcattttaggcctcagagaatttctagaaataaactgacaagaaaaataagcatatcacaggtgaaaataattacacatacaaagaaataaagccccctgaggaagaataagcaaaaacaacaaacagaagagaaagaaacacaggaatttcagacactaaaaatattaggacactgattatgacaacgttatactcactgtgtttaaagaaataaaaaacataagtgaaaatatacgcagatagcaagaaactatgggaaatggccaagcagattttaagaataaaataaacttctagaaataaaaattgtaatgattgaaattataaatgtgtggatttaatagcagtttagacattttatgaaaagataatatgttacttggaagacagatctgagttctccagaatgcatcacaaagaggcaaagagaaactatgaaagaaaataagagacattcggaagtgagtgagaagtctagcatatcgagatatagttccacgtggaaaagagagaacaagtcagagataattatttaatgataataatatatgagattattccagaactgataaaagacataaaccttctgacaaaatacctaacaaatgtcaagaaacttatacatagactttatcataatgaaacttcaaacaccaaagaaaaactcttaagaacagccagagttaaaaagaataaaaaacaaaaaccatattatatccaggtgaacaatttatgttattattaatatagttattaatataatgttaataatgtcaatctggaatcataaaactaaatatctttttaaaatgaaagtgtactaaagatactttcagacaaatcaacactgtgagagtttgtcacctaaagactcctagtacaagaaagttctgaagtatgtttagtagagagaaaaaattaataaaataaaataagcaatagagaacaatcaatctaaaagcagtccttaataataacttataaagtaagtaaacctctgacaagagggatccgtgaaatagagagaaagcaaaacaatacatagggaagtaacaatgcacagaaaagagacattagcaaataaacaagaggagaccatgaatcattgaagcaaaaattttaaaacttgaatgaaatgatctattttcctccaaaattataacataagaaaattgaaacaactatttgagaaaacctgaaaagagatggaactgggggtttaaaatctttcaaacataaatgaaggaatccctaccaggccaggtagacaggcacattcaagcttatattcaagaaaaatgtaatccttccacacttacagcttcagagaattaaaacacaggaggcccggctcatgcctgtgatcctagcactttgggaggccaaggagtttgagaccagcctgggcaacatagcaaaaccccatctctactaaaaatacaaaaaaattagccaggcatggtggtgcatgcctgtagtcccagctacttggggggctgaggtgagaggatcacttgagcccagtaagtcaaggctgcagtgagccaagatggcaccactgcactccagcctgagcgaccaagtgagaccctgtctcaaaaaacaaacaagaaaaacaggaaaactccccaaatctttttatgagatgaagataacatctcatatcaaaccagacaaggacagtacaagaactgaaaagtacagaccaatcttaattaggaataagacataaaaagccctaataaaaattagcaaatcgattcagagtacaccatgcaatataccctgactaaataacatccatttctgttatgcaagcctgatttaatatcataaaagctataagtataattcactaatataataaaggagaaaaattatatgatcatctcagtaaatatagaaatagcatttgataaaatacagcacctattcaaaaataaaacctttgacctacttaaaataagagaggaattccttaacctgaattaaggactatatatcaaaaattatataccaaaactttaaagtgccagatattgttctaattgttctgattagtttattccttataacaaccctgtaacatgagcactgttactgatcttgtcttataaataatgcagtaacagaaaaactcagtcccttgtccaaggtcacaatagattgtaattggaggagatgtgattgaacctgtgcaataatttagagttttctctctgaactactatgctaagttttaaaaataccacactttctttactttctttaaataaatttaaattgctctctgagtcttcagatggaaggaaattccatttcagtcattattgaggcaccaaatcaaatatttgcagttaaacaggttgtgaaccaacttggctgcactcctgggtgggtgcttatgtgcagtggctctgaattttactccaaaatatcacattagtatgaacctctgaaaaatagtatctcccccaagggcctcctactaacaggttggaaaattgtattttgatcatgtctgtagggtcatcttctccaggcttatgcaagtatctcagaggaactatgtagaccaggacatttgggaaaagcccccttgttctctaattccccttggtctctagtccaaaagggtcactggggatatgttcattattaatcttgcctggaccctgaaggttagaggctctggagtttcaatgtcaagcgtgagcccaggggttcatgtcaggatggtgattggcactcagcctcagagggccataactcatccagtctcccagaggtcctgacagtccctggggtcctgggagacagcaaggtgcagaaactctcatatctgccctatccccgtatctggccctgggaaaagctctcaaaaccttcctcctccccagtttcacaagttccaggatgtccttctctgcttagacaatctgattctattgctgcatgattctacctttaacaaaaactctccatgggtatggttctttctttgtctggcaacttttactcctggccctgccacagaaaagtcgttattaatttccttcagtaaggaaaaaagacttggccactagtcttggaatgtagaagggaaaattacctacagcaagagaacaaaaaacaatatttcaataaattatcctagcatatatatatatatatatatatatatatacacttaaaaatagtcctgatagtatatcccaaaatgttaatcatgtgtatcaaggatgagatttttaaattacttttttcttgcttttatctacatttttcaagttttttacaatgaatatagatttgcgaatttttttaagttgatctttcatttaaaagggttcatttggtgtgttttataaactactcccaaggttaattttttctctcctttaagaattctataaacacttcacagtttcaagtcagtatacatccctatggtgtgtataagacgtgatttcaatgaatggtgattgcagacactaggatctattttaacttaaataaaatctttaagaaaaaaatctaaaaatactgttcagttcctggaaaaaaagaggaggaaatgaccacccactcactgagaactgggagaatgaaagtcacatccgtcaggtccccattcaaatggactcaaaaccacttcagtgtgtcctgtctcacctcaatcactgttttagagaaaaacattttttttcaccatacaaaaaattagtggaattcagaaacaatgaacatttgtattgtggacatagtacactttatatcacttccagtgacatcaatgataagccacaatttgactagtgagattaaaatttatttcacagctattcaactccagcacattttgggttttataaccagttttccaaagttgattatcccttctgacaccgaaagttagacagtttgagtgtgtgtgtatgtgtgtgtactttgcagaaaagaaaaatagaccaccccagaagttaggatattcctaatacattttggggacacaaatagtttttccagaagtcacacagtaaaaatcataagagtaagtgctggaattttccatattctaatttttttttctagaagaatagaaaagcaaggctcttttatgttacattcctaagaaaaatgttgaatcagctgacttctgtacatagcttagcagtgaggcactaattagaactctcatacatttttaagaaggatgacttattagcagtgcatccttgatattgacttgagttggtcagagtaaccaattgcttctaaccttggtttttaattgtaatttactgttaatttaacttcaatactatctatttagtttaagtactgtaatgatccatgtttgaatcaatggtgttttttggcgggagtaaggtgttaggactatcgaataagttgtattttaaaaatatgtgtattgcgcatttcaactattaatcattcacattctattgttaaagtagatgtattactattcactatcttcattaccgcagaatatattgtgtttaaataatgacactcactattattaaagtccttcccaactgtatagcatgaatgagtggctttttattagtgtaaaaagctttcagggaaagtttgattcctactaccgtcgtaatggactgaatatttgcttctcccaaagtttgtatgttaaaattctaatttccattatgatagtattaggtggtggggcctttgggaggtaactgggtcatgagggtggagccctcatgaatgggatcagagggttctctagctttgcttcccttaagtgaggacacagtgagaagtgagtcacctgcagcctggagaaatgccctcaccagaacccgaccatgctggcatccttatctcagttctcacacctccaggactgtgagaaatacatttttggttttcataagccactcaatatatggtactttgttacagtggccaaaactgactaaggcgaccctataattttaaatttaggagaaattaatttaaataaagagaaggagaaatcaactaccaccctcaaataaatgataccttccaagcatcttggttgtttcgaaagtgtaaaaattaaagcattttttaaaaaccaacatgctgtgttttctcaaaaatatatttaacttttaaacttgataatcagtaaaatgggagaaaaaaataagaccttttccttctctcttatgttcacatcatttccatgcttttaaatttatatttgcttaaaaatattgaattttgtcacccttttgtaatctttcttcaaaacattagattagaaccaaaaaataagaaaggaaacttttagaagactgtgaaattagcattgtagaaggaatcacagttatcgagaaagaaagaaagaaacagctacttcaggagcaaatgagagcagggaatatttaaggcaaattgtgatagacttctatggccctcaataaaacacaccttcaagtattcattgcactgtatgatactggggctgaccatgtgactagctttggccaatggtacacagcacccataaagtaagctgctgcatgagaagtgcttgcacattgcaacttgcctttttgaaatgttccctcttggaacccaattctagggatgcccaagaagccacacagtgaggctcgggtagagagaccactggccaacaaccctagctaaggtcccagctgggagccagggccagaagcaattgccagtcatgtgaacgagactattttggaccttctaattttccccatgctccagctgatcctatgaaaagaagaagaacctcccagtcataccacagaaatatgagaagaaatacattgttattgtgttaagccactaacttttaggatggtttgtttcacagcaatagatacctttaacaaaataaatgaggctcagagaatttatgtaatttccccagagtcacaaagtaggtaaattatatgtaaatcaggatttgaaacaagacctctgtaacttgaaattcatggtcttgcctcaagttgccactgttcatatttaaataaagaaaaatgaagagtcacatatttttctcaataggaaagaccatatagctccattttataggaagcaggaggatatacaaatgtctttatcttatccctggggtcagagacccctcctggatcccatctcagagctctgtagaaaaatcactccagataggctctgacatgccctctaaataagcagtatgctctgggtggcaacacttaattcatacctgctatattaaacagatgggaaccgagacccaaacaggtgtttgacacatttcgcaactacaaaaaaaaaaaagtcagctatttttgagaaattaaagattaaaattacattgtcttttacagaaagatttagtgctcacatcattaaaaatttgagtttaatagacccaaacttctttattcacacttaactttgaaggagaattaggggaatgcatgttcagactgtatggcccatgggcaaatcttattcagtgcaatataaattgaatggtcttccacagaaaagaaagtgcatttgtgaccaaaaaaatgttcattaagtatatgcgagacgcaaattaaaatgacaatgagctacaacaagacgtccaccgaaacaggtaaagttaaaaacactaaatgttgatcaatatattatgcaactggaattcacacattatttgtgggagtgaaaaatcatacaaccactttgggaaaagatttggaaatttcttatagaaacacacctaaacctatgatccaacaattccacgcttgggtatttacagtagagtaataaaaatgtatgtttacaaaagaaattgtacaagaatagtgatagaaactttatccaaaaaaatttgattttttcacccttttaaaaacattattcaaaacattagatcaagaccaaaaaaataagaaagaaaacttttagaagaccatataaaattcataatagccagaaactggaaacagcctaagtttctgtcactaggagaataagcacagggtgtaatattcataaggtggaacagtgctgtggaggtcatgaataggctccattcagacttcctgctgaggggagcaaagcccaccagagccccaactattgccctttagctccacccttacaaatattatggctcctccttatggatgactaagctggcaacgtaataatgaagactttgggactcctttaacaggcaactctgggtggagaactctgcattggcctgcctaggactttctctgagctgctctggagtccgtggctcttcctacacagtcctccgctgtccccttctctttcacaggtgtcagaccaacacagcagtctgaaggctctccctacctactccaactcccttccctttatccttcatgggcatttccctcaacaatttcttacacatctaatcctgtccttttatcttcttctcaagttacccaggctaagaaaattattcagtgataaaaaagaaatgaggaacacgatgaatgaataaaaaaatcattatgcagattgaaaaaatagagactcaaagaaataaatgtgatattgttacagtaggtagttaggcagacatgagcagggcaggagagggccccccaaccccaccaaaccaggaatgtcaggcaaccatcaggtgatggtcaggaggttgttaaactgtcgctctaaaatagtaattggttgcagctggtgccagggaaaggctgtctccaacagacagaaaacagctgaaactggtgatcagcagtttcctaaaaagatctcaggagttgggcgagtgggctcaagcatgagcattaagaggcaaaatggtggagtttaactggcctatgaccttcctccaaaacactcgactggtaagggaagaacacctcaagtgaccatgtgtacaacttcagtaaacacactgtgcatgcatcccctcccaagtgttagtgggcccctgtgcatgtggacagcccaccccaagggaagaatcagaggagaagggatacaacaccccgaaaccatgctaacatataaaatcccagtcaaagttcaaaccacacacttgaatctctcaagtcgctcacttggtcttcttccaagtttactttacttcctttcattcctgctctaaaacattttaataaactttctctcctgctctaaaacttgcctcagtctctcactctgccatatgccccctcagtcaaattctttcttctgaggcagcaagaattaaggttgctgcagacccaggcagatttgctacagctaacaatatgattccatatatgtgaatttctagcaggtcaaactaatctatgttgagaaaaaatctgaagaatggttgtctcaagaggttaggaataagcattgactgggaagaaacatgatagaacattctatggttatgataatattctatatcttgatagaggtttggattgcacaaaactcatctaatgttaggcttaaaatttgcatattttgtcacgtgaaaactttgccctaaaacaagaactgtaaattaatactgaactctagttatatacatgctgaaatgtctggagaaaagtatactgatttctgaaacttacttttagattcatcaaaaatgcaaggatgactagatggacagatctgtcatagtaaaagtatagtaaaatgttcagatagactctaagggagaatacatgggtgtttactgtaacattatttgaaattttctgtatggctaaaaagtttcttaacaaatcccagaacactgcagataagaaaatcaaatgcatctcaagcagtcagatgcaaaaaaagacaaagaaatttaatggtgaagaggtagagcaggataactgaatagaaccctccagctattgtcacctctgcaggaaaaccaaattgaacaactatcccccaaagaaaggactttcatatgaaccaaataccagatgagcaaccgcaatacctgattttaacatcatagcaaggaaagaggcactgaagaggttaggaaagacagtcttaaaaggccaacaccatgctacccctgtcccccgcagcagctgcatggcagagagagagaatctgtgtgcttggagggaagaacagcacagtgactgtgggacactgtattggaactcagtgccacctgtctcagtggaaagcaacacaaggtggaatctggctggcacccacagaggacgcactaagaccagccctagccagatgggaatcatccatcctagaagtcagaaactgagttctggttagccccactaaaggctaaagtactctagggtcctaaataaacttgaaaggtggtctaggccacaagcattgcaattcctgggcaagtcctgatgctgtgatgagcttggaaccagtggacttgagctgcatgcaacctagtgatataccagctgggagagcgaagaaagtacttgtgtcacccttcccccaaccccaggcagcacagcttacagctctgggagagattccttccctctgcctgagaaaatgagagggaagagtaaagagggctttactcttatagacatacctctataagtctgcagtagtcatagcattactgggcctgaggtgatccttaatgcagatacagctacactgaccaaaactgagatcacaacactcaataccctttgaatagttggaaagcctttccaagaaggatggatacaaacaagcccagactgcaaagactgcaacaaatacttaacttttcaatgcccagacattgacaaacatccataagcatcaagaacatccaggaaaacatgacttcacaaacaaactaaataaggcaccagaaaccaatcccagagtgacagagatatgtgacctttcagacagagaattcaaaatagctgatttgaggaagctcagtgaaatccaagataacacagagaggaattcagaatcttatcagataaatttaacaaagagattgaaataattaaaaagaattaagcagaaattctggagatgaaaaatacaatggacatactgaagaatgcattagagtctctaaccagcagaatttatcaggtgaaagaaagaagcagtaatcttaagacaggctatttgaaaatataccgtcataggagagaaaataataataatttaaaaagtatacctacaggatctagaaaatagcctcaaaagcggaaatctaggaattattggccttaaggaggaggtagagagagagatgggggtagaaagtttattcaaagggataataacagagaactccctgtacctaaagaaatatatcaatatttaagtacaagaaagttataaaacaccaagcatatttaactcgaataggggactacttcaagacacttaataatcaggctcccaaaggtcaaggataaagaaaggatcctgaaagtatcaagagtaaagaaataaataacatacaatggagatccaatacatctggcagcagacgtttcaggggaaacctatgtgccaggagagagtggacatgacatatttaaagtgttgaagtgcatacactctcccaagactaaaccaggaagaagttgaatctctgaatagaccaataacaggagctgaaattgtggcaataatcaatagcttaccaaccaaaaagagtccaggactagatggattcacagccgaattctaccagaggtacaaggaggaactggtaccattccttctgaaactattccaatcaatagaaaaagagggaatcctccctaactcattttatgaggccagcatcattctgataccaaagccaggcagagacacaaccaaaaaagagaattttagaccaatatccttgatgaacattgacgcaaaaatcctcaataaaatactggcaaaccgaatccagcagcacatcaaaaagcttatccaccatgatcaagtaggcttcatccctgggatgcaaggctggttcaatatacgcaaatcaataaatgtaatccagcatataaacagagccaaagacaaaaaccacatgattatctcaatagatgcagaaaaagcctttgacaaaattcaacaacccttcatgctaaaaactctcaataaattaggtattgatgggacttatctcaaaataataagagctatctatgacaaacccacagccaatatcatactgaatgggcaaaaactggaagcattccctttgaaaactggcacaagacagggatgccctctctcaccactcctattcaacatagtgttggaagttctggccagggcaatcaggcaggagaaggaaataaagggcattcaattaggaaaagaggaagtcaaattgtccctgtttgcagacgacatgattgtatatctagaaaaccccattgtctcagcccaaaatgtacttaagctgataagcaacttcagcaaagtctcaggatacaaaatcaatgtacaaaaatcacaagcattcttatacaccaataacagacaaacagagagccaaatcatgagtaaactcccattcacaattgcttcaaagagaataaaatacctaggaatccaacctacaagggatgtgaatgacctcttcaagggagaactacaaaccactgttcaatgaaataaaagaggatacaaacaaatggaaaaacattccatgctcatgagtaggaagaatcaatattgtgaaaatggccatactgcccaaggtaatttacagattcaatgccatccccatgaagctaccaatgcctttcttcacagaattggaaaaaactactttaaagttcatatggaaccaaaaaagagcccgcatcaccaaggcaatcctgagccaaaagaacaaagctggaggcatcacactacctgacttcaaactatactacaaggctacagtaaccaaaacagcatggtactggtaccaaaacagagatatagatcaatggaacagaacagagccctcagaaataacgccgcatatctacaactatctgatctttgacaaacctgagaaaaacaagcaatggggaaaggattcccnnnnnnnnnnnnnnnnnnnnnnnnnnnnnnnnnnnnnnnnnnnnnnnnnnnnnnnnnnnnnnnnnnnnnnnnnnnnnnnnnnnnnnnnnnnnnnnnnnnnnnnnnnnnnnnnnnnnnnnnnnnnnnnnnnnnnnnnnnnnnnnnnnnnnnnnnnnnnnnnnnnnnnnnnnnnnnnnnnnnnnnnnnnnnnnnnnnnnnnnnnnnnnnnnnnnnnnnnnnnnnnnnnnnnnnnnnnnnnnnnnnnnnnnnnnnnnnnnnnnnnnnnnnnnnnnnnnnnnnnnnnnnnnnnnnnnnnnnnnnnnnnnnnnnnnnnnnnnnnnnnnnnnnnnnnnnnnnnnnnnnnnnnnnnnnnnnnnnnnnnnnnnnnnnnnnnnnnnnnnnnnnnnnnnnnnnnnnnnnnnnnnnnnnnnnnnnnnnnnnnnnnnnnnnnnnnnnnnnnnnnnnnnnnnnnnnnnnnnnnnnnnnnnnnnnnnnnnnnnnnnnnnnnnnnnnnnnnnnnnnnnnnnnnnnnnnnnnnnnnnnnnaattttgaaaataaggacagagttggaggacttactgtacatgatttcaagacttattataagggggagggggggagggatagcattgggagatatacctaatgctagatgacgagttagtgggtgcagcgcaccagcatggcacatgtatacatatgtaactaacctgcacaatgtgcacatgtaccctaaaacttaaagtataataaaaaaaaataaagtgttgaagtggacatgacatatttaaagtgctgaatatgacatgacatattctatattacctagaatagtatatctgacaaaaatattcttcatacaggaagaagaaataaagacggtcccagacaaacaaatgctgagggatttcataaacaccagaactgccctatagcaaatgctaaatagactgcttcaatctgaaagaaaaggatattaatgagcaacaagaaatcatctgaaggtacaaaactcactgataaagtaaatacacagaaaaacacaatattataacactgtaattgtggtgtctaaactactcatatgttcagtagaaaaactaaaagatgaactgatcaaaaatagtaactacaataactttttgtagacatagcacaataagacagaaatagaaacaaaattggaaggaaaaaagtactttttattagttttgactttgcttattacttagctagtttgtttatgaaataagtgttaagttctcatcagcttaaaataatggcttataaggtattatttgcaagctttatggtaatctcaaatttaaaaaacatacaatgaactcacaaaaagtaaaaaattaaaacataccacctgggaaaaatcaccctcctaaaagaaagacatggaggaaggaaagaagtatgagcagactacaaaacatctagaaaacaaatgacaaaatgacagcaataagcccttacttatcaataataacattgaatgtaaatagactaaactctccaatcaaaagacatagaatggctgaatggattaaaacaaaagagtaaatgattcgtggcctacaaaaaacacacttcacctttaaagacacatatagattgaaaataaagggatggaaaaagatattcatgccaacagaaaccaaaaaagaaaaggagtagctatacttgtatcagacaaaatagatttcaagacaaaaactataagaagagacagagaaggtcactatataattacaaaggggtcaattcggcaagaggataacaatatatatattgtaaatatatatgcacccaaaaccggagcacccagatacataaaacaaatattattggagctaaagagagggataagccccaacgtgatagctacagacttcaacaccccgctttcagcattggacagatcttccagacagaaagttaaaaaagaaacggaggacttaacctgcactatagaccaaatggaactaatacatacttacacaacatttcatataccttctcctcactacatggattactctcaaggataaaccatatactaggccacaaataactgttaaaaattcaaaaaagtgaaattatgtcaagtatcttctctgactacaatggaataaacctagaaatcaatgaggaattttagaaactatacaaacacatggaaattaaacagtatgctcctgaatggccagtgggtcaataaagagatttagaaggaaattttaaaattccttgaaacaaatgaaaatggaaatacagcataccaaaacctgtgggatacaaggaaagcagtaccaagaggaaagtttatagcaataagtgccatcatcaaaaaagtagaaaaactttaaatagacaatctaatgatacattttaaagaactagaaaagcaggagtaaaccaaaccttaacttagaagacaataatagtaaagaccaggcagacgtaaataaaactgaaatgaaaaaaaaatacaaagataaatgaaacaaacagtttgttttttgaaagacaaacaaaattgacaaacaagaaaaagaagacccaaataaatgaaatcagagatgaaaaatgagtcattacagctgataccacagaaattcaaaagctcattagagactactgtgagcaactatataccaataagttgaaaaatctagaagaaactaacaaattcctagatacatacaacctaccaagattgaaccagcaagaaatccaaagcctgaacaggctaataacaagtaacaagattgaagccataataaaaagtcttccagtaaagaaaatgccaggacctgatggtttcactgctgaattttaccaaacatttaaagaagacttaataccaattatactcaaactagcctaaaaagtagaggaggtaatacttccgggctcattctacaaggctagtattaccctgatacaaaaaccagacaaagacacatcaaaaaaggaaaactacaggccaatatcactgattaaaactggtgcaaaaatcctcaacaaaatactagcaaactgaatttaacaatacattataaaggtcatacaacatgaccaattgagatttatcccagggatgcaagaaggattcaacatatgcaaattagccagtgtgatacatcatatcaatggactctagtacaaaaaccatgtgatcatttcttgagtaataccataaaagcacaagcaaccaaagcaaaaatggacaaataggatcacatcaagttaaaaagctcccacacaccaaagaaaacaatcaacaaagtgaagacacaacccacagaacgggagaaaatacttgcaaagtatccatccgacaagggattaataaccagaatatataaggagctcaaacaatgctacagaaaaaaaatctaataattcgatttaaaaatggccaaaagatctgaatagacattccacaaaagaagacacacaaatggcaaagaattatatgaaaagatgctcaacatcactgatattagagaaatataaaacaaaactaaaatgagatatcattttaccccagttaaaatggcttgtatccaaaagatgggcaataacaaatgctggagaggatgtagagaaaagggaaccctcttacgttgttggtgggaatgtcaattagtacagccactatggagaacagtatggttcctcaaaaaactaaaaatagaactaccatatgatccagcaatcccactgctaggtatatacctaaaagaaagaaaatcagtatattgaagagatatctgcactcctatgtttattgcagcgctattcacaatagccaagatttggaagcaacctaagtgtcatcaacagacaaatgaataaagaaaacgtggtacatatacaaaatggagtactattcagccataaaaagaatgaggtcctgtcatctgcaccaacatggatagaactggaacacattttcttaagtgaaatatccaggcacagaaagaaaaattttgtatgttctcactcatttgtgggtgaagaaaattaaaacaattgaacttatggagttagagagtagaatcgtggttacctgtggctggaaatcatagtgagtggggctggggggaagtggggtggttgagtggggctggggggaagtggggtggttaacgggtacaaaaaataaggcctactatttggtagcacaacagggggattacagtcaacaaaaatttattgtatatttttaaataactaaaagaatataactggaatattcataacacaaaaaattaaaatatttgtgttgatggatacactatttaccctgaattgattatgacacattgtatgcctttatcaaaatatctcatgcaccccataaatatgtacacctactctacacccataaaaaacaaattttttttttcaaaaaagttaatggcatcagactagaagctaaagcatgatgtaaaaataaagtaaaggcattttcagacattaagggtcttgcctattataggtaatcttttctcagtaggatgtgctccacaaaaacaaaaaatctaaactaagaaatagaaggatatggcatccaggaaaaagagattcaatatagcagcaaggcaaggaaaattcccagtttcaatgtgaccagaaaccttaggatgatagttatgtagtaggttgagataataaatattgcaggaggacttggagcttaaaaaaagatgacgaaaaaaaaagagactgatagattattatctgctgtgcttgatttatgactttattttaaagagtttcatagatcagtagaagaatttggtgattgttagcaataagtacctgtatttataagataagcaaacatgtaaaaagaattcattataaactccaaaaaaaacaaaaagcttcataagatgtagaaggtcactatattacaaactctgctgttgacaatattaacatactcaaaagaatgtggacactcaatattaatttaaccaaaaattacatgataactatactgaaagtgatgagagatggaaattgtaggcactggtggcgattgctgttaaaaaaaaaaaaaaactaactacttatcttcagtaactggaaatcaatggataatgtctaaaatttaaaaaccaagaaagcagaaaaagcaagttttcagaaatacagcataagaaagagttaagaattgaaagtcatcatctctgagagcaaaaattaagggtagatatgtatgaagggggctgcagtttgttgtcatatgccttgttgtcttactttgcttctaaaagtgtatacatgcattcactctgattaaaattataatttaatttaattttttctatctggtgcaactataggtatactcaggatttatttctccataccgcattcattgaaatgtcagacattccttggtgtgtcaaaaaggaaggaatgcggagactagaaaatggaagaccacaatggatttaccatatgcaaactgtctaacccactctctacattccctagggggagtccagaattcacttccttcactgaagtttgtgatacacattagtgagaataacaccagcaacttagaaaggtatcttagcattaggaatgctaatgataggaactccccaatgggtcatggggatgattcaatcagatgtccatcatatggcatttaatcaacagagggagaggaggcatagttatcatagtgatcagaatgttctaacctagatatttttgacaatgtttaatcaaccatgcagtctaagatgttgaaataaaatcttgtatatttgaaaaaactttggatctggtaaataccaccaaaatagatataaaattcttgacctcttacccaactcctagaacaaagtcattttaaaaagttttactgatatgtaataattgtctgtatgtatggggtacatgtgatattttgatatatgcatataatgtataatgatcaaatcagggtatctagaatatcaatcacctcaaacatttactttttctttgtattgataacacttgaaatcttctcttctagctattatgaaatattccacacgttatagttaactattgtcaccctactgttctatcaaacaatagtacttagcccttctgtgtttgtactcattaaccagcctcttttcattctcttccactcctgacctttcctagcttctagtaattatcattctagtctctatctcaaaagaggacacacaaatggtttacgggtatatttcaaaaggctcaacataaccaatcagggaaatgtaaatcaaaaactacaatgagattgtttcaccccagttaaatggctatttacaaaagacaaaaaaaaaaacaaaaaaaaaaacaaaaaaaaacaaatgctagctatgatacagagaaaagggaactcatacactgttggtggaaatgtaaattaatatagccattatagagaacagtgtggaggtttctcaaaaaattaaaaatagaattaccatatgatccagcaatcccactgctaagtagatacccaaaagaaaggaaatcagcatatcaaagatatatctgcactcccatgtttattgcagcactattcacaatagccaaggtataaaatcaatctaagtgttcatcagtggacaaatagatgaagaaaaggtggtatatatacacagtgaaatagtattcagccataaaaagaaagagatcctgtcatctgcagcaatgtggatagaactggaggtcattatgttaagtgaaataagccaggcacagaaaaacaaatattgcatgtctcactcgtatgtagcagctaaacatgttgcacaaagtcattttaaagatccaagaggctccttcaatgaagaaaagcctaatgaccacaaaggacaataaaatcactggtgtagagaagagatgcattgcatagagacaagagcttttattttgcagtcagaatactggattcaaaatctggctgtaacatttactagctgtgtgacttttggcatttactaagttaattgtgttataaagaaagaaaaatatcaaacatttagagaaaagataagacacaatctgtgaggcaacactaattcctaagaacgcaggattcgagtgctctccagcattatccccagaatgaactctagtgggcattttgtccacttcaagggaaaccaagtattggcacactacacaacatttctgccagccaaagaattcactttactttagaaatagccagtcttatcataggaccctcatctagagtcaatcatcttataaaagcgtaaaatgtgctgggcgcggcggctcatgcctgtaatcccagcactttgggaggccgaggctggcagatcacgaggtcaggagatcgagaccatcctggctaacacggtgaaaccccatctctactaaaaatacaaaaaattagctgggcatggtggcacacaccagtagtcccagctattcggaaggctgagacaggagaatcacttgaacccaggaggcggaggttgcagtgagctgagatcatgccactgcactccagcctaggcgacagagtgagacacggtctcaaaaaaaaaaaaaaaaaaagaaagaaagaaagaaaaaagggtaaaatgcactactgaagatggatttaagtcataatgtacaatagatactttgaaaattcagggcctggttctgtagatgtagtaattgttctttaaccagcaaacagtaaacaattctgtttttcccaaaaccaaattatattagttgaggaacaaaggactagaaatatggtgctattcacttaattatctatggtgctatattaaacatggtgctattacctaattgctaattacatcttgcaaaattttgcattccatcccatcagctccaggctctgctggcatggggatcatagaaaagaggaatgttttcagcatttgatggagcttagacttctattggactattttacactcttcatgttgaagacagggggaaaatggtgttttagcgtagtttgattgattctaattctcaaggaaaaactggattgctgttatacaatgggggcagggaggagaataaacagaacaccttctcatattaccatgcccagtgttaaaagttaatcaaagactctggcaatctattcaggcagaaccaccaaaagcttagatccctccggaagaaggtttgagtgatcccactgggtaaagaatcccagccagctgaggtgctagcagagggcaaagcaaacagaaatgcttggtggaggaataaagtcataaataccagtgacagtctcatggtcacttgcagaaacaaagactaaagcctctacccaatttttctttcttgttgaatcatggttatatttgcgcattttaattaaattcccttttcttgaggaggtaggtggtagtaatcaaccatataatgcgtgctttcagtagccaaattctgaagtgggattatgcggaaccaaagaagtggacatcccccagagattctggatttggagtctggctcacttcagattttcttacttgggggagggaaagagtgtattgtaagttgtacgaaggatcattatattatgttagataaggacttttttaatgtaaatatgtgtagaaggacaaatatagtcagccaaaagggtaaactgtagtgaatattccttatttgttggctgcacaaacctcttccttttggggagaaatctcccactgtgtgagccctggagagaggcacagcccacctttgcacacaaaggccaaaggaagacaagtgtgtcctctccatatcccatgaacaggtgcctcgccccagccatctggttctttttctcagcttttgtaccttcatcaagtgatgcaaggataaagggacagtttatgctactgtgctcagcatcaggggtgggtagagatagtgggcggttgtggctttaccatcctggcactgtcacctgaggaggtagggccagcagcagtgtctgaaccagagcatttgaggcaagattttgcctgtgttcccacttcctgacttcctcttgtttcttacttatatccttctctttaaattaagcaaaattgttttcccttgctaattaggcaaaattgttttcctttgcttacagcaaagagccaagtgagacaaatctattttcactactttagaagaaagtcaaccactttggtggggctagcccatctgaaagtaggaaaagaatacgtggctttgttaaaaagcctgttttggcctgcagccaggaatgaaatatgtcagactctgcccaagctaccataagtgaactaaagggaggggaaaaaaacattgcaggatttacaactgagacccggaaaagcctgaccccaagcctgccaagcaccatctctagcgcacactctgtttgataatagcgtcaactacctaagcacaagctttgtaaacaaaataggttcatggatcccaaataatcttttctgccatcgatgtcctaaaacaaatagattcattcagtagatggtgcagggaggtggccaccaatggaatccccaaattaagcatgactgattaaactgttgattaatttttgaaaatagcacagaaatgagcattacatttagcaagacaatggagaaaaaaaatcatcagtgtacactgttgtgagtcaagactcaaactcaaaactttacaaacttacacataaatatctttcctttagaactcactaactatccataaaagtgggttttgatacagggtgtactaactcctctttatttagtcacttaaaaaatattccctttccttttacaatacccatatgaagttttgtcttttcctcttccaactttccatgttccaaatggactagtgccaagcatgaaaggagaatttctcctatggagtcaaaggcttctatagaggttgataattcaagtttcctgttaatctaaacccagcaccagaaataagctttgctcatggccagctatcccctctgagccaggttcaactgaattcctttgaaggtgcagtgcttaaagcacagcagcgtgcacccaaatgtaatctctgtctcagaggttcctcctgagccctgccttctcctatatgttctctctcagtaagaggaagtacgatcagccaatttctccaagccagatatacagaattgacctggattcctaccttcctgctccttgccaatcctctcaaaagttgtgcattactctccattcccttgggcaaatcgccatcggaaggattggagcagtagcctctcaaaccctcttgaagcttgagcccctctcccctcttagacctgacagattctgcactgtataccaaaacgactttttaaaaacaaatcattcttctgcttaaaattattcagttgctacccgctgccttaggaagaagtccatataccttaacacacctgcaacgccatgcagaattccatcctgtcctgctaatacaatctaatttttggcgattcttgcctggaggttccacttgtatttccccaaaatgttcacattttcttgtgcctgaggctttgtcatagggagaggagagactttgtttaaaggtctttctctccatctgcttattatccagattaaatctgcacctccttccaacattatctcaaatgttgcctccaccagaacctttctgactgcccaacattagcactgtgtatgcagctccataaaagctctatgttgtattttcttttttgtaggtgtcctcaatgcagttgactgtgtgctcttcagtgtcaggttagtttgtgctcagtaagcaataaatagctgctgaatgaatgaatgatttataaacttggatgcttttttattatgatttttccctctcagtaagtagacatactctgtaggtaataagaactttcttggtttgttttttaataagtctcattcctggtctcttggctctcaagtttcatgtatgtactaaagcaatgtcttaaatttgcttttatataggccagaattagccaagcaaagtgaaaaggaaaaattattgttgaatatagaaaataggactattacattttgaaattgcactttatcatctgatactagagaaacaataatctggccgggcgcagtggctcatacctataatcctagcactttgggaggctgaggcaggtggatctcctaaggtcaggagttcgagaccagcctggtcaacatggtgaaaccccatctctaccaaaaaattaggccgggcacggtggctcacgcctgtaatcccagcactttgggaggccaaggcagggggatctcctaaggtcaggagtttgggacgagcctgaccaatagagaaactccatctctactaaaaatacaaaattagctgggcatggtggtgcctgcctgtaatcctagctactcagggggctgaggcaggagaattgctcgaacctgggaagcggtggttgcggtgagctcagatcgcaccactgcactccagcctgggcaacaagagtgaaactctgtctcaaaaaaaaaaaaaaaaaaaaaaaaaattagctgggcttgtcccagctactcaggaggctgaggcagaagaatcgcttgaatccgggaggcggaggttacagtgagccaagatggtactgttgcacttccagcctgggcaacaagagcaaaactctgtctcaaaaaaagaaaaaagaaaaaaaaaagaagaaacaataatcaaccacttttgaaaagannnnnnnnnnnnnnnnnnnnnnnnnnnnnnnnnnnnnnnnnnnnnnnnnnnnnnnnnnnnnnnnnnnnnnnnnnnnnnnnnnnnnnnnnnnnnnnnnnnnnnnnnnnnnnnnnnnnnnnnnnnnnnnnnnnnnnnnnnnnnnnnnnnnnnnnnnnnnnnnnnnnnnnnnnnnnnnnnnnnnnnnnnnnnnnnnnnnnnnnnnnnnnnnnnnnnnnnnnnnnnnnnnnnnnnnnnnnnnnnnnnnnnnnnnnnnnnnnnnnnnnnnnnnnnnnnnnnnnnnnnnnnnnnnnnnnnnnnnnnnnnnnnnnnnnnnnnnnnnnnnnnnnnnnnnnnnnnnnnnnnnnnnnnnnnnnnnnnnnnnnnnnnnnnnnnnnnnnnnnnnnnnnnnnnnnnnnnnnnnnnnnnnnnnnnnnnnnnnnnnnnnnnnnnnnnnnnnnnnnnnnnnnnnnnnnnnnnnnnnnnnnnnnnnnnnnnnnnnnnnnnnnnnnnnnnnnnnnnnnnnnnnnnnnnnnnnnnnnnnnnnnnnnnnnnnnnnnnnnnnnnnnnnnnnnnnnnnnnnnnnnnnnnnnnnnnnnnnnnnnnnnnnnnnnnnnnnnnnnnnnnnnnnnnnnnnnnnnnnnnnnnnnnnnnnnnnnnnnnnnnnnnnnnnnnnnnnnnnnnnnnnnnnnnnnnnnnnnnnnnnnnnnnnnnnnnnnnnnnnnnnnnnnnnnnnnnnnnnnnnnnnnnnnnnnnnnnnnnnnnnnnnnnnnnnnnnnnnnnnnnnnnnnnnnnnnnnnnnnnnnnnnnnnnnnnnnnnnnnnnnnnnnnnnnnnnnnnnnnnnnnnnnnnnnnnnnnnnnnnnnnnnnnnnnnnnnnnnnnnnnnnnnnnnnnnnnnnnnnnnnnnnnnnnnnnnnnnnnnnnnnnnnnnnnnnnnnnnnnnnnnnnnnnnnnnnnnnnnnnnnnnnnnnnnnnnnnnnnnnnnnnnnnnnnnnnnnnnnnnnnnnnnnnnnnnnnnnnnnnnnnnnnnnnnnnnnnnnnnnnnnnnnnnnnnnnnnnnnnnnnnnnnnnnnnnnnnnnnnnnnnnnnnnnnnnnnnnnnnnnnnnnnnnnnnnnnnnnnnnnnnnnnnnnnnnnnnnnnnnnnnnnnnnnnnnnnnnnnnnnnnnnnnnnnnnnnnnnnnnnnnnnnnnnnnnnnnnnnnnnnnnnnnnnnnnnnnnnnnnnnnnnnnnnnnnnnnnnnnnnnnnnnnnnnnnnnnnnnnnnnnnnnnnnnnnnnnnnnnnnnnnnnnnnnnnnnnnnnnnnnnnnnnnnnnnnnnnnnnnnnnnnnnnnnnnnnnnnnnnnnnnnnnnnnnnnnnnnnnnnnnnnnnnnnnnnnnnnnnnnnnnnnnnnnnnnnnnnnnnnnnnnnnnnnnnnnnnnnnnnnnnnnnnnnnnnnnnnnnnnnnnnnnnnnnnnnnnnnnnnnnnnnnnnnnnnnnnnnnnnnnnnnnnnnnnnnnnnnnnnnnnnnnnnnnnnnnnnnnnnnnnnnnnnnnnnnnnnnnnnnnnnnnnnnnnnnnnnnnnnnnnnnnnnnnnnnnnnnnnnnnnnnnnnnnnnnnnnnnnnnnnnnnnnnnnnnnnnnnnnnnnnnnnnnnnnnnnnnnnnnnnnnnnnnnnnnnnnnnnnnnnnnnnnnnnnnnnnnnnnnnnnnnnnnnnnnnnnnnnnnnnnnnnnnnnnnnnnnnnnnnnnnnnnnnnnnnnnnnnnnnnnnnnnnnnnnnnaaccgcaattatttttgcaccaaccttaaatccatgtagtagaatattttcactgtcaggaaaatgaatcctttaaccttgtctttgaatatctgatacattgatggcatttctcccactcttatgtagcattagagaaaaacatacagaaactatgattttgcatgctgcattggtaaatgctatttactctaagatctatgtaaggcgtttacattttactttcagtactgcaactacttcctccctccacctcactattttctctgattactccagaaaaaacagtgtttattcaaattccatcattacagatccatcttaacacctagagcaaacatcattttatctactaaatagctctggagagatgtaaagatatgcaaaatgtacttatggcaggcagtgtggtacagcagacagagcacagatagaccttatgagatttgacttcaattctagtcaagttcataatttcttatttgtgtgggaaagaagagttatttgcagtcatttaacccatctaatctatttccaatacctagagcaactgtttcaatcatttatcactgttttcaaattcaacattcttcctcaaccctttgactctcgacatacgacaatgtccttacttaacttacaaaaatagaagcactaggaatgacctcaaaccctttttatccaacctccaagtgggtctataactttcctccatgcattccataatagagtatacatgtacatggaggtaagtggcagtgttgggttcacagcatcttggaatattcatttttactcaaatatttagagaagataagacttaaattggtgaccttttaagagtcacaaacctatgcaagtaatatcagcaaagtgaggcttttccatggcagccaaccttatatttctttctggaagcctggagcatacaaagttttattaatagtatttaactgagtaatctgatttaaaatacataataaattttgttattatagtagatatcaatttctcagaattcaaagccatgttagtaaaaaatctaactttatttttccataataaatatctgctgcaataaacatataatcacatcacatccacagtcataattgggtttctaatatgagtacacatggtaggaactctgggatggccaagtccagatggtggcaaaagtacaatatatatcattttcatgaagggataaattcaaaataataaatgatcagtaaggcacaggcaccagcaaatgaaaatggataatggccactacaaattaccaatgtctactggcagaatatcatccatggttttcatatcaaatggaggagtcagcatagacacctaaattgagtcatctgtaacacagtcatggcatctgagccagttctctatacttaggggccttggatgaaaacaaaatcacacatcttgatgacaaatcgactgtaattctacacacatgttctctggtctttcttctcaacctttcccccaaaggagcactaggtagtttacattgtgaaaaataagaaaaataattaccaaaacgttttaggttgtatttgacactgagccctagctaaccttaattccagcaacccataaaatgactatgatctgacagtcagtgtgaggcttatgggatcatgtgggaaaatagagaacttgcccaaggccaatgggacaacaaacccatccaattgttattttcacagcttattggtatattcttggatggatatctttggccactggtagaatctttccactggctcactgatccatgatgtcaaagccaccatagtagaaagggccacgtgcaagacattagtgttcctcaatccaaggcctaatatcaactgcacaatacacacatcccaaggtctcaggcatttaacccaatagaagtgaatttttatgtatggagtccaataggagtgtttctgcataatggcattcatccacaccattggttagagatacaggatctttccctcttgaatctctgccattccttagggcattagaattctctacattcacatggtggtatgtggggaaaagagactccaaaagaagcagaaatgcttctgaaatgtcctggccttaaaatggcaaccatcatttttatttccattccatttgccagaacatagtcatatgatcacatctaactacaaaagaagctgatagtatggcctagagataatttcagaaagaacaaaagaataatgattttggctaatagctgacagcctgacacatgggagaacttgagagatttatgttatgttgaacactttaaaaatgcacttctttttaatcccatattaatagataattgaggatgaaaaactggttgggttttcggatggtttttcagatagtatacactgctattgaattacagtcctactcagttatggccctggaagatagtagaaaaagataatacttccaatgggcagatatttgagttacctgctatcttattaaagcaaaataacctgagaagagtttctaaactgatgcttatgcactagctaatggtttgttcaaatgggactctcagaatagataaaggctagtaatatttatgttccatgtgaatgtttaccagaagactagcactgcttaagaggtgtttagaaaaacaatgacatgaacaacatcatatataaagagttgtgaagggaaggcataaatagctggtaaggttttatgaccagctgcagaaacaaggaaaatatatcatctagagattccagacttgaaactgaatgcattaaattagcatcaagttaatctactttatggtgctgagatcatttttctgtttgtgatagatgtgttatgacaactgagggtagttttaaagttttatatatggaggaaaatgaaaaatgcatgtgcgggtgtgtgcgcatgtgtttgtcctggtaagccattgatagaatctggtgggcatgtgttgtttttcctatatggaacatcttccttatttttacagttaataaaaatcctacttttcctttgaaaactgtctcccattcaaagtcatcactgaagtataggaagaatccagtatatgcctatgtgatatttcttcttggaatttgaatctgatgcagggggagaaaagagtgaggcaaacaagaatgtcagtacagataacaagatggtcttgggtctctggctgctgagattcccagtggccctcattcttatccttgcagactgattgcttggcacttcctttgataaaatacccaatactgtattttcttccactaaaatataggattttgcttaatcagtcagaactgaattattttcttggactcagagaacaataagcataatgatgtcaatctatagaacagacagcaattttttttattagtggtgctcttacaaatgaggttttatatgggatccaaatgcatctattccttctgtaatgaccttaacttatccctgaaaacaatgtcactaagtgaaaagttattaaataaaacatatagaatgtgttgttataaaataaaaaatatggaatgtgtcatgctaatctaagatatgcaacagttttctatacatatatcaactgaataacaaaaaccttcttataaaaattaatcaatgtacagatttgtacatataaagcaatgtaatgaaattttattatatttccaaagaaagaggagaaagcttgataacagacagtggctggaggaggagggttgtgagatcattctttggaaggtggtggaaagtcaggtgttttaatattggacaggtatttagtatcagaatcatatgagctttacaattctctttcccttgagactttagctctaaaacaactacctgatatggaaggctttgacataaagataaaagattagtagattctttgggtagaaaaatatgtgcttcaaaacatgaagaaatagtacacatgtacaagaatgaaaaataaaagaggatatttctttatctctcttggttggcattcataggcaaagcaaaacattcgcgtccatacaaatacagcatgcactttaaatttgttccacataataatattctttgactagaaactattgcatgtaaatttgtgagtgcgccttttcttgaaacagtaatgttgaaatataactttggatagtatgcttatttagtagatgtgaagacaaaaaatgtcattctactggaaaaaataatcattgccttataagtgatgtaagtttgccaggactattgtggtaaaaagtcattaagagaaaaagtgatatgtaaggtgagactacacacaaaaccaataaaaaccactggggaggtggtagtgagctatgcctcctttgtgttccctccacccagtcgccacttcaaagttttggccaactcatcttctgagctttacatcctctttcttccttctaatttctgttatccactgtaccacatctaaactgtcctacttgctaattcttgaatatgctgtgaactttcaggctttcaggcaattatttatgtttctccctttcaccaaatatgttcacattctcctccaagtttaagaaaattgtactcatttttcaattcctagcatatatgtcaccattcctaagctccacctaaaataaaaataaataagttgtcatgtatattcttgtagcatatgattatacttctatgtcagtacttatcacatttcattccagttagctgtttatgtggccaatttcnnnnnnnnnnnnnnnnnnnnatgagaaagacatgttgaattctgggtaaacagaacaagagaaaagagttttaagaaatatttggtggtcaatagtggaaagatgaataaaattgaaggtataggtggtgttaaaattcatgttttgagaatgttctctactcaaatatgtaatgtttaagattataaaagaaaaaaatttaaaaaatagtcatgttcaaaaaagataatagagcaaaaataaagcaaaacctgatgtggtaagtagactgaaggcacaggactcctgggcttcaggctattggcaaacatagataaccagtttatatcatgcatgatattagtgatcataagcagcaagaaaatcttgcacgtatgcacagagattttcctaaggcaattaatttcatgtactctagatcaagacttctaggctcaagttttggctctgctacttttagttatatgaatttagacaattgcttaacctgtccatgcctctgtttccttatgtcaaaaatggaaataacaatatccacctcttaggagttgttatgaggataaaatgtgttgagcacttgtataattcagactaacggctggcaaataattaggactcaaatttgagccataataattattgcagtagcaatggttctaataaggaaaagagtccagccaatgaaacattccaccaccaagagaattggtaaagaatcatataatggaattcaccaccaattaaagtgtacttgctacatttgcttgtatccatatggacaagtcttagaaaaataatgtttaaaaataaagcaaatacttgaataatatttacagcatattatttatgtgaagttcaaaaacaaaatagttgtatcatacatatgcattcatatatgcatatgtggtaaaagtttaaaaatcaaatggaaagaccacagactaacttataataaaaaagttacctatgaaggaacaagcaagataataagattatgatgtaggacaaaggagtttcagtgtttcagtatttttttatgttttttagaatatttggctgggtgcagtggcttacacctgtaatcccagcactttgggaggccaaaggggggcagatcacctgaggtcaggagttcgagaccagcctggccaacatggcgaaacccatctctacaaaaatacaaaaattagccaggcatggtggctcacatctgtaatcccagctactcgggaggctgaggcaggaaatcgcctgaacccgggaggcagaggttgcagtgagctgagactgtgctactgcactccagcctaggcaacagagagagactctgtctcaaaaaaaaaaagaagactattcaaaaaaataaaaacacaaagaaaggaaggaattacatatagggacaatcattatttcattctgcttcccttgtatctgtagaaagtgtatcttcatatagtgacattctctaagaatatggcttctattatttatattctaataaacaaaacattttaactgaagttacatattaacttctaacaatttctaaattttaaatttacttttaataacttagaagtgtaatattccttcaaaaggcaaaaataacaaaagtgaagaaaattaaaaatggcctaaaatgatgtaacactagaatttattgacatggatatttcaaaggtgaactacattgatgaagagcctccaaagcctatattgcaatgggagaaagaaaacttcccaaaaagattatcaggctgttgctgtgactagaacttgcagtgattactgaagtattctgatttctcaagaaaagccagctttgcagatttctatgtaaaatatcctagtttttaaatattggtgtatcagaggtcagaagaccatcctcaaactcgatgattcttagataggatcacaggactgaaaaaaaaagctgttatattcatggctataatttgttacagcgaaatgatcagactaaaatcagtgaagggaaaaggcacacagggcagagtccaggagaaaccaaggggaaaaaaacttccagttttcttctttctgtagaatcacatggagatgacataattctcccagcaataatgtgtggcaacacatgcaaagtgctgtcaaccagagagtcactcttgaaccctagtgtcagggttttaatttaaggatccatcatgcaagcatacaacatttgcatgactgacttttgctactcagtctccagccctccaaaggccaaatttatacaacttggtcccaaacctcaagtacacacaaaaaagcacttaccataaatcacattgcatccttttttccttcttgtattaataggatcctcttttgccctttggaaaatttcccttgtctgtctcagtctagtggttcaagtggacctatctagaggtgggacacatcatctgtgcttggttaagggaacactggatcaaattcagcaactggcatatagatgaacaagtgatccaaactgaacaaataaaagctcttcttgggaactattaggaaagaagtgccctttcattacagcttgacagtctagatacggtgtcaactttggcctggcttgaccattttagccattacatggtgataccctgcctgggaattaaaccaggacagaagataacagagatgagagatagagtctaataatttctgataataatggtgaaaattcctaggttcaggcaaggctgaagccaccagccttcaaaatcccagaaaagttagctagttttgccatagctagattaagtgcatttctgtaacttgcaaccaagggagtcctcacaaatgcaaggctctagccagctggaagatgtaataaggagggagggaatgttgtgacctaaaagcattatcaatgagcactgaaacttacacttaagcttaacatgtgcttaatatacattagtcgatttttgatgatattgtgaaatgtttgtttatgacagataaaaatgcagaattcgaagctacattgtatacaatggggattctgtatactcattttcttaatagactttattttaaagaaaattttcagctgggctcagtggctcacgcctgtaatcccaacactttgggcagctgaggtgggcggatcatgaggtcaagagatcgacaccatcctggccaacatgatgaaaccccatctctactaaaaatacaaaacttagctgggtgtggtggcatgtgcctgtagtcccagctactcaggaggctgaggcaggagaattgcttgaacccaggagacagaggtttcagtgacccaagatcgtgccactgcactccagcctggctacagagtgagactccatctcaaaaacaaaacaaaataaaacaaaaaaacaaaagaaaattttcagatttaagaaaaatcaaccagatagtaaagagagttttcatatgtcccccaaccctcacccagttcctccaattgttaacatcttacattagtttgggactattgttccaacagattaatcaatattgatgcattattttaactaaattccacagtttattaagattgttcttaatttttacttaatgtcttctttcggttccaagatcccatccagcgtaccaaattacatctagttgtcattgtctccttaggcacctcctggctgtgacaatttctctgactttcctcatttttgatgatcttgacagttttgaggaacattggtcaggcatgttgtaggaatcccctctactggatttgatgtttttctcattaagctggggttggttatgggtttggggaagcaggaaggcaaacgtaaagtaatttttttgtcacgtcatatcaagattgcatagtagcaacatgatttatgatttatgaatactgactttgatcatatggctgaaatagtgtctttcaggtttctccactgtaaagttatgatttttctcccactttttgttctgcaatctttggagtgaagttactatgtgtagcctacacttaaagagtaggaagttattctcttccgtctttaggttggagtaactacataatttttggaatttttctgcatgaaataattgtgtcttctccccaatatattaacttagtcaatgtattaatccattctcactccgtgataaagaactgcctgaggatgggtaatttataaaggaaagagatttaattgactcacagttcttcagggctgaggaggcctcaggaaacttacaatcatggtggaaagggaagcaaacatgtccttcttcacatggtggcaggagagagaaatgagtgcctagtgaatggggaagccccttataaagccatcagatctcgtgacaactaactcactatcacaagaactggatggggaaaactgtccccaagattcagttatctccacctggtccttcccattgacatgtggggattaagggaactgcaattcaagatgagatttgggtggggacacagccaaaccgtatcagtcaataatttatttatattagtatgaattctatggatggttgctttatattttgggttacaattcaacaccatttatttattttgttactcaaattttcctgcttcgaccattggaagctctttcagttggtacctatgcttttcattatattccacaatgtgtgtgtgtgtgtgtgtgtgtgtgtgtgtgtgtgtgtgtctaggttaaaaaaaaagcttgttaatttgtttatcttgagcactttattactttttggcattacaagatgtttcagtctcatcttgtatatttcctgccccagtactagaaacagccacttctctaaagagtactggttcctttttaatggataaagacactagaaaacaagatctgggcactaggaactaggtgtgattgttgttactacggtatcgtttcttttaggaccttccaggtaacagagcagagaaatatatgtatgtatctaattcatgtatatatacacatcaatcaatgtttctgtatataaccatctttatcattttaaacatgaattattactgatgtctccatcgctgaatttttaccatgggaagtgttctggcttcctccccttgcttatctaaattcccactccaacagtgagaaaactagctgccaccatctgccatccatctattattctagaaaacatgaacagaagtatcataatttctaacttatatctctgataaagttctatctctgtattttatcaactagagtacagtccttttgagtagttctctctgtctttagtctaacagactctatttatgtccataggtacttaggtcagcaacttttaccttaccaacttcaatgagattgttttagatatttgttatacagtgtaattatcttatcattatctgtattcattcctgggatccctgaattcctaaactattttaaaaattcacacatattaaggttcactctgggttgtaaatttctaagggatttggcaaatgattaatgtcatatatccaccattgcagtattatacagaatagcttcaacatcctaagaatcccgtgtgctacatctattcatctccactcatcacagtcttaccctgaattctggccatcactgatatttctactgcctttacagttttgcctttttcaaactgttacaaaattggaattatacagtatgcagccttttcaaactgctttttttttcaatatgcatttaagttccttccatactttttgtggcctaaaagcccttttttaaaaaaatccctgagtaatattcctttgcatggatataccaccatttgtttattcttttaactactgaaaaacatcttggtggcttcagttttgcgtgattattagcaaagtttccaaaaatattcatgcgcaggttttttgcatagatataagtcttcaaccaattgggtaagtaggtaggagcatgattgctgaaccttatggtaagattgtgtttagctttgtaagaaacagccaaactgtctttaaaaatgctgtaccatgcattcccaccaacaattaatgagaatttctgctgcttaacatcttcaccaacatttggtattgtcagtatttttttttaattgcaggcatctaagaggtgtgcagttgtattttgttgttttaacttgtgattctttaatgacaaatcatgctgaacatttttatatccttatttgccaactttatatcttctttggtggggtatctatttagatcttttcccttttttcattgaattgttttattattgagtttaagaattctttgtatattttggatacaagttgttcatcaaatatgtcttttgcatatatgttttcccaggctgtagtttttcttttcattctgttaatggtgattcttttagtctttcccaaagtacatttttttccttttaattaagttcaatatatccatttttccttccctggattgtgtttttcgtgatgtttctaaaaactagttaccaaacacaaggtcacctagattttctcccatgttatcttccagttttgcagtttacatttaaatatatgatccactctgagtttgtgtttgtgacatgtgtaaagtatgattacttctttgcatatagatgtccaagtattccagcaccacttgttaaaagaccatctttctccattgaatcatctttgctctgatcatctttgctttgatccattgaatatgtttgcatgggtctatctctgggctctctatcctattccattgatatatgtatcaattgtttttccaataatacactcccttgattactgtggttttatagcaagttttaaagttggattttgtgtgccctccaactgtatagactatagattatcagtgttcctatcagtttatggctccagcagcttttactccagataagctgatcttgactgcaattttctgtattcacttgtctctctagatttcacagcgacaatttgccctgtgaccccaattctctgatgagtctaaggaaaatcattggttttcaggttgttcagcactattcttctgcggatgggagtgacagcttccaagctttttatatgtcccagctgcaatgccaatgctgtgactcggtgtgctttttaaagtcaagtcaactacttaaaggctaactcacttgtgattccatcagatcaggaggattattttactttttctggggatacagtgacggtatacaaatgttggaggaaacttgaggctctgaatccctcagtcagggggcactggtggagttgttgctttttaggctgtgtggctaggaaaaatttgtaaagatgaaaatacaggttaatgttttggagatgagagccccattggtagatctaagcatgtatgtcacagagggagacacaagtgaaatagcataataaagttgaaaagtatttacacacataaaattttgacttatcagttgctctaacattaataatccttttaaaagatctctgaaactaagttacaacactgcacatgaaagaccacagcatgattctagagataagctcattgaacaccaacagttaataaggcagtaactataaagaatgagtaggctcacaaaaaatgcaattactagcatcatctagtaagtcaataccaggaacaatgtcctctgaacatacttgaaaaattagtcattaggcagagatatatgaaatttttatggttcgtggaaaaatgagtaaagatgtttgcagattattacataatctatttcccggggttgatttattgcttaataaagtatttgacgtgaaaactaaaagagaatagattcataattgtttagaacagttgttaacacaccatcaaataaattggcaaaaatatagagacatctgtatcgatgatgagaaagcaatggcggaagaaatacaggaatagtggaaaagctgttgccaaagtacattgaaagactcactgtgtttcacagaccagcactggcagttaagaaaacgtaacattagacatagttctaaacaaggaaaactgtcactttattcagatacagcctttatgctgcagaattatcagagtgaagtataatgacataggcaagaaaatcggaccccacaacgaagtcttcatgaagcctcgtcctttgccatccactcctgtgtacaaggaaaggcctctctcttgtaaacacagacagtgagcttgcaggggtgctattcttctacaggggaatggatggtagctggtgggttatttgtgtgtctgggaaagggaagccaggtagctttcctcgtagagagaaatgtttcctcagacttctacaggtctgcaagtctggaagggggaaactctcctgtctgcttctggctggagtcaaaatggctaggctctattggccaccatgcttgttcaactcccctatctccaggaggtggaacaggaaacacaaggaggggaaacaaaagaaagaaggcattctgcccctgaagaggggcatgttactcccctgccttatcttgtcagaagcaagcaccagcttggatcaagaacatttcaatccatttattcattcacacatttgtttatttcagcccaacaaaatgagtacctattctgtgaaatgcaccatcttaggtgcagggcccaactgtgaaagtactccagtcatgaatccaagaatacctgcagcccataagccacagagtaatgctttgtcttaattttaccaatgacaggaagagagttataggatttttaattaatatgagtttctttaagaataagtcaaaagtaactcaatagtgatagccatggtgtgtgcacctatcatcccagctactcaggaggctgagacaggaggatcacttgatgccaggagtttgaggttgcagtgtgccatgattacacctgtgaatggcctatgaactccagcctgggtaacatagaaagaccttgtgtatgaaagaataataataatcttattttattttattttgtttttttttgaaacagagtcttgctctgttgtccaggctggagtgcagtggcaccatcttggctcactccaacctccgcctcccaggttgaagcaattctcatgcctcagccttctgagtagctgagattataggtgtgtgccaccacactgcctaatttttgtagttttgtagagatgggtttttgccatgttggccaagctggtcttgaactcctggcctcaactgatctgcccacctcagcctctcgaggtgctgggattacaggcattggccactgcacccagtcaacaatctgatattttaaatgggcaaaagatctaaacaaatatttcttaaaagaagacatacatatggccaacaggtatgtgaaaaaatgttcaacatcactaacctttggagaaatgcaaatcaaaactacaattatttatcacctcaacccagtgaaaatggcttttatcaaaaaggcaataatagatgatggcaaagatgtggagaaagggaaacgcttctacactgttggtgggaatgtaatttagtacagccactatggagaacagtatggagtttcctcaaaaaactaaaattagaactaacatataattcagcaatcccactactgggtatatatcaaaaaaaaaaaaggaaattagtatattgaggaggtatctacactcccatgtttatagtagcactattcatgacagccaaaatataaagtcaacctaagtgtccatcaatagatgaatgaataaagaaaatgtgatccatatacacaatggaatattatacacccattaaaaagaatgaaatcctgtcatttgcaacaacatgaatggaactaaaggacatgatgttaaatggaattaggcaggcatagaaagacaaatatcgcatgttcacactcatatgtggaagctaaaaaaattgaacccatggagatacagagtagaatgatggttaccaaaggcaaggatgtgtatgggggaggtggggtaagaggaaatggttaatgggcacaaatatacagttacatagaaggaataagatttagtgtttcgtagcacaataaggtgactatagttaacaataatttattcacatttcaaaaaacctaaaatagtaaaattggaatattcctaacacaaagaaatgataaatgcttgagttgatagatatcccattaccctgacttgatcattacatattgtatacttgtatcaaaatatcacacgtggcttggcatggtggctcatgcctataatcccagcactttgggaggctgaggcgggaggatcacctgaagtcaggagttcgagaccagcctggccaacatgacgaaaccccatctctactaaaactacaaaaattagcctggcgtggtggcaggtgcctgtaatcccaggtactcaggaggctgaggcaggagaatcacttgaacccaggaggcagaggttgtagtgagccaagattgtgtcatttcactccagcctgggtgacagagagtctgtctcaaaaaaacaaacaaacaaaaaaaacacatgtaccccataaatatatacaactattatgtaatccaaaaaaactaaaaattaaaaaagagtaagttaaaagggaaaataattccctcttatttcttaaaaaggaacactattaactaaatatctctcaaatataggtaacccaattcaaccgagatttgttggctaaacctcacgtggaacctgccttaaagttaacctcataaagcccttcatcaagcatccatacatacactcacacacatttacttccaagaggcacttgatgaataaggctgatttttactgacattttcatggagtgatggaataatactggtttacatcccacgtgatatagcaaaatcttctaaacatcctcttcaaaaattggtgctgaatatcttccatttccccttcagatcctatctctctctacccttctccaccctgtctgtgccttaggaggttgacctgcattgaccacatcattgggcttcctgtctgtggtcaatggcaaattgtagcaggagcaagagcagggttgagatcccctggtctatatcctgcagggttgtcctaggtcgtcttcattccaccacagaggtttcatcccttgtaggcagccttctcatcacaggccctgctgactctagcttttgaacaagtcctgctcttcagatctaggaatgacaatgatgtctttttcttattagtgcagggattctacagtatctcttatagttttcctacatgctaccttcacagtccttttattatattctcttcaaattaccctaatttggatatgccatctgttctttgccagaaagtattgactgatacaatatcactatttcccctaaagcttgactgtctaaaggatttgtcacatttctatgtatctctcagcccctctcaatccatccccatagagcttttctcagagcgtgctccatacactgaccttaatctgcaaaaccaaaagtccatccagaaggttcaacaaaataaaatctgattattagcttaaggtacaaccatagcctcttcctccaatcttgttctgggaagacttaatgtatttgactgtagtttcttctggttaaggagactgtaatattttcttgtggcacctagggtctcccctactcatagtctgctcaccctccaaatctcccactctcttacagggtggagtgtgtgactatttctgaatgtctgtttattctactgtctagccttgcctgattaggttcagcaaaaccttcagaagtgtaaactggggaaggtatacctgccatgcaggtagggtgggcagcacctggattcaagagggaggaggggatcaggatttggagccaggctccttgtcatgctttttttcatctgacactttagtgcctccccagtgttcccagctaacacctgtgtgcagcattgaagggaatacctttcctccagatttctaactcctgtaaatgtagaaagatggtaatgtaaagagaccagtgcacattgtcataaaatgcattgcatcctcaccctaacttcttgtgataaccaagaaaaatgataggatatttcaaactcccgaagtccaaagcaggcttaatatgattgtgaagttgttctatctatactggctcttctagatgtatgtttttgatgatcgccaagggctcaataacttcaggtcagggatatgatctctggcaaaggccttggactggcggtgaagagcaagccaattccaagtctcctccagcatcctactccacaagaggttcagatgcaagacacgctgagccatatatccagggcctttcctgagtcagccaggtggctactgataactgagaattctgttggccggtgacatctgctaaggtttggaaggattgtttagccacacatcacccctatactaacctgctttagcttatttcaatttttgaaactgtgctgcccagcaccttcttgcaagtcttactgctaatgtttctccaatctaaacatatgtgcagagcaaatcactgtttcctgttgacaagcttctcaaacaaactggataactggaacaagcatctctttcagctcctgctgcattatctctaaacattgtgctataaacacagtcccttttgcaagtccttaaaacagaacctgtaaactccccttcatttctctgcttccaagacttaccatctacatgtctctgaatgttttaaccatgactcagagccatctgccctgcctaccactacacctcttgaaaaccataggagtttagtttctgataccaggttccagattcatggttctattcatgggtccaaagctaccttgatggtttacccaaagctgagcattttagcagaggattccgggtctcagttgcctttgaatattagttgactcattaatgattattagggaaatcccatgtcttacccacaggagcactgttaatgtgtaagtcttcaggactaaattcagagactcagattccattcatgccacttaatagccaagtggtcggtctctttccgaccaatctcttagcttatctgagcctcagtttactcatccaaaaatgaaagagcagccaggcgcagtgatggctcaggactgtaatcccagcactttggaaggccgaggcaggcagatagcttgagctcagtaatttgaggcagcctgggccatggcgaaaccttgtctctaccaaaaatacaatacaaagtaatcaggcatggtggcctgcctgtaatcgcagctactcaggaggctgaggtgagaggaacgcttgagcccgggaagcggaggttgcagtgagctgtgatctcaccactgcactgcactccagcctggttgacagagtgagaccctgtctcaaaaaaaaaaaaaaaaaattagagagctgaactaaatcagggaagataaacaatcttcatgacatgtggcatttctatttgagtagtaatggttagccataataatatattgagaaagatttgagagtcaagttcaggcttggtggagaagactattggaggggaagggtcaacagccatactatgtatttgcctcccctggactagatgatttctaaatcccccatcaaagcaaaaatatgagggtaccaaatatttcttcaacacctgacccagagccacgagcccactggtccatctgcagatgggcctattagctaataagccattttgcatttattggtctggagaatacagaaataccagccaagagatcaggcagcactatcctagtcactgcgtaattccttccacagatgtttttacccttgtcagtatctatgaagagcaatcatatctatcttcttgtggttacagtaaacataaccacacgacaactatattatttggcatgttagaaatggatacaaactatacttttatacttgaaatatagggattgatgtctgcaaagagattgtgtgctttcatttaaaatcatgattttaaatacacttgttttttaatattaatggtaaaatactaagcccaaaataactacttcttaatttttgtaattttttttctgctagcaaaacatatgtacaatatgtgaaatattttaccctgggctgtaaaagggaagggtgtaactaacatttccttttcagtctgaaaatttacaggaatgcactaggacatctgtatggaattagcagagctgattctatagattcatgtgactcaccagttctagtttctgtgcttctgagaccagctttttttcttctttctttaataaaaataagacttgtctacattatgggtaacataattaaaccaggataacacaaatttgtttaaatataaactccaaaccatcaagttgcttcatatgtttgcattcacttataaaatacgatctcctgagatatctttcattgggctaaacaccaaaacaagcaaacagattctgaaaaataaaaagacagcattctgggatttcaaagttgacaaattaagcgttcctatgtaataaaatgatttcatcttggaattatcttttgctatttagtttatgaactctacgttatccaagcttacatttcataaaagtgtaaatatgtttaacatagatcacttttgcttcattactcatgctattagattttaaaccttgaaccataagtccttgtgtgactccactgggaaatccctcatggtgttaacatttttttacactcaagcgcttgtttactccattttctcactttttaacaaattaaagttccaatgtattacagcagttttacatttgtctagataagccacagaaaagactaacataatttaggaaagaggcacagaagatagtgcatggtatcagaattcatgagaaagggagtactggattgttttttaattttcatccaaagtaacagatgatctcgcttccatcattaaaaaacacgattatataaatacacatataagaagtaatctataagcaagtgcaaactaattacggtcttaggaaagggatttttgtttttttacccttcctccaagtcttttatttattttttgagcttttaaaaaaaaaaacaacaaaaaacacaaccaaaagaactgacgagaggaagacaaagccccaggatcagccagagaccaagcagcatgggatgaggcccaggttgggcctagcaggatctgtggagcaaggtggtggaaagtcctgaggcttatggtcatgtggggtctgcagaaggagaggaggtcacttaaaaagaaatacatatacattacacatctatacaaagtgtcccatgttgagggagtgaggcgaggtcatgggagctggcccactttctcctcggaccagcctcccaacaggctcactagcttggccagcacagggacccctgtagctagcggtcttcttctgtggagtgaggggaacataacaatttagttccagttccaacccatggtgggcagaggttggtggaaagggttttgtttttgtttttggttttggttttttgtctaagtgtttatgctagtgagaaaatagtaaagaaattagccgacatagataatatagagtatatatatttttagatgcatttttctagagaaagaagaaaagttatactctaggtaatgcaacacatacagaagtttggagatgggacagtaatagcgtgactgcagagattcacgttagtgattaatgatgatgataatggctataattgaacagtaatattcaggactacagaaaaatctgattcgtttgacagagcagaatatctaagacaaaggaattcccaaatatgacgtatggtagtcttttaatgcaatccaaaaaagttagggttttattttagaagctataaagctcatctctgagctgagagtgaggaatataacttctttaatctggttctctataaaaatgtatctatataaacatgggacttactatgaaatgagggttgctgaggaggctaggtagagtatccagtttggagaaaagtgaatttgaaataaggctaaaaagatggagagttaagatactgaaaattctgcaaagcaatgtttaggcaagagagagaaaaagtagagaagcactatggttatcactctagggaaatcaatggtgatctgtttttgtatcagttctaatgtcatcataaaaaatcattgcatgaaagaaggtcgcaatgtttcaagatcattttttcagtgaaaaaataaacaaatctggcgaacactaaaggttgcagccacctctatgttgttcttttgaaacactaaaagaattaaatttttaaaattattcaataaaacttaaaagatatcaacttaaccataaaaaaatcactaaaaaggtataggcgcaagtataacaaaaatttacagaaaagaattttacctgctttatatattcgggaaggacagacattcaagaaacaagttcctttataatgaacgtcctttaaaagaattgcttacatttctcttcatagtgaaaaaggagccattctacatttgaaagggaaaatcttcttatttataaaaggcgtcttcatccaagaatcttaaatgtactatggcaattggcttcaaaatatctaccccataaattgcttaatatagtttaaagatgggaaatttgaaaccatatgactttactttcctgagattttcactatttcagagggatgaaggaaagggagacagaaataaaaagaaaaggagagctgtgaaaaagaaattcaaacaaatccataataaaaaaatttgaggaaaaattaaagatataagtctctttaccactcacatgtattttagtttttcctaaggaaatacaatttattgaatcaactgagaaattcctttggtagatggggaaaaaaagcaaaagttgcttattatttatttgtttttttcaatatataatgagggttttattatatttacatggttcagaaaaaattaaattgatttcctgcatattgtgctagtttaataaccaaaaactggtttggaaaaggcatgcaaagataaaagaatatagaagtgtagtattttaaagttttttcatatgacaaaaggtttggcttctttaagtaaattagatgacttagaaagtggaaaatatgcattttcttgatgaatgttttagtaataccacagttaaagttatagtacatgccaatgttgaagaagactaatatatccttaaaaatcttacccttgcttctaacagttatagaaagaggctaaaatagaaatttcatgcgtttcctttaaaagtaaaattcagcagttcaatatttagagagtgataacaatgactatattcatatttaatgtaattatttaaattctggatggaaggatttttccacattaggaagtcttttcagacagtacttatcaaatatacaaaatttaaaatattatgttttttcattcaatgatcactgtttatttttaaagtactcattttaaaaagtggaaatgcatccttaactatagttacaaaatcagtcaatttacattttttatttggtactgaaataacataagtaaacttattaaatttttaattttccattggcataataaaataaatagcaaaactatcatacctgctatatattgctctagtatttagtggcattttaataacatatgaatgaaaacttaaaaattatcttttagaaataaaacacaaggacgggcacagtggctcatgtctgtaatcccagcactttgggaggccaaggtgggcggatcacctgaggtcaagagttcaagaccagcctggccaacatgatgaaatcctgtctctactaaaaatacaaaaaattagccgggcatgatggcaggcacctgtaatctcagctacttgggaggctgagatagaagaatcgtttgaacctgggaggcagaggttgcagtgagaccacgagctgagaccatgccattgcactccagcctgggcaacaagagagaaaatttgtctcaaaaaaaaaaaaaaaaaaaaagaaccgaaaaacaatgaattattggcaatatctaaaaattaaatgtaaaatgtatttttcaatggcaagttctttgataaataaacaagatttatgaaattatttataattaaataagaatttttttatttaaaaaacgtagattgaaaatattcagacatatcacaaaggaaatattcttagaaaattgttttcaccataacaatactaaaactatttgatgaaaactcttgctcaaaaacatatttgaaagataccataaaactttcatgaacaataacataataacttcagtgaagacatacttgtcattctggaatgagaagaataaattttataaagacgagaattcatccaagattatttgctggaaaaatgcaatttctatagaagtcaatgcaattctcaagttcatccagaatgataaaaagaattagtgcagtggacatttactctttgggttcacccagcattcacttcttccctgttgttttactgttttgctccttccacaaataacttatgtactccaagggaagctcacttcacccaggccagcagtagtccacaactggcttaaaccaatcagctacctccacttgctttccagagtgactgtttcaggaaaagttctgtgatttagttcagaagaatgcacattttgctaggtgcttcagaggaaagaaaaaaaagaaaaagcccttactcttctttagatgttagctgggacattctctcttgactctctgttcagcagagctcatctgctagaacagtgcctgacaccaagtagactttcacaaaggtgttgtctcaactgattagaacactgttgctcttccagtgaagccatccaaaaggaaatatggcacacatcaagagaaatcatagagaaatgaaaagcctgtgcaaacaatgccttccaacccctctatagtggacgtttgtcgtttctgcctgcccagcatattttgaactccttctttagattttaatagtcccctatgttacgaatcttgccttgccaatatagaaacaaaactacctttcctacgtttctttgccccaagcataaagaaacatgacttcatttctgcaacatacacagccataagatgactgagttggaatagaactacataaggaaacaggaaagggtggggtatctcttcagagggtagcaatagagttaagtagagtagttaaacggaggtagcctgatctgaaggtggcagtggtaaagaaaatcagtagctttagagaatgactccaggagatttttcctgagcctcagcctttgttcccccagtccttccagtgattttgtatgctttctcctatccttccataaacatcttattgaggaaacaagcacagtgaattctgttgcctactgcttagaaccattaccaatacacagccctacttctgtgttctcgtattttttaacccactattggctgcaagttctattacttacagtctaattgattccaaggtagcaaagacaacttggaaaaaaaagattaagaaaaactagaactcgtgccagcaggtattaaacatattataactatctgaaatatcacctagagagggaatatcagcagaggaaatcagttgccaggtccattcaagagcaagcaagagaccgaaactggtaaacaaggaggtgggaagaaagtaagaatggagtgtaataagagcacagtcagaagcattttacaaggagggagtaattaattatttcaaaggttgggattgagttgaatgaaatgattaaatggctatgagtaaaatgaatgccaaatcacatccactggatttggcaacttagcattcattttttgacccagaaagtgagtactttttgcctactggtcaggagaaactttagttggcataggcttaagaagaaataggtggactttgacttggttgcagcttcagcagagctatggacccacaggttcctgtgggttcaccgccagtatttctccttgaggaacaagtcagtcaggaagtgacactgtagccatggcttttgaagacagaagagacacttgtggaactaagggtggcaactcaccaaactagaatcatctaaccagtggcaaggtaaaatccctggagatggtttgtgttgacttgattagaggtacataggaaaaacttaaagtgaagagacagatcaaagaatcaaagaatcactacaagaaaaatttcttacggcgaatgttctaaccattggaatggtttccagatgagaatccccaagcactcattaactttaacagttccctggaaactaagcagattacttcatcagtattgagccaggagtagaggttgaggtcgtcattgcaggtacttaagtcaactagcttaataaattggtatcagtagctaaatacataaatagaggatgagacagtaacagcagcaaaaggtcccaaagaattatcacaaaaactggaatgagacacaaaggctaaagagaattgtttatttaagataatagataacttaagaatgctggtgtactgataaagaaaagagggaagtgtttgaagagtgatttcatttgttaagctggaggtgatgtgatccaaaggataaagtggaggatttggcctctgggttgaaagtcgacatttcttcccactagcaagaggtgaagcaaagaagttcaagtggagacagattactagattgggtagtgattttgaaaatgaaggtgctcttctcttatttcttttatcatttcaatgaagtataagtgagatcatcagctgatagaggcagaaatgtgaagagaacggagaaaacattaaatatttgtgttgacagtgaacttacacagctatagaacattttcatcattgcaggaagtcctgttgggctgcactattccagagcaatgtgtggccacgaggtgagcagcttaggtaggatggatgtaattatgattggaaacaaggaaggccaggaagctggaggccagagtgtcaaatatactattaacatggatgttgttccaggagaattatggcagcagtagaactggagaggaagagattgatttaggtgttctcaagacttcaataaatgacagggagtgacgaggaattagaaaatcacactaagaaggaacattgaaagatacagtcaaatggtgtatgagcatcaaaggagccgtgggctttgaagactgtggagatgttttgatagtatcaaggaggcacaaggagggcatttacacacataatgccccgaaggttcatgaggtatggaaaaaatgaacaagcggcctctactgaagaggactgcaaaggaacttgtgtcagagaaagtccccagtgattatttaaaatctaaagaaaaaaaagcctcacagtgtataattgttataaaagtagacagagtatgccgtggtgtggtggctcatgcccgtaatcccagcactttgggagaccaaggcaggtggatcacctgaggtcaggagttcaagaccaggctggccaacatggcaaaaccctgtctctgctaaaaatacaaaaaattagctgggcacagtggcacgcgcctgtaaccccagctactcgagaggctgaggcaggagaattgcttgaacccgggaggcagaggttgtggtgagccgagatcacgccactgcactccagcctggatgacagagtgagactccatctcaaaaaaaaaaaaaaaagtagagtagtgtactccataatatataataatatatatataatatatataattctaaaacaacacaaatcattaagaaagggtagtgtatctaataattagtgctgggcactcaagttactaaatatcagaatgattattaaatacaggatgtcaaaaaatagaagaaaaatcaaataacaaatttctagttaggaaaacactttctatgttatgagaaaatctggcagaaaaattagcaaaaaattgacagatttaaaaaaattctaagtaagaaagaaaacaatttaaaaataaaagatgaatcaaacaaggaaaaatttttcaaacaacagaaaaaaacacccagaaaggaataaactcacaacagtgaaaagaacaggaagaaatggttgacccattgaagcgaagattcaacaaattcaaacagggaacctccagaaggaacaatatttgattactaggagtttcagagatgtggaaacgaaaagataaaggaaaatgtaataatcaaagagctgaagaacaccactattctcgagatggaaggagtccatgaaatgcttggtatgatgaatgaaaaaagactcttccttagaaaatttcagaaccccaaggaataaataaagatcatctcatttttaagaaagaaaggaaaaacaaagagccagctcactggcaaaggcatgagaatcagactggcattaacctcatcagtgcactgatagcaaacaaaaaagcaattaaaaggttgaggctaggggggcagcaaacaaactagacatcttgcccagaaaagttaccaaacaattgcatatcagaataaatgcattttcagaatttcagagcatagcagaaagttgttggctcatttagatttgttagtgttttgctttggctgttcatcatccagccttcttccatttttagggaatattccttgtgtatgcagtattggttggacttggttcaacaccttcaaatatggaagacaaattgataaatcctcctctagaggcaatatgggctgggatctaaattttgccactgaatgctgttatccaggattttgaatccaaagtcaatgttataagaatgaaggggcagaaataacttactaatggtagctagaataatatctagtggtgacaaaaggcctattcctgctaaaagacagtggtcatatttcctgcttgagtctccctgcttcttgaactttgttctataatttttatcacatttgtgagctatccaagttcctttcaatagattcctttcctgtttaggatagatactcagtttcttctgtttgcatctaagtatcttagcttattctataattaaatcagattccaggaaacaaacttccaggaatcagtaagaaaatttggcctagctggagatgaaggcaaacagctaatcatattgttcacctgtgatccactgccctcagagggcaaggctttaaacagtatgaagggggtgggaaattcaagaactaccagctacttctgaaagtctcaggtatgttaaaagaaaggaataccttaatcaggttcctaagttctcagtgaaaggtaaaaatgcaacttaaggaatgcctatcactttgctaaaataatctctcatctcttaaagccacagagctataaaagccaatgaacagatttgagatttaaccatgaaaatagctgatatacaatgtcaattaaattcatcacctagtcatgtcttaataaaggttcgtgtatcacagaaatggaattccgtcttcagtttggagagaatatatgtgattctaattgcttgctatgcttataaacaaaccacaatggtggtccttgctaaataaagttcagatgccagaaatcccttggtacatagcgtaaagaatggaaaaagatatatgacataaaaattaattttaagaaatctagagtggttttattaattagaccaagtagatttcaaggcaagaattactaccagacataaaagtggatacttaatttgattatagtaaaagagaaaagttttaaaagccataagattggaaaggaagaaatgaaattgtcttttactacagatgatatgattatataggtaaaaaatcatgtatttaccaaaaactgccagaactattaaataagagggtgaaggatcaatattaaaaaatcacttttatttttatatcttaaggatctcagagttagggttgtctcagagaaacagaaccagtaggatatacataaagaaatttattgcaagaaattggcttacatgattgttgaggttggctaggtaagttggaaattcacaggacaggatcagcacggcaggctgaaacgctgtggcaggaactgaagttttggtccacaggaggaatttcttcttcctcaaggaaatctcagttctactcttaaagcctttcaacagattagatcaggtccacccagattagcaaggataatctcttttcactgaaggtaaactgattatagatgttaatcaagtctacaaaatacctttatagtaacacatagattagtgattgactaagagccaaactgacacccaaaattgcccatcacattaaacaacaaataattggaaaataaaatgaacaatacaattttcaatagcatcaaaaatcataaaatacctaggttaaatttaacaaaatatattcaagacctctacactgaaaatgacattactaggaaaagttaatgaagatataaagaaagaaatctccccatgtccatgtgttgtcagactcaaagactcaatactgataaaatgtctactcttctaaacttgatcaacaaattcagtgcaagcccaatcaaaatcccagcagatctttctctagaatttgataaactggttctaaaatttacatgaaatgtaacagacctaaagtagccaaaagttttgaaagagaacaaagcaaactctaatgctttcaaacttactataaggcttcagtaatcaagacactgtggtactgatctttgacaaagctgtcaaagccgttcaataggaaaaggaaagtcccttcaacaaacagtgctgaaactggtatatatggtcagatatatctatatatgtctacagcgatctagatatgtatagccatttatagatatacatagatatatgtatacatatacttgtatacacacacacatatacatataagaatatgaacctagacccattccttacattctacacaaaattaacttgaaatatgtcatagaccaaattataaaagcaaaaatcttcaggaagaaaacatgggttaagtaaaaatttcttaactaggaatcattatccataaaatagaaaaggtagacttacaattcatgaaaatgtaagtctctgctcatccaaagacaccattaagaaaacatatggaaactgcaggctggaagaaaatatttgtaatgtctatatctgataaagacttgtatccaggatatataaacaatttctacaactcaataatagaaagaaaaacaacccaataaaaaaatcagccaaaaaatcttgaacagcctttttatgtaaaaaggcacagaaatagttaataagcacaagagaaagtgattaatatcagtcattagggaaatacaaattagaatcacaatggcatatatcacatagtcattaaaatggcaaaggtgaaaaagcctgacaacaccagatactgctgaggatgtgaaacaatcaaaagtctcatacattgctgcaggtactgtagaatggtatagccagtgtcgaaattgttctaatagtttctcataaagttaaaagcacatctattttgctgggtgtggtggctcacacctgtaatctcagcactttgggggccgaggtgggcagatcacctgaggtcaggagtttgaggccagcctggccaacatggtgaaaccccgtctctactaaaaatataaaaattagccagccatggtggtgtgcgcctgtaattccagctactcctgaggctgaggcacgagaattgcttgaatccaggaggtggaagttgcagtgagctgagcttgagccactgcactccagcttgagcaacagagtgagactgtgtcccactaccctcctcttccccgcaaaaaatatatctactctatgactaaaaattccactttcaggtatttaccaagaaaaatgaaaacataagaacatagaaaatgtaaagaatgttcatagtagtttcattttattcataatggctcaaaaattaaaacaacctaaacaaatgaggagaatggataaaaacgattgtaatataaacagacaatggaatactcttcagcaacaaaaaagaacaaaccactgatacattctacaaaatgaacgaactgccagacttttatgcttagtgaaaggagctagatataagagtacatattgtatgattcaattgatatgaatttccacaatagacaaactaatctcaggtgaaagaaaaccatacagtgattgcctatgggatggggatgaggtgcaatggaattaactgagttattacataagggatctttctgtggtgataaaaatgttctatattttaatagacagggttataggaatatttgcaattgtcacaactcatcaaactttacatttaagatgtgtggatttcacagtatgtaaatgtctcctccatttacaaagaaaaagaaaaaaaaagcttccagggagtaaggtttaggttaagccacactggagctgagctcagttgcttcttatcacaatatttttgcaagatttaatttgtaaccatttgcttgtattactttgattaaaatttaaagtacttgtacagacttccaagttaaaatggtagaataaaaacatctgagactttccttttctccaaccgtaatgatagaataacaaataggaccaaaccagtcaaaatacctaggattcaaccaaaagaaaaggaagagattcatgtgatacaattcaaaatgtgcaacctgagagagaggtttccttgaatacccttgtcttgatcccttgcagtaaacataatccatagtccaaactccccaacacacacacagacacacacacacgtacacacacacatacacacacacacaatgcaatagacgtgagagaaaagtttttaaaaagttattctaagacttccaaacaaagaaaggtgaaccaacacacaaaagttgcatctgcactagaaaaaatgtggaatatgggaaagtttaatttaaatgtccctacgccggcaggaaactaaaagaaaggcattagtcaccactagctataagaatctgagaaatgttgccctgaagctgggtacattactgtactgaataaaactgagtgttaaggaaataagtaaatagggaggaatggacactgagtaggctactagtaatgtatgccatagatggcaaattctatctagagaaaagatagcgaaagaaacagaagaaatgtccataggaagttttcatattgtggaagaacataatgaaaacatgaacctaataaaagcagagaaccttaaaaaagagacgataaaactgcagcgtgaaatgaaaaggaaaatcgtagatctaagaaataagttgaagggcggggcacagtgctcaggactgtattcctagcactttgggaggcggagacaggctgatcccttgagcccaggagttagcgaccaaccttttctccacaacctcggcagcatttgttattttttgactttttaatagtagccatactgactggtgtgagatagtatctcattgtggttttgatttccatttctccaatgattgattttgagctctttttcatatgattgttggccacatgtatgtcttcttttgaaaactgtctgttcgtgtcctttgctcactttttcatggggttatctttttcttgtaaatttgtttaagttccttatagatgctggatatgagacctttgtcagatgcatagcttgcaagaactttctcccattctgtaggttgcctgtttactctgttgttagtttcttttgctgtgcagaagctcgtaagttaaattagatcccatttgtcaatttttgcttttgttgcaattgcttttggtgtcctcatcatgaaatctttcctcctgcctatgtcctgaatagtattgcctaggttgccttcaagggtttttatagttttggatttcacatttaagtctttgatctattttgaattagtttctgtatatgatgtaaggaaggggtccagtgtcagtcctctatatatggttagccagttatctcagcatcatttattgcatagggaatactttccttattgcttgttttttcaggtttgttgaagatcagatagtcgtaggtgtgctgccttatttctgggttatttattctgttccattagtttatgtgtccgttcttgtaccagtatcatgctgttttggttactgtagtcctgtagcatagtttgaatttgggaagcatgatgcctccagctttgttctttttgcttaggagtgccttgactatttaggcttcttttttttggttccacataattttaaaatagtttttctagttctttgaagaatgtcagtgatagtttaatgggaataccattgaatctataaatctacaaattactttgggcagtagggccattttagcaatattgattcttcctatccaagaatatgggatgtttttccatttgtatcatccctgatttctttgaacagtgatttctggttctccttgtaaagacctttcacctccctagttagctgtattcctaggtattttattccttttgtggcaatcgtgaatgggagtttgttcatgatttggatcttggcttgattgttggtgtacaggaatggtagcactttttacacatcaattttgtatcctgagactttgctgaagctgcttatcagcttaagaagcttttgggctaagatgatggggtgttctagatatagtttcatgtcatctgcaaacagggatagctagacttcctctcttcctatttgaatgccctttatttctttctcttgcctgactgccctggccagaacttccaatactatgttgaataggagtgatgagagagggcatccttgtcttgtgccagtttttcaaggggaatgctttcagcttttgcccattcagtatgatgttggctgtgtttgtcatagatggctcttattattttgaggtatgttccttcaataccttatatactaaaagtttttaagatgaagagatgttgaattttattgaaagccttttctgcagctataaagataaccatgtagtttctgtctttagttctgtttatgtgatgaatcacatttgttgatttgcatacgttgaaccagccttgcatcccagggaagaagcttacttgattgtggtagataagttttttcatgtgctgctgaattcagtttgccagtattttattgaggatttgtgcattgatgttcatcaagaatattggcctgaagtttttttttgttgtatttctgccaggttttaatatcaggatgatgctggccccatagaatgagttagggaggagtccctccttttcaatttttgttaatgctttcagtaagaatcaaaatagctctttgtacatctgataaaaatcagctgtgaatctatctgctcctgggcttttttggttggtaggctatttattatgccccaatttcagaactcattattggtctgttcagagattcgatttctttctggttcagtcttgagagggtatatgtgtccaggaatttatccatatcttctagattttctagtttacttgcatagaggtgtgaataatattctctgatggctgtttgtatttctgtgtcatcagtggtaatagcccccttatcatttctgattgtgtttattgtgtttatgtaaatcttctctcttttcctctttattagtctagctagtggtctattttattagcttttttgaaaaactagctcctggattcactgatcttttgaatggtttttcatgtctctatatccttcagttcagctctgatttaggttatttcttgtcttctgctagctttgggatttgtttgctattggttctctaattcttttagttttgatgttaggttgttaacttgagatctttctaaccttttgatgtgggcatttagtgctacgaatttccttcttaacactgccttagctatttcccaaagattctggtacattgtatctttgttctcaatattctcaaagaacttcttgatttctgccttaatgtcataacttacccaaaagtcattcagaagcaggttatttgatttccatttaattctatggttttttttatatatatacgttgagttctagggtacatgtgcacaacgtagaggtttgttacatatgtatacatgtgccatgttggtgtgctgcacccatttacttgtcatttacattaggtatatctcctaatgctatccctcccccttccccccaccccacaacaggccccggtgtgtgatgtcccccttcctgggtccagctgttctcattgttctattcccacctatgagtgagaacatgcagtgtttggttttttgtccttgcaatagttttctgagaatgatggtttccagcttcatccatgtccataaaaaggacatgaactcatccttttttatggctgcatagtattccatggtgtatatgtgccacattttcttaatccagtctatcattgatggacatttgggttggttccaagtctttgctatcgtgaatagtgccacaataaacatatgtgtgcatgtgtctttatagcagcatgatttaaaatcctttgggtatatacccagtaatgggatggctgggtcaaatggtatttctagttctagatccttgaggaatcgccacactgtcttccacaatggttgaactattttacagtcccaccaacagtgtaaaagtgttcctatttctccacatcctctccagcacctgttgtttcctgactttttaatgattgccattctaactggtgtgagatggtgtctcattgtggttttgatgtgcatttctctgatggccagtgatgatgagcattttttcatgtgtctgttggctgcataaatgtcttcttttgagaagtgtctgttcatatccttcgcccactttttgatggggttgtttttttcttgtaaatttgttagagttctttgtagattctggatattagccctttgtcagatgagtagactgcaaaaattttctcccattctgtaggctgcctgttcactctgatggtagtttcttttgctgtgcagaagctctttagtttaattagatcccatttgtcaattttggcttttgttgccattgcttttggtgttttagtcctgaagtccttgcccatgcttatgtcctgaatggtattgcctaagttttcttctagggtttttatggttttaggtctaacatttaactctttaatccatcttgaattaatttttgtaaaaggtgtaaggaaaggatccagtttcagctttctacctatggctagccagttttcccagcaccatttattaaatagggaatcctttctccattgcttgtttttctcaggtttgtcaaagatcagatagttgtagatgtgtggtattatttctgagggctctgttctgttccattggtctatatctcagtaccatgctgttttggttactgtagccttgtagtatagtttgaagtcagatagcatgatgcctccagctttgttcttttggcttaggattgaattggcaatgagggctcttttttggttccatatgaactttaaagtagtttttttcccattctgtgaagaaagtcattggtagcttgatggggatggcattgaatctataaattaccttgggcagtatggccattttcacaatattgattcttcctacccatgagcatggaatgttcttccatttgtttgtgtcctcttttattttgttgagcagtggtttgtagttctccttgaagaggtccttcacaccccttgtaagttggattcctaggtattttattctctttgaagccattgcgaatgggagttcactcatgatttggctctctgtttgtctgttattggtgtataggaatgcttgtgatttttgtacattgattttgtatcctgagactttgctgaagttgcttatcagcttaaggagattttgggctgagacgatggggttttctaaatatacagtcatgtcatctgcaaacagggacaatttgacttcctcctttcctaattgaataccctttatttctttcttctgcctgattgccctgaccagaacttccaacactatgttgaataggagtggtgagagagggcatccctgtcttgtgccagttttcaaagggaatgcttccagtttttgcccattcagtatgatattggctgtgggtttgtcataaatagctcttattattttgagataagtcccatcaatacttaatttattgagagtttttagcatgaagggctgttgaatttcttagtctggaattctaatttgatagttctatggtctgagagactgtttgttaacatttcaattcttttgcatttgctgaggagtgttttacttccaattacgtgattgacttcagagtaagtgccatgtggtgaggagaagaatgtatatttcattgttttggggtggagagttctgtagatatctatcaggtccatttggtccagtgctgagttcaggtcctaaatatctttgttaattttctgcctcagtgatctgtctaatactgccagtgaggtgttgaagggtcccactattattgtgtggcaatctaagtctctttgaaggtctctaaaaacttgctttatgaaactgagtgctcctgtgttgggtgcatacatattttagaaagttaggtcttcttattgaattgaaccctttactattatgtaatacccttctttgttttctttgatctttgttggtttaaagactgcttgtttgaaattaggattgccatcctgctttgttctgttttctatttgcttggtaaatttttctccatccctttattttgagtttatgtgtgtcactgcctgtgagatgggtctcttgaagacagcatagcaatgggtcttggttctttatccagcttgccactcttgagtcttttaatgggggcatttagcccatttacatttgaggttagtattgatatgtgtggatttgatcctgtaatcatgatgttagctgcttattttgcaggcttgtttatgtggttgctttatagtgtcaatggtctgtgtacttcaatgatttttttctttttctttttctttgttttttgagatggagtcttgctctgtcacccaggctggagtgcagtggcatgatctgggctcactgcaacctctgcttcccaggttcaagtgattctcctgcctcagcctcccaagtagctgggattacaggtacgggccaccatacctggctaattttttgtatttttagtagagatggggtttcaccatgttggtcaggctggcctagaactcctaacctcaatgatctacccaccttggcctcccaaaatgctgggattataggcatgagccaccacgcccagcctttagtgtgtttttgtagtggctggtaacagtctttcctttccatatttagtacttccttcagcagctcttgtaaggcagatctggtggtaattaactccctcagcatttacttctcttatttctcctttgcttatgaagcttagtttgtccagatatgaaattctgggttggaattttttaagaatgttgaatattggttcccaatctcttctgacttttagggtttctgctgagaggttgactattagtctgatgaacttcccttcctaggtaactgggcctttctctctggctgccttttaacatattttctttgattttaacatattttctttgattttgaccttggagaatctgacgattatgtgtcttgggaatgatcttcctgtggagtatcttactggggttctctacattttctgattttgaatgttggtctttctatccaagttggagaagttctcatggatgatatcctgaaatatgttttccaaattgattccattctccccatctcttttaggtacaccagttagtcatagatctggtctctttacacagtcccatatttctcagaggttttgctcattcctttttactattttttctctattcttgtctacctgtcttatttcagaaagacagtcttcaagctctgaaattctttcctccgcttggtctattaggctattaatacttgagattgcattatgaaattcttgtatggtgttcttcagctctatcaagctggttacattcttttctatactggctatattgtctctcagctcctgcaatgttatatcatgatttttagcttctttacactgggttatgacatgcttctttagctcagtgaaggttatttttatttgaatctaattctgttatctcagccctctcaacctcagcccagttctgaacccttgctggagagatagatgcagtcatttggaggaaaaaaaggcactctggtttcttgagttttcagctcttttgtgctgactctttctcatctttgtgggcttatctaccttcaacctttaggttgtggacctttgcatggctttattttatttttttcttttaacagtctggccacttttcagtggggctgctacagtttgctgagggtctgctccagtacctagtcagctcagattttccagtacctggaggtatcaccagtgaaggctgcaaaagagcaaagatggcagcctgctgcttcctctgagagctctatcccagggaggtacagacatgttgccagcctgaacgcaccaataggaagtgggtggagatgctggttgggaggtctcaccctagtcatgagtaacgggattgtggacacgcttaaagaagcagtctggccatgcttttgtagagaagctgtgctgtgctcggataccacttctgctcaggtggcttgggctctccaaacaccgtgggctagaatggctgagctgcccaaacagcaaagatggtggcctatccctccccaccgggaactcgatcccatggagaactgaaacctctgctggccagagaacaccagtgggaggtggttggaggcttcgtttgggaggttccacctagtgaggaggaacaagatcaaagacccacttaaagaagcagtctggtcacactttagtggagcagctgtgctctgctggtgtaccacttcagctcagatggtttggactctcccaagaccacaggctggaatgtttaactcactcaaacagcaaagatggcagtccactctacccccagaaactgcattccatgtaggcacaacactgttgctggtggccggcaggaattccaagccagtgagtcctatcctgtgaggtgtcatggaagtggggcccacagaccattgctgcttggccccctggaatcagctgctttcctaggggtatgtacagaattgtaacttcccactttgctggagttgcagttacttttgctgggaagcctggagccagagtatgtaaagcagctgctctgccaaaactgcatgtagctctgtgtgtctgaatgaaggacctggtggagttggttcacaaggggatcttctgacccaagagttgcaaagatctgtgggagaagtgtagtttcctgaggttgcacctacactcactgcttccctggacagaggaggtttcattggctctgtgttgcttccaggcagactgctgttttgccttgcttttctccattctccatgggtcaagttatttccttgattagtcctagtgtgagtacctagatgttgcagttgaagatgctgtatttacttgtactttttgttcctctccatgaaagccacacaccatagctgcttctagtcagccatcttggccatgcagccccattttcttacctttcttaatgaaaaatcaataaccatttcaagatgaataaatcaacaaatagtagtctaagttgtatattgtttgtatgtcataagggaaatcaccagaactaaaaataaaactgcagctaagaaattcagaaggtgagaaggagaaaagaggtagaagaaagtgtagtgagctaattatctaatctttcgtaggagacataaacaaaaactaaagctgctatagcaagaagtagtgattagataaaatatatcaactgacaaatgtttccatagcaacgtgtaaaaagaagatataagccttccaaattataagaaggaaagcacacactgcatacactgaaccaaagtaatggtaagaaatttcatgaataaaatacaaaaataaaaaacgaagtatttaaaacaaaaaaacccataacattggatgaaaaaactaaaaccaattatattttttgacacctaatgtaaatagggtatattcacagaaagatgaccagattgggtaaaaaaataatattttatagatgaaaatatgttgtatatacaagaaccatacagagctaaaagactcagattgtatagaagaaaaaaagacataacaaggaaatagtaacaaaaaaaaacttgaggtagaaatatcaatatcacaaagactaaatccaaagcaaatattttacaagatagtccattttgtgagtataagatatacaatttactatgagattgtagttgccataaatatgtacataaatagtaaaagatagaacacatatgctgcaaacaaaacaagaagaaatagaccgaaatatggtattgcagtggaatttaacttgcctctaggttcatgacagatcagctacacaataaaataagcacacagaagatgtaaatgatataattattatacttcagctaacagatatgtctcaaactctttaacacgaaagagtatataacctcttttcaagaccccaaacatacataatgccatataaataaacagataatttccaatatatacacaaatacatgaagaacagatcatgatctctggatatatttcaatagaagtagaaattaatactctaaaaagaaaaatatataatcataggaaaattctatatctttttcttaaatactttgaattcaaaatgaaaatttaaaaaattataaaataaagataataaacacatcacttaccaaacaattaagggcttatctaaagttgtgctcaaagaacaattcatagttttatactcttaaggaattaaaaaggaagctaaacaagtaaattaagtagtagactcaaaaagttagaagtgctagaaaattaaaccatgtgttttcaaagaaaacagaaggaataaagtaatgatgacttaagcagaaattactgatttgggaagcagagaatcagtgaaattgataatccttgagcatgcataaagtttgtggttattaggagaagggagaaaacatggagaaaaacacagttgaagaagagtctcaaaaacttttcattaagaaaaaaaaattcattatgaaagccttcaaatacacacaaaattagaataagaaacataataaacacccacgtatccgatatcacattgtcttgattactgtaccttttctactaagtcttgaagttgagtagtgtcagtcctctgtctctactcttcttcagtgttctgttggctattctgagtcatttccctcttcacagaaacccagaaaccttagaatcagtatgtcaatatctacaaaataacttgctaagattttaattgtcactggggtgaatctacagctaagtagaaagtaactgacgtcttaaccatatttagtgtccctatcaatgggcaggaaatatttctccacttacttgaatattctttcatctctctcttcaaagttttgtagttttcttcatatagatgttgtacatattttgtttggtttgcatctaagtatgttttttgctaattaatttttcgttggtaatagataggaaggcaattgacttttccacattgacattctatattgtatcctgcaaacttactataattgcttattagttccaggagtttcttgctggtctttaggattttctacatagacgatcatgtcatttgcaaacatagatagttctgtttcttccttatcaatctgtataaatatatttcttattcttgtcttattttagtaaaatgtagaataggagtggtgagagggtacatccttgtcttactcccaaataaatggtgagaaagcgttcagtttctcaccattaagtatgatgttagctctagttgttttttgtagatattctttatcatgttgaggaagttcttctctattcctagtttgctcatagtttttattatgaatgggtattggatgttgtcaaatgttttttattatcaatgagtattggactgatgtaatcataattgttttctgtagcctattgatatgatggattacatttatcaatttttaaatgcttaactaatctttcatacgtggcatacatgctcataggtcacagagtatgtttcctttcatacattgtttaatttgctactgttttgagggtttttgcatctatgttcatgagagatattggcccataattttctcttcttgtaatatctctggttttgatattaggggaatgctggcctcatagaatgaattaggaagtgtttgctctgcttagatattctggaagatgttgcagaaattgataccattggttccttaaatgttttgtaaaaccccagtgaattagtagaaaatgccactgaaaccatctgagcctggtactttcttttttggaaattattaactctatttttaatggatataggcctgttcaaattattnnnnnnnnnnnnnnnnnnnntcaaattattcatcctagtgtgagttctgatagtcggtgtctttcaagtcactagtccatttcattttagttatcacatttgtagcatagaattgttcatactattcctttattatattttcaatgcccacaagataagtatgatggttctattttatttataatattagtaatttgtgtgttctctttttttcctttggttagcttggctagaggtttatcaattttattaatcttttcaactaaccaggctgctctgtctatggagtagccattcatttttttctttaattctctatcaaacttgtttcactttactccatggactccacatgaattttttcttctgcgagatccaagaatgctctcttggggtctagatctggacctctttctggcaacatcttccatggcaaaccatgaagggaccatactgaagagacccccaactcaaaggaaatagactgcagcaccaattggctgaatttgtagtcaagaaaacttttcttttgagctatttacagcttttaggaattgagtaaaatatactcctgtaaacaaaatctggagcatatttctttctactttatttctccagaatttagaaattatttatatctttttggggtggttgcggggacagggtctggctgtcacccaggcaggagtgcagtggtgcaataacagctcactgccttctgggctcaaatgatccttccacaccaccatgcacagctaatttttgtattttttatacagacagagttttgctatgttgcccagattggtcttgaactcctgagttcaagcaatctgcctgcctcagcctcccaaagtgctgaaattacaggtgtgagccactgcacctggccttatatcaccttttgttgggattctgagttataaatggccctcaccataccgatgctttctcactgaatgcttctctatcctgaatacaagagaccctaatacttagacaggaatatcatcacccattcagcctgaagaagttacagaagatgaaccttttaggattaagggtcccttttagaagggagaggggaaatatgtcagaggtgtttgaatcagagcaactccattctgaatagggactggataaaatgaggctgagacttgctgggttgcatccccaggaggttaggcattctttgtcacaggacgagataagaggttggtggaactggtttcacaagatacaagtcacaaagacccagctggtaaaacaggatgcggtaaagaagccagccaaaacccatcaaaaccaaaaggaggagaaaagcgaactctgattgtcctcactactcattatatgccaattataatgcatttgcatgctaaaggatactcccaccagcacaatgatggtttacaaatgccatggcatttgaagttaccttatatggtctgaaaaggggaagaaccctcagttctgggaactccccatccctttctcgaacaacacatgaacaatccaccccttgtttagcaaataatcaagaaacaaccataactatactagttaagcagcccatcctgtgctgctctttctatggagcagctattcttttgtttctttatttctctaatatatttgctttcacttaaaaacaaaaacaaataaccaatattttgtctgttgatattctctattgctttcctgttttcaatttcttaatgtctgctgtaatttttatttcttttcttcaatctatcttgtattaatttgcttttctttttttgtttcctaatgtggaagcttagatcatcgatgttagatattccttctttgctaatatatgcattcagtgttataaatgctcctcaaagcactgctttctctgcatcctgaaaattttattttattttattttattttatttatttattttgagatgagtttcactctgacaccgggctggagtgcagtggcacaatcttggcccactgcaacctctgcctcctgggttcaagtgatactcctgcctcagcctcctgaatagctgggactacaggcacatgccaccacgtccacatccagctaatttatgtattttttagtagagatggggtttcaccatgttgtccaggatggtctcgatctcttgatcacagatctcttggtctgcccacctcagcctcccaaactgttgggattacaggcatgagccaccgcacctggccctgaaaattttaataagctctattttcatttttatttagtttaaaatattctttaatttctcttgagacttcttttttggcatgtttgttatttagaagtttattatttaatctccagatagttagggatttttccagctctattctgtcttttgttcctaatttaattctattgtgatctgagagcatactttgtatgatttctattctcttagatgtttgttaaggtgtgttttatgggcaaagttgtggtctatctgggtgaatattccatgagagcttgagaagaatgtgtattctgtagttattaaatgaaatatactatgaatgtcaactagatccagctgatcggtggtggtgctcagttcaactatgctctcattggttttccatctgctgcatctttaaattactgatagagggttgtatatacagttttaataattatcaacattttgccatttcatctattaacctccttttttcaatcgcatgggatgaaatatctctacattgacagaagatgggtaagaatgtgtcaagtttctttaaaaaggttttatccttaatattttaaatgttttaaaaagcatagattcacagagaattgcacagatagcacagagagatcctgtttaccctttacctagtttctcccaatggttatttcttatgtacaatataaaaaccacaaaattgacactggcacaatgtgtatgtataattctattccatttttcacatgcacagatttgggtaagcaccaccaagtggttagagaactatttcctcatcacaaaggtctccctgtgctacccctttaacttatcacagtctactagtattatcattttaccagtatagaaaccttaccaccttttatgtgtctttcccttcctctgtttacaaaataattttcttaaatatttcttatatatacctgagacaatgttataatttttgtatgaaccatatttagaaaaatcaagagataaaatttattgtaattactcatacttttccatatattccctctttttgttctttcttccttcttgtttcaagaatcctttggttaatatttcatttctgattaaataatttcctttagccattattttagggtgggtctgatggagacacattcttgttttccttcatttaaaagggtcttcatgtgtcctttatttctgaaggatatttccactgggtatagaattcttggttgacagttctttactttctttcagcactgaagaaatgggtgtcactcccttctggcttccacactttttgatgtaaaatctgctatcatttgaattgtttttttccagaaaggacaagtaaagtgtcctttctttcgctgctttcatgatttttttctttgcctttaattttcaaaacttggactatgatgagtcttgatgtgaatgcctttgggtttattctgtttaggacttattaggcttattgaatctgtatatttatgcaaagcccaaaatttgaaaatgtttcaccattatttattctccaagtaatttttcagcagctttatcctctttctcttcctttgaaattcagataatcaaatgttacatattttattatagtctcatagctccctaaggctgtttgatttttcagtgtatatactcttcattgttcagtttgagtgatttctatttttctatcttcaagttcactgattctttcctctgctctctgaattttgctgtgaaacccatctattaagttttaaaattttgttttatttttaaattctaaaattttcatttggttcttctttatgtcttctatttctgtgctgatgctttctactttctttcttttatcatctgtttcaagagttttacaatggcccactgatgcatttttattgtagttgctttaagaatattgtcagacaattctaacatctgtgtcatctcagtgttgatgtgtattgattttcttttctcatttaagttaagatcttcctggttctttcaatgataaatgattttcagttgaatcttggaattaaaaaaaattgctggtaaatagtaggtgtatatgaatcttggacattttttactttattttgtgagactttgggttatatttaaattctttgttttagcagcctcctctgatactgcaatggtgggcagacagggcaagggatgcctcattactgctagatgacggtggaagtccaagatctacatgcagcctctgttgacactcttgaggggaggagtaacttgttatttattactgggcaggggtgacagtacagggtcaccactcaagctcttctgtaccactctggctaggacagtggtgtttcattactgctcccaatgtagtttcccatgatattccatgacaccttggtggtggtgggatggcctcattactgctgggcagtgagaagattcctgagcatctactaggtatcttctgacaccatcccagcagacaggggcatctcattactgttaggtggaggtggaagtccagcttctccactgacaccatggggagaaggtggctcacgactgtgcagggggatgaaagtctgagctttccacttggctttctctgacactatccaggagaaggggagggataccttgctacaccctggtaaggatgaaagtctaggctccttacttggccattgttggtaaaggtgactacagtttttttctgtggtttggttagggcagttattgtctaaaagtgttttgtctttctaggctatccctttcttgtcttttggctagagagggcaggctttctttcgaggctttctttggtctgttgccaatggcatttccaaattgccagatttcctagcactcattctgggatacaaaaagcaaaagacaattcaggaaaaccaccatcatgtcattcctcaggttccaaggtcactagcagggtaactagtctgccttcttctccctaccatttacagtcttcttatgtgtgcatgctctctctctccacatatatttatttatgtttagttaagtatacttgccaagaggaataaagtacatctaatccactctgcctttgttcttcttgcagtattttgaatcaaacccaggcatcctatcatttcatctataaagactttagtaagtataacattagccagtatattaaaaatataacaatgattccattgtcacatctcccaaaattaaaaataaatatttaatatctagtaaccagtgttcagttcagtgttctatcactacataacaaattacccctaaagttataggtttaaaaaatttattttgccttagccttttatgggtcaggaactcagaagagtttgcctgggtagttcttacttggggtgtctcacgcagttgcagttatatattgactgtagctgcaaccatataaataagacttactagactggatgatagcatcaaaaatgttatttttcactaacattcatatcaaaatcccagataaggggcaagcattgcttttggtggttgtgccataacagttcccctccctcttctctactgatgtcatttatttgaagaacttggtcttgtggtatatcccattctagatctggttacctatattctcaaggtatcatttaatatgtttcatggtcctctattgttcttggaaactgggagttaaatgtagagatatggttacattcaggctcagtttttttgacaaagatatttcataggtggtctgtgtacctcctattgcaccataaaaataaaaacataatgtctggttgtcttacttttcataagttaataattaatcagtaggttctggtggtaacagcttgacacattcactaaaaagttcccaattgactttttgatgcacggcttcccaagtaaatttgtattttggaccagataatgctttgctatgggagactggcctgtacatcgtagaatgtttagcagcatctctgatactctcatcaccactcccacacactgtcttgttgtgacaataaaaaatgtctccaattactgccaaatataccctgaggaaaaatggccacaagttgaacacttcttacctaatggttttagcagttgttaaaaaccgttgcctaggtccattattttattagggtttacaagtagtgatttttctaattccatcattcctgcatttacaactgtggttttttttttttttcaaaagaaatactttctctgggtctttctagcaaaggaagaataactggttaataattttatttatcgatgcgtttagaatagtgagctgtgccctaacaacctccaaaagtggccaactaatttttgtttggagtatcattcggaaatcttgaatactgacacacttcatgtatttcaatcttttgctgtcattttttttttctttttgatgctcaagtttccccatccttaaccagcaagatctctttcaacttagctcaggtttccttttgacatgaccttaatagtcagataatttcttgctttcaggcatgacaagacagatagtccagattcactttatgcatttcctttcccagacttagaatctgccactcacccaaggaaccctgattcctttaatttagaaatggtatttaggaaccacaatctggtcacaatgaccttatggtttttgggttgtcactatttctaggtctttggaacatagttccaaagccagaactataaaactaagtttatttagaaaggtttagcttccaccattgtttctttcctcatagtctcccctttctctacagataaccattttttattagatttagtttatacttcttgtttgttgttaaatctataacacactcatacccctaaaaagtagcatacaatattatacagctttcatttaaaaaatattgtaaaaaatagacataacataaaatttaccattttaatcatttttaagcgtgcaattcagtagcattaagtacatgcacaatgttggaccaccgtcaccattatccatttctaactttttcatcatcctaggcagaccactttgtactcactaaacaataactcatccttcccattttcctggagctcctggtaacctttattctactttgtctcaatgaactgcctagtctatctgtaccttgctttttttttattttagtagactgtatatgctagagatcactctctaagagcatacagagtttctcttcattcatatttgacagctgcataatacttcactgaatagatgaagtcatacacaacagttgcttgttcatgggaagtttgtgtttctagtctttcactattataaacagtgctgcaaagaacagtcaaatgtatgcaccatttcatttttttttgtctatgtatcttttatataggttcctaaaagtggaattgctggatcaaagggtaaaggcataggcaattctagagcatttagatttaatgtgatggacaggaatgaaccatgaagccacgtaagtattaaacaacagcaacaacaacaaaaaaagcagatacaggatgttttaaatggtatgactaaaacactgctttaaaccaggagatagttacattagttagctcttttagtttaaataattttattatttgaagcgaagtacgtgaaaataactgtattgctctttctctggattttaacaaatcggtgtctcacatgaaattatgtaactcttatcttttcttctgctttatgagaatactgtaacaaggggtactaccttcagaccctttgactacatggagaaataaaggagggagttgtgccaattactggagaattttggctgtcaaatagcacatctgggcaatttgggccagaaatacatatatatgatatatgatatatatatgatatatgatatatatgatatatgatatatacgatatatatgatatatgatatatatgatatatacgatatatgatatatacgatatatatgatatatatgctatatgatatatatgatatatatgatatatatgatatatatgatatatatgatatatatgatatatgatatatatgatatatatgatatnnnnnnnnnnnnnnnnnnnnatatatgatctatcatatatatgatatatcatatatgatctatcatatatatgatatcatatatatgatatatgatatatatgatatatgatatatatcatatatatgttatgtgtatatatgtatatatgtacgtgtatatatatacacacacacacacacacacaccctcctatacatattcaacattttcccctttaaactaaggttttctaggcttgaataaaccagacactgctcttttgtactgtttcgcaaactgtgcttggatggtctctccttgttttcaggagtgtttgatttttaaattgtgatattccactaaatgagaaatgaccaggacttcacagagatttcatgaaaggagggccacaaaggaagaacccagagcaggccggtgagaggcactctaagaggtacagagggttgcaccaattgctaggatttaatcaatcagaaggggtccaagccaggaagcaagggcatgccccgagcctcatttacccgccttgtcaccaccctgcccgctagtacatttcagagtctctaacccctccctgcatgcaagcccaggcagagtcctgccaggtttcacaccagagcacacccctgcacggactccccaggaccgcggcgccggctggctgcctcggccccccgcggccgcgtgagctccctcttggtggtggagggcgcatttcaatctggaaactcccagcccctaatttggtcccgcagactgacgccgctcccggtggggcggtgggggtaggagggcaaaggggaggtctccctccttcttggattgaggctgcaaccaacagccccgtgagcctctattcctggctgactgcgaatccccccatcccaggtcaggggccgggaccctacagaaagacccgttctcatcctcaaccttgcggcctctgtccggcggggaagttcagctgcgggtcagttcagctgcgggtccggccaagcctggcgcgcttaggcaccctagtcccctggtccgcggccgggcgaggacggagggggaggggaaggggctgctgcctcctttcccaaatccggtccctaatcgccccatcccccgccgtctactcgctttgtacaggcagtcaaaacagagctagcggccaattgacggggacgggaagcaaagccgcctagcgcctcgccccctccagccggccccccgggcccctcctctcggcgcccggaccttggccctccctctcctttcccacttctctctttgccctaacttcgcccccatcccccgctcatttcctctcgcacccgggctcgccaatccctctttccaagtccctcttccagcccggccttcctctcgggttcgccccccttctccccaatctccgtcctcttccctcccttcgccctccccccttccttctcttcccctcacccaannnnnnnnnnnnnnnnnnnnctcttcccctcacccaaccctggttcccctcgttcctcagtcccgatctctcccttactctgtccccgcccactctgcgccggcctctcagtccgggttgagccccacgtgtggacggccgcgcccccactgacagccgccgcccgccggcccgccccgcgccccgccgggcctctaaaacccccgcgccgcgccctccaccgccgcatcttctccagcgcccagcctcccgccctctctcttgctggccgcacgccccggccccgcgcacctccgcccggctccgcagccgctacccgcgcttcgttgccctgtgggactccgagcgagcccagagggaaccctcctcttcttctgggggcgacttttgtttgcttgcctgtttctttctggtgacttttgcagctttccaatatccgtcttcggagcgcacgggaatccgccgagctctgcgtgcaggcccttttttcttttgaggttcacattttttgaaattttacgccagggcttttgtaatttcctcccccgcccgctggcggtcctggagtcgctcggggctttaggccggttatgcaacgtgtaccgctcggggctgccggctgcacctccgccgcgcctcgccgctcactgcgctagacccggcgccccgcgtctcgcttcgcgggcagtcagggggccggcgctctgtcgaggtctccagctagagcagggagcccgagcccgagggagtccccggagccgacgaagggcttattagaccctgactcttttctgaggcgcgcagattttgtctttgatcactccctctccgcgggtctacggccgcgcgctttcggcgccggcgatggggagaagacggaggctgtgtctccagctctacttcctgtggctgggctgtgtggtgctctgggcgcagggcacggccggccagcctcagcctcctccgcccaagccgccccggccccagccgccgccgcaacaggttcggtccgctacagcaggctctgaaggcgggtttctagcgcccgagtatcgcgaggagggtgccgcagtggccagccgcgtccgccggcgaggacagcaggacgtgctccgagggtaagtgggcaagcggctccgcacctagggctccggcttgggggaggggggaatcctcagtttggcggctttctggcccactccgtcccagaccctttagctggagcctagagctgcagccccctttgccagaatatccaaagacccccaggagcgcgtcccccttttccttcccaaccccgcagctcagcgggcggaaagccctctctccgggggttgggcggcgggtggttagggggtccaggggtgccgatcgcagagcgtgtgcagagctcgcgctgcgggaacaggttctgaatgtccggcggcaggcgggcctgggtccgcctgctgcaggggccagagaagcctgcttgctccccacgtcggggccgccgctcgtgagccttttgtttgaggacgtgtgcagggttcacagctcaccttctcatcgtcaacccgagcgctccaccttgcgacgcgctttccttgacacgtcggggccaaagtaacagttgaccaaggaggaatggatttgggaaggagggcaaggattctttggaacggaatggtccctttgttctctgcatctggaagctagaatagtagcaaattatatgtttccatgcctcttttcgccctttaaaaaggcaggcaagggacgacagatgaaaggcagtgtttagacatttctgaccctcctgcattccagcatctagctcttttgcttccacgtctgcctcccgatctccaataatttgaagtgtaattttgatttgtttgttgtcctgaaatctactcgctcggggcattgcttacgaagaccgtttatatgttgctgcatccctctacctatctgttacgtgaccgcgcttgtccatcacaggcccaacgtgtgcggctccagattccactcctactgctgccctggatggaagacgctccctggaggaaaccagtgcattgtccgtgagtgcttggcagggatcgcagcttggggcagcgcactcggccctatctccggccgacctcttgcactcagccatttggacgcatagttgcgtttaaaatcaagtgatcacattgcactgataatcgggacgcggccccatttgaatagtggggaagactcaaccggtttgagtcagttcagacttcacttctagactctgttaaagggcaataatgataaagatttcaaagataattgaaagttttatctttctatgtctattaatacaaattggaagaggggaggagtagagcaattatctagataactcaaaaccactttttctgtaaaaaatccagatgagaccacatgttattatgcaaattatcaggcttttaactctgcttgaggtttgggccttatgaagatcaagatttcttaggcatttatataaaaccactttcttatttctggttttatatcaacaaccacataacctagatacgaaaggagcattctcgcggatttagtgttgacctaagttaacaaacttttaaaagacagaactcttacaaaggggcttgagtttttttttttttttgctttttggaagacgtttaaatttagggtttccagaccctgaacctcaatagtgtgcagtagatttccaaagtatgaatcttagaccttgaaaaattctgtatctctgaccttaaaagttttgattattttattctgtttccaaagtgtataaccagttctccaagttctaattggagagctcattagttatcagcctcacagtcacggactctgggatgtcttatttcatatgcctgtaaatttgtgacttgcagtgtgactggccttctcctgtgtgtttatgtagcacaaccacatttgtcttgttggaaggagagccaggtatcatagacagcacattcatttagagccagtcttgactttagattgacctccatgttctccagggagaaaataattatgcaactgtgaacagagaaaaagggcaaggcacactaaccaagggataataaggatgtagtggcatttctaactctgtatttattggttttgtggttttgagatagatgcttaatgttatttctgggcagtttttaaaaaagagatgaaatctccagtgtcataaagactaatttcttcttattttttctaccttaacatcccactatttccaatggcaaaaataggaaacaactgtgttatttaaagtgacttataaatattttgaacaaatcctctgattataataagcctttgctttattttttaaaagaacatgttctgcattcttttctctccaacacagaagtcatatgtgaggcattaatggagggtgggtttactctttcaggccagtagggcattaccatggctgctttaaacttacacggatttttagactcctgaaannnnnnnnnnnnnnnnnnnnnnnnnnnnnnnnnnnnnnnnnnnnnnnnnnnnnnnnnnnnnnnnnnnnnnnnnnnnnnnnnnnnnnnnnnnnnnnnnnnnnnnnnnnnnnnnnnnnnnnnnnnnnnnnnnnnnnnnnnnnnnnnnnnnnnnnnnnnnnnnnnnnnnnnnnnnnnnnnnnnnnnnnnnnnnnnnnnnnnnnnnnnnnnnnnnnnnnnnnnnnnnnnnnnttcatggtacgtgttgaaaatctgtaaagtcagattttattggatcagtgtggaatgggaattccagagagcagagccttccagaatatttgcagtagaaatatatgtatggccccactgatcactggtagaaaatcagctttgaaaatctcagggtaacagtgactattgtaatctgcatttctgagacttgaaatatttggatggttatgagctacattggaatttacacgtatcagaaatctatgagagtaaactttgaaatgatctttatatctgtaagaaacatttataacacttgtgtcaagacgtatctacaaaaatatttattagaaacacatctaaaaattctaagtacctaagattattaaacagtgcacaaaatagggacagtgtaatacctttatattctattgcatgagtctcatttaatgctaatagcctgcattcaattcagtagttcaattagtctgacatttaaaatgatcatatgtagaggtaataagtgaaatgaaaccgttataaactcaaaatcaagaattttaattccaggccttcctgatgataatgaattaagtaaattattatatttattggatttatctgtatcacaccatttagcaaaagaaagtatctgagaccatttacaaaaaagaaaataaataaaatacaaataaataaaaaccaaatattaattttctcatacatttgtacctcagcattcttttaatatagaaaaataaaaaatggtcaacagaattttagtgtttgacaggctttataaggagaagatattaaaaagaaactgtaattctccaagttctggaaacctaatgcattttgatttgagtctctatgttttgttggtattgtgcttagttgtagcctagaaaaattactgaagtacttccaaacttccaaatattcatttccaaaagtacggaattgactttctcacctttttttttttaatcttcttagaacatgaagcaatgaaacaatttgcttattaatttatttattgtgaaattatgctatgaacagtattttgatcaatataataagagtgggatgaggttggctggactaaataacatttgagacctgaggaaacatcagagcattccggtataattcctttatgttatgctaccaaatgaaaacactgaacccagaaaggctgtgggtttttctggagctcatagcagatcaatggcagagtgacaactaaacttcagaccttttgggtactatgtattctttacctggccatgtgacttctcacagcatcactgaagtctcagcccctaggtcctgtctccctctccctctggtatttctaggtctcatagttttagtaattgtgggagggacgtattcagtaagtgtaccatagtctgaggctgttgtggggcaaaagggcctcagcattcttgcttctcattggctcacagatacagagtatatacctgtatccacgacaggtaaatgcctgagaatgctcagtctccagcccatcaaaccttcatttggtttggaacccgggtggaggtactttgggtctcctctcttaagcctagactaaatattggccttctggggaggaggaaactttgaaataaaacaatgttttaatgcacatttgtcattggagagttactggtgatcagaaactgtagtacattttaagaagtaagagtcaactccatggcaggaaacatattcttgcctaaaatatttttatcttaacatcacagtatttgacactattcactttttctttttttattaatttgagacaggatctggctgtcatccagactggaatgcagtggcatgatcacagctcactgcagccttgacctctcgggctcaagctgcattctgacctcagcctcctgagtagctgggactatgggcacatgccaatgtgcaaggctaatttttaaaaaaattttcgtagcgttggggtctgcccaggctgatctccaacttctaggctcaagtgatccatttgcctaaggctcccaaggtgctgggattacagacatgagccaccatacccagcccactgttttcatttataagaagtactaatgctagtagtaatatatggatatcagaaggcatcttggagaagaaaaacaattagtgagttagtttacttctgcaggaaatgcttttttcattgttgagggtcccaaatctctttgaaagttgtgggacctttccctaactacagccagtttcagagcatttccagactttcttcttgtctttatatatccagtcatggcatgagcattaaagtacacagcccttgtgccgaaagagagaactcaattatggttatagagagaaatctctcagctcctaaatgaactgtctctaaacatgggagagacttcccattcgaaggtacttggctacaagtgtggagtatctgtggaatgtattgtgtcagtgagcctaacattctttgctgtgatgaccctcatacctttctgttcattggaggtcacagctgcaggaggctttgactctccccaccatcaaaatgccacagtagcttttctgagcagtaggaatacgctaggttgtggagataatatggaaggagaaaggctgtaggaaggagagggaattattgaggggaccaaagattgatcacagggtaggtcagataccagcctggaaggaatgtgtgtggaacccttgaggcttggccaagtcattagaactggagcctctggttcagccaatttcatgttgtctgtctcctgtgaaggcttttgcatagtgggctgtattttctctattcctgcaaccctcccaactacttagaatcaaggctgtcttctctgggtgaattctgcattttaaactctcagtctttaatgaaagagacaacctgtattgataagacaattaaagatttaggattatgcaatttttttttccttattgcaaagctttaactgtttattaaaaaagtaataatccatacataagcccatcatgcagtgagatccattgtactgtttggtgaaagttcttttagaccttttaaagccagtaaatatgtgtgtgtatatatatatatatatatacacacatacatatatatacacttatatatacatacatatatatacacacacacgcacacatatatatgtattttaaacttaaaaagcctgtgctttattttattctaccatgttttcattctgtaacgtttacttacatatgactttatttttgtttctatttttccataagttattggggtacaggtagtatttagttgcacgaatatgtcctttagtggtgatttgtgagattttggtgcatccatcacctgagcagtgtccactgcaccatatttgtagtcctttatccctcacctcctcccactctttcctccaagtccccaaagtccattatatcattcttatgcctttgtgtcctcatagcttagctcccacatatcagtgagaacatacagtgtttgcttttccattcctgaattacatcacttagaataataagtctccagtcacatccaggtcactacaaatgctgttaattcattcatttttatggccgcatagtattccattatatatatggtgatatatatattatatgtatcacagttatatatatatatcaccatatatatataacagtttctttatccacttgttgattgaagggcatttgggttggttccacgatttttcagttgtgaattgtgctgctattaacatgcatgtacaagtatctttttcgaataatgacttcctttcctctgggtagatacccagtagtggtattgctggatcaaatggtagttctacttttacagccactatggaaaacagtgtggagattccttaaaggattatgcaatttgaaacagcttcatttgtttacacgttttcataaggatacctgtgagacttattcccaagtctgcaatgggtaattttattgcatatctgaagttagacatttatatcatatattttatcttagtttttcaggctttttatttttaaatacagctttcttgttttgtaaactatggtttattatatagttattcattcattttcctattgtgctttctacagcgatttgtagaaatagttgtggagatggattttgttcccgtcctaacatgtgtacttgttccagtgggcaaatatcatcaacctgtggatcaaaatcaagtatgtttcttacttgtggccttttcactgcatttttcttaagctttggagcaaatgctaaaggtccttctatgtgccagggagttttaactgttattactttagttaatccttacatcaacattatgagatactgttaataccccattttacagaatagcaaagtaaagcacacataatttaattaactggcccaaggaaacacagacttgaatccaggtattctgatgcctaagtgtatagtctcaaacactagactgtatttgttgcctttgcttaacatgtgttttgtgggttatctaagggggaaggagaggagaactccaaaggcagcatgtgtttattgagtactgaccacatactttacacataatggacctattttgcttcacatgtattaactgccaacaacttcataagataattataactgtggactatgattgtgtgattcatgacccaattagaaattgttgggtccttaaggtcgaagattaatctttgaggctagtatttaagataacattataacaaggcagaagcaagattgtttatttaattgctcaataattaaataaatgctttcttaagtcttgcctcaaactagtgtgaagtcattatatttttaatacatctttcttcaaattttccctaaaagaaggtaatatagtatgtctgactcaggaataagattcaggattcatacatcaaatgccattgtcttctgatgaaactcctgatgaaaactctcttaatttcacttcctttgaatctgccatttcctcagcttttaaaacctaccattcaaattcatcaagatttcttgaccactttaaccagaacatttcatccccaacttaacctgaacctctctttcttgcctgattacctacaagatactgttgccagtatgttcattatcctgttcctagttttctcatatttgcctttggcaaaaaacacaatgctggaggaattttaagattcagtttcttaattcctctacctgggagctgggacattctctggtccactctttgcttgtggtatataatttagcagggaatctgtgcattcatttggccttgggcaatccttccatttcatcaggaacttttctaaccctcccaatcatcatcctgtttgaccttgctaaagcttttggcactattaatcattatcttcttgaaatgttgtttttcattttctttgaaacacccttgacttttaaaatgccagtggccttcagtgctccttttcttgatcattcctttttagtctcttttctatgtcttcatcagtctttcattcaaggtttggtattcctgagttctgccctccctgggtgaactcatgttttcaatgactaccaatctgttgataactcataatatttatctacactggagatcccaccactgacctccacactcatatattccctttcccatttgacatctccactcaagaaatagcaagcaattgaaacttagtagcatgtctaaaaggaaactgaatttattgctgaccacaggctacttgaaccacacagttcctcctgccttggcaaatggctctgccatccacccagtgcttaagtaactgctgcttctctttctctatgtcggctctttaaacaagtcctgtaggctttactggaaaataattatctcagatttatcttttcctttccatctccactgctaccatgtggtgtaagctatcctcatccttctcccagactctcgccctcttcaaatccgttctctgcagagcagctagagtaatctttttaaaatatagattacatcacttcactttctcatttaaatcctttcaatgactccctgttgcatttgggatataatgaaaacccttcggtggccgaggaggccctgtgttagctggctggtctctgcctgggtttccaaggtctcttccctgtctgcctctttttaaccacaggaatctctccattcttcagaagaaaccttttaccatcctaaggtcttttgatttgctggttcttctctctctgaagtttctccgtggtacttttaatatctggcttattcagtgtaaatgtcacctcagagtggtcttgtctagtgccagtatctaagctccttcttggctccagactagtctccttcacaacagtttacttcaaacagtttatcacagtctataattacttagtggtatttgtttacctgtgttttccgtagctccccatcggaattcaagctctgtgaggatagctttcaagtccattatgacagtactgcactgagctggaatggtgggcactcacctcctgcattctgaatggagacaaaagtgcctcctgctttccagaaactatgctgctagtcaccttctgtttatttttttttaacattggaagtgttttcaatgcatcctgaaaaacatgttatcacagatatgcccatgtgtgcacttataaagaaatgatgaataaaaatatgtttgggtcatagtatttccttctgtaagatataattgtcattgaattggataattgagtttatagttttataacctctcacatatactataattttgatgactgatgtttttatactttttgttattgctctttgcagttcagcagtgcagtgtgagatgcatgaatggtgggacctgtgcagatgaccactgccagtgccagaaaggatatattggaacttattgtggacaacgtaagggacattgatttattagaaatcatttgatttggtggatatttcatattaagttataatttaaggtctcataaatcctgtgatcttttgaaaaaacaattttatgtagtaaaccataccttaaaactgaatttctaatttttatcctgtaagaatttttctaattcttttagaattttgtgctttagagcagtgatgttcttgaatagtaactagtcaacaactggtaactagtgctttagcaaatgtgacacatctcacagattttctgtgatttatttttcctttatctggctccataaaacatgtatactttcctgaaaaaaaaagagcaagttttctgtgatctttctttcttttttacttcttccttccctctccagttccctctttgtatctatgattttttagaacttctcaaaattaaccccaggagagccaatctgataaattatcctttgcttaaatatatttaatactaagatacagggtgatgaaatgatttttaaaaagcagatgttattgtgaaacagggagctgtaacccagcaaaactggtaccttcactggagaataccctgtatgaatcaagaaataaccttttagcaagagtgtaaggattgtagtttctggattgtgacacatcactgtggaacatttgggtaatcttctctaaattgtgggacatttttgggaattcacatattttgaagtaatgtcaccttatatgacattaaagaagtgttatttctgaaattgaatcacaaatataagtccctttttactttatttgcatttttacctgatgtagactatacgttcctgctaatcttcaaggcttccttaaggattgctggtctcttttttaaacatagaaaaaccaagtcttaggtgtaaaagaatatctagcttgttttcagttaacattattttatttttcttgcaatgaaaaatttttttaaattgttgtaaaatatacataacaaaatttaccattttagccacttttaagtgtatagttcagtggcattaagtccattcacactgttgtgtaaccatcaccaccatccatctccagaattcttttcatcttggaaaactgaaactctgtacccattgaacagtaacccccatttccctctcccctgccccgggcaaccatcatttacttctgtctctatgaatttgactactttaggtatttcatggaagtgtaagcatgaagtatttgtccttgggtgactggtttgttatacttagcatagtgccctcaaggttcatccgtgttttagcatgtgtcagaattttcttcattttaaaggcaaaataatatttcattatatgaatataccacattttgtttatccagtcatctgttgatggacatttgagttgctttcaccttttggctcttgtgcataatgctgaaatagctgtttgggcccttgctttaagttcttttgggtgtatacccagaagtggaattgttggattacatgataattgtattattaattttttgaaatgctgccatactgttttccacagaagctgcactgtcttccattcctactagcagtgcacaagggctccactctatatacttgccaaaccttgttattttctgtttttttttcttaaataataataatcatgctaatgaatgtgaagttgtacttattgtggttgttacagtaatttccaagtttgtcttgtagttaaggtgattatggtaattataactttctatttataagtgctataaagttttctttagaataattttatgtaaaataggagtatccatttaaagaaagatattctgttaaggtcaggggtaggtcaactttttttgtaaaggccagagagtatatattttagaccttgctttctccattgcaaatactcaactctgccattgtagtgcagaagtgaccatagataatatgtgaatgaaagagctaggatgtgtttcagcaaaattgtatactttatagacactggaatttgaatttcacacaattttcacttgtgactgagtattatttctttgatttttcaactacttaaaagtgtcaaaattcctcttagctcatgggaagtacaaaaataagcagtggcctagatctggcctttgggccatagtttgcagattccttgtgtgggtgtgggtggttctcaggtatgacaagaggagactgactgaagtttgagaaatggagggtgaaggtttttaagagaatacaatacgttgaggccagttttctagcaagaataggaggggccaatgtgttaaattctctaggctagggttggccaggggaggctaagaaagaactggataacagtggaacagataaatgcagcagagtttctcattccatggatgatactttttctatattttctttgtacattcaggtatttcccacattttctacaacagacttctgtttataaccagaaaagaaagacagaagtctatcacgaacacagtattcataaaaagatagattgatatatatttttaggccttagaaaagtgttaggatatctgattgccaactctgttttgcaaagtttcataaccaatgaagagacacatctatccttgttgaaacacatccttttgctctgtagagggaaaaatgaaaattagaatcactgaagaaagcgccttgccttgcctcaactgatctttcagagtatttgctcaaatctgtcctgaaattagctgtcttcagtctgaattaagctgctcttcatgccttgggcatatgtgtgtatgtatgtatgagggttgtacagaacacactctagtgggtgtgtctcttgttcttcacacaggaatgagaaggcaggggatggaaaggactttccgcttctaaaatgctttgatgttcttccgcccctgtgtcaaaccatattgatgttaccacattttccagtcagaggaaaggcaacatcactgggtcagaaaatcagcatatactgaacatttgttctctaggtttctcatgggatgacatctttcttaatgtttacctcagggataatagaacatataggggaagcaaaatgtgtagcaaacacaatttatttgtcagcaagtaagaaggtaaaggtatgataactaatagattaccagctcaaggaatggtgtaaggaagatgttttccaagtcgtcttatatagaaagagtgttacaatactgagagcaaagaagcagatggaacatttttcaatttatgaatccagaaaagtcttggaaataggatgcttgctaaaatgaacattataaaacatttagactgcttagctgctttcctggaaacagacagcacttcttagaaagcattcttctatttcatccatttcattcagcaatgttgattgagtaactactgtgaataggtaagataataccctggccacatattctggtagaaatgacagttaatactaaaaaggtaaatacctaatacacatttaggtagcgagaagttttaggagaagaataaagcagggtaagagggagagagtctgggtcaggattagcagttgtctgctattttacatcaggggtctctgagaaggtgacattgaaacacagatccgagtctgtgcctttaaatctatggaaaaattgttctggacaagtgaaaagcaaatttaaaggacctgtagtgggaacagactccatgtattttggaaaccgtaagatccatgtccctggagtaaagtggggaaagggaaaatggtaagaattgagtttggagagggaggtatagggccttgtagtaggccaaggaacaaaatttggactacagcctaaatattatgagaagtcactggagcattttgagcagtggtgttctgtgacctggttaacattaaaaaaaaatcacctgtctgctgtgttgagcctggattataacagagaaaaggaaagggccatgtaggaggctaccacagtggtgctagtgaacaatgctgcagctgtagtcgctgaagatgtggtaagtggttgtattgagcttgtattttggaggtatactctgatggaccaggcgtggtggataaaaaaaaatagaaaaagtaaaaatcaaaagtgacaaggagagggttttggtggagctgctggattaatagcgatgtcatttccagatacgggaaatactgtatagggagtgggttgggtaaggagtggtggggctgaggataagagttttgttttggattcattagattgagaaatctgtcagacttataagtgcaaagatctatgaactctgatcttaggagagaggttggacatagagatataaatttgggaccgtatagaccgaattattatatagataatattttaatcataggcttagataaagatcattaggaagttgttgtagctaaagaagagagttgaaaacagagacccaattcagcccaacattgtgagatggggaagaggaaaagaagcctgcaaagaagagtgagaaagaatggacatgaggatggaatgaaaactgagagagtgtggtatcctagaaaacgaaggaagaaggcagcaccaatagcaaagatttataccttcctatgtcagacagtaggcttttgtttctttcctcttgttaacattttaacttggtttagaatgctatttttctaacacatttgtgtagaaattacaatcatgatttcagacttgacttatgcccaagtgtctgcgcctctgctgagttgtaagggagtctgtctaataaaaatatatacctgacctgttacctggcacaaagtaagtgctcagtaaatatctgttgaataaaaatgtcctctaaatatctgagcttttacagtatgcaaccaacccacacaggaaaaacagtgtgttttctccttctaggattttggtgggcagctaagaaaccagctcatacttctatctgtagtacatcttttgctctcttgcctttcatgccactgtcatgctaggtgtaagcacagttttcttcctgagtggtcagcgttccttctgtggtggaaatttaggcattttccaatttttttctgactccagttgaaatataagttgctgtttccattcttttttgttacaaaaaaatatgttcttttgtaaaatacctttcatcataattcatttgagaaaaggaaattcaccatttttggtttttgcttctacttttatctgtatttcctgcttctcttcttttgctattgctctttaatgtaaacttcggctgctgcagacgtcttgtcttacagaacattttcgtacaaatgttctatagttaaaagaggaaggaaattaagaatgtagaataccttcagcgtgcagccactgtgcactttgtcttatatgctattttatttagtcctcaaacgtctgtaggggaggaactgttaagtctctttttgcaggccaggaagctaagaatcagagaggtggtgtggtgagtgggtgctggggacagcagagctcattatttgttcactgcaccattctgccttgcgaagtacttgaaaaaatgccgtgaaattttgatgtgcgggagtttgttgagttcttgcagtctgtcagataccacagtaggtgacagggattcaaaggcaaacagatctggcccttgtcctgggggaacccactctcacatgagagacagaaatacaagcaaatggttgtatcagtggcccttgatctttttgttcataggatccctttacattttaaaaaattattgaggtcctcaaatgtcttttgtttatatgagttccttcaatatttatagtattagaaattaaaattgagaaatttaaaatatttattgattcattaaaaataacaagaaacccatattataagctaagataaatattttttataaacaataactataatttgcaaacctccaaaaatctttagtgagaagggaggcattgatagtctaacctagacagattagattaggtttaatttgtaatgggccagctctttctaggagaaactcaaggttcatccagccttgttctacctgcgaattggaaactttgttttggaaaaccgtgggagaagcccttcctccatttaccggaggttgtgttctgagtgttacagtcagtgtggacagcttttccccaaaggctggcattgtgataagagaacacatgggaaagtgactgtaatttaaatttcctacagctcaatagcatttaaagaaaattccacacattttaattgatcacattactttggacttagtattttgcagtgcatctttttaacaattgattttttaaatctttcttttttaaaaatttaattgtattttaatttctgggatacatgcacaggacatgcaggtttgttacataggtaaatgtgtgccatggtggtttgttgcacctatcaacctatcacctaggtattaagccccgcatgcattagctatttatcctgaagctctccctccccctgccctccccagacaggccccagtgtgtgttgttcctctcccagtgtccatgtgttctcatcgttcagttcccacttataagtgagaacatgtggtgtttcgctttctgttcctgtgttagtttgctgaggataatggcttccaccttcatccatgtcgctgcaaaggacattatgttgttcctttttatggctggatagtattccatggtgtgtatgtgccacattttctttatccagtctatcattgatgggcatttgggttgattccatgtctttgctattgtgaatagtgctgcaatgaacatacgcatacatgtaggaatcttcaaatcctggcagttgtttctatggaattactgcacagaatgctctcataggttttgttttttcccaccttcccatccatctttatttttttcatgttccccgtggccttttttccttttcctttctgcttcgtatttacttatatttcaagtctgcccatatttcaaggcaatgatgagtgggaagtgctatgtaggactcagctggagataggtaaagaagcagaagggtatggttcctagggagctgtacttgtgcagagacacacagaatcatgcctttaattgaagtgtaacttatcaacaaatgcctctgaggccattggcacagtgacgctttaaggtcaagatcatcttttatttccaagtgcgttttagtcttctgaccatcatcagcagaacagaaatcactctgtgcattctggagatgataggcaatctatccggttcaacatacctgataaggaaatagcagcattactgtgctactagatatcagtatacttattgagtttcccattttatgatatgtacctcacttgaagtgtttggccccccacttccctttaatttgagtaattagtgtccttcaactccatttgtggacacaggtcatagaatataatcctctaattcatttgtgaggacaaatgtttcaacagggtgggtagatagggagacacactttcagtatcagtattttctcctggagaagatatgattcttgaattcagctgtcttcattatggatcatgggaatacttaggttccaaggattctagagagtgtgatcttttaggctgaaccgagttgcagtgcacggcagttcagtggggagaggggagtggttcaagtttactggctccctcttgggctcatggaaccctaactcctggtctcccaggtcacaaggctaaaggagcaaaagagagtgtgtgctgtgtgtttgtcagcatgactttggaaacatttggattgtgagttaattttatatgaaaaaacatattatgcttacacagctttttttccctttttttcttctatgacctgcaaatagtctctacacattggttacttcttttggcattttatagctaacgttgatggtattttccccccttttctttgttttgcccttccagctttaccttttccccccttggcttccttttcttctctgatttttcctttttccctttattgccatatcattttcattttttcttattacatttttctcctcctactccttccctgtgctaccgggatcggcctcttttttccttcatttcccatattttattcattccttaccagtgaaaatatagattatagggttagtagtacagaaattgagggttgagtagttacattctaaatgagcatgagagccagcgaatatgattctgattaaaaaaaaaacaaaaaaccttttaccaaacacttgcttaacagtgtgatttacatgaagtatgtaagtttttgtctgaatatacttaaatatatttacttaaatttaagatgtgaactttaacctgtgtaatttatacaagttgcagtttaattaacataatgtactataatttaacataagatcctttattggcagcatcactgcactactatattgtgcttggagactggctatataatgagcttcttgctatttttgtatgcagctgtctgtgaaaatggatgtcagaatggtggacgttgcatcggacccaaccgctgtgcttgtgtttatgggttcactggtccacagtgtgaaagaggtaagaagagaaatgagactttactttctgaagaagtctattttattgtaaaaatgtataattttttgctattcaatgaagattctgctaatgaaattatatttttactcttctttgattatgtctctaagttgaatggtaagattttgagacatagctaatagtggcagaagtgtctcaactttttccaccagtgaactcagtttgggcggccaactctggggctatggctctagggtaattttgagtgagtgactgatggcaaattctaataatgtgcttaattcaaattaggaggcattgttgaaagtactgcttctgttaaaaatgaaatagtgtcaagttatctttggctgcaaaccccacaaaatctgacataaattgtcctaagcaataaggaaatgtataacatttcacaacaaaaagtctcgagctagtgggcctcaggtaggatgtgatcaaggcttttaccctgttactctgtttctcttgaccctgccctcctttatgtttcactttttgtcctagcctgaacttctttgtgtttgtaaaatggctgtcagcagtcactaaggaaacatgtttcttcttcacctcttgagacagaaaacatctcctccaactgtgggccagcaatagcctccagagacactttgtacgctgcctggtttaagcttgagtttttaaaatagttcatggcaaagtggggggtggtggtggtaatatgtttgatgtagacttaccaggacctgtcgttgcagcaggagatgatttaagcttccccagagtcacatggaagggatgattgggtatctgaagccagtagagcttccttttggtaagagaaaaggggtggagggatggatgctgggtaggcatcccgcattgtccaacttattcatataaatggttagtcaagccaatgtgaaaccaatttactatgatttgaatagcagttaaactcatgacctatatagactgctgaaaaatctctggcattgatccctcattatggatcatgggaatatttatgtttcaaggattctagagagtgtgatcttttaggttgagctgagttgcggtgcagggcagtgcagtggggagaggggagtggctcaagtttgctggctccctctaggccagcggaagcctgactcctggtctcccaggtcacaagtacaaaggagcaaaagagtgtgtgtgctgtgtgtaagctatctaaaataatgtcctgatggtaaacagtttcatgacatatcaagaagttaaacttcgtaaaatgtgataaataactagcatcgagccataacagtaaaaacaaacttgagctaaaattaatattacataatcattcattgttatttacatcctcagtgcatttttccagagcttgttgtggcatcaagttatacagcactttctttattgtgaaactagaatatatgaaattatgtcaatgaaatattacagataagtaggggtcaaggtttatatacatatagaggctttgagtcgtgaaaaagccttatattttaaaaattatactcattaccctgacaaaacttcatcttgcttttcaagtttaacctggagaagaaactgagaaattacaattatatggtgaagtttgaaaagtaaaatctttttcacatacatttggatgtatatatacatcaagatatttttattatttttaatgtaattgagatttcttgggactgaagtacattccacaaatgataagagtttaatgttacacttaggatgaatttaaatgtctttaccagatgcttttatttgggaaagaaaaattaattatgaaacgttagcataaaaagataaattattcagaatggaataacacacatttcttagataacgctaagtttatttgaacatcatagaatgtagaataaatttaaaatttcaaacataatcataattggtagagatgatcttcatttttctgggagtcaggtaaactttgtagctctttcatcctgaagcagatttcaaagtcaatttgtaattggcaaagaaattgggtgagtagtttcaactcagaggcttccaggaattacgtcattattcttcaacagttattcattcattagatttgttagtccttactaaatttctgagaattcaataaagatttacatatattttacatgtacagtagcatgttttccaaaaaaaattgtaagattaattagttaatggattacccttgggatattttttaaatgttggtttgtttcttaaaagtcttattacttactactcttcagatggaagttctaaagcttcatttctttcaaagaaggagttaacaagttgcactcttacatagcaaccatgaactttaatattttaaagagatgttttaaattgaatttatacatgtataataacccattctactaaaaatgaagttcataatttttttcaagaaacattgtgtctgtgtggatgcaaaaagagtaactcacttatgttgaggttggtgagtaagctcatgtgccctgttagcgtttaatgtttatatatatatttttaaattactgaatttcaaaatatatgttctttgttatcttaataaaaagacctttgtaaaatcagagatatttgttcctcctaatgtagaacacataatttctctttaaattggccttttgggatcagtcatatgataaaacatggctgcttttctagctgtctgggcttttggcagactggtttccagacccagagactgagtagtaaccaatggctggcatgattatggtatttaacttgagtctgagtgtgggtaacctgaacttctttggagttctcttttcacacttgctgatatgtacaatgaccttttatacttagcatcaaaaaaaaaaaaaaagagttcttgtggttacaggctaattgtaaaatgcagacagctcatttgtggccatagcatatgaaggtactcaattgtttatgtatctctttccaaacaaatgtaatttgagaaaaaataaatatctcacttaatatacacttgagattaaacagaaatggagtcagcattcaatggtaagacctgatgggttttttccctaacacttaaaatgtaccttatgttttatcagtagaaacttggagagggtgggtagacaagacatagatttacctgaggaatttctgaaccaaataggtgattacttgatcgcaaatgtggcctgtctagagtccttctttcaacttttttgacttaaaggattgttgaaatcttttgtaatggaattttctttgaagtttatataaggctcatctgttagaaatatatcccagacccttttaagtaatacataaattactactacaaatggtttttatcatgtaaacatgacttccttaaaatagtatgcaaattgtgtaaaatttcaaataatctggtgcttagtaacatttcctttaaaatgtacatttttttagtacaacttaaaggaaaaagggactagaaaattatttgttaattattgacattttaaagaaaaatgacttttgttaatctgcatcttcagtggaattaaaggtgagatcaagttgcaaatgttagagttcaaaaaatctaaactttcaagcctttatgtaaaatgaaaatagattgatttccatttaggttaccttttatgaaatcatccagttatagacctaatgcgtgaacccaggtctaaaagcgtgctgagaaggagtcactccatctctgcctggatatctctagtcaggggctctcactcactcaccccatcatgaaacagtcctgctcatcatcagagtcctgcttgctggaactctgcattattctgctgctgtccaaccaggacatttagcagatgtgtaagatcccatatagtctaattcagtgggaagatgatgatgacaacttctctgaaaggagtcaaccacaacctgccactcaggtgtgcatgctggcaacttggcttctaattataaactctttaattattgtatacatttttatttattcacccatacttcaggaagtaaagtaactgtagtagccattaaatctacttagaccttacccaaatcctccaagagcaggtgtaaagatggacaaatttggattttcctgaattctgagaataatgtagacccagactcaagttcgtttagaaataactgatatacttgttaatccaatggacttggaatgtattataaagtattcagggtgactgtacagcttatgaacattcaagtaacatagcaaattagtagtatgaccaggaatatagggaatatggtgacgagaacaagctggtattacatagaattctatacccagtgaatttgatactttcaagaaatgtataaacaatgtttttaagaaaataagttccattgtaattttctgttttaaaatgtcatgcatgtttattataaagtaatttagaaataaaacaagatgaaagacgagaatctaattactcataattcctacacttaggattaattaccgttaatgtcttggagactataacgtacactgcacgttgtaataacacaaaaggacaagcaagatataagagtaagttatacgtgctttggggtgtttacttcaatttacctttttaactacaaattagaatatacaagagtgtaactaaactaatttttaaatttaaatatttaatatttattcatccaatatttgttgagtactcttacagtattaggctaagtacttggaacttgagttataagaaaaaccaatatatacttcttattaatgagaagcaaattattgaaaaactagtcatctactttacacatgaggatgcaataagacacagtaaataccgtaataggagtaggaacaaaaagtaagagagctcagaaatgctcactaatgcaggacaaattacaaaagtctttctttcagtcaaatgaatgtagaatgaaaaaacatagcttactacagtgggaaaaacagtatcagactaattcctgagatatatcatgattaaatcttatactaatgttatttaaactccataattcatgaccaattaccctaattactaagctgatatttattttgcagaaataaaatgtctccctttttcttgcactctgaagatttagtagaatgaaaattacaataagcagagagagaatgttaccaactgcagatgtcagactcacatgtaccctcaggcacacacacacacacacacacatttctgcacttgtgaggccgttaagaagagcattttataaccttgcactctctaagctaaacttagccttaaatgggcatcagagaaataccaaaagatctgtgggaacttaactttttggcactagctcagttgatacccttatcttgaatgccattaagaacagagggaaagaaaattagagaaggaaaagcagacagtgggaagtggaagaaaaagaggggaaggagaaaatgaagactgataagaaaagagagatgtaatgctagaagagaagtggagacgcttggtgttgtataaaggaaggacttaaatcagggagaaaaatcaattcactgattgatctacctgggagaggccaggctttcacttcttaatccttaatttaagagtctgctgtttagatctgtaaaataagactgaacttttggcagcccagtagatcctgatattttattctcttttgaacaaaagcagtgtgtatctcatttattccagctctttctttgattttggtttatctacctacaggcagggaaacctgcaatataaaatacaaaggctagaatattttatatttttaactccataaatattttttcttgttttcctgtttcaacatcggattaaaagacattagaggttaattggtgtagaaactgggaaaaactaccagacacacacaaattaaatgtaatcagttgttattatatagaatttactcaaaagtaattaaatcagatgtgcatgtatatgggggaagttatgtaacaaataccgtatatttcaaaagttacaaattcttaaataacacctgtctccaggggtttcagataaacagttgtggacccataatcacctcacagattcgttggaaagattaaaagcaataatgtgttaagcacctgacacacaataggcagtgtgcctgacacatggtaagcttccactaagtgttacttgttgtatttttagaacacaggctgtagtcaaaatcaaagcttaatattaaaacctatgtaactttagaaatgtgattgccctatctgatgcctgtttgtacatatataatatatatctattatgttaactttgaatcatttttgtgaagattgaatgatataatgcctggcatccaataaatgaaataaataatggtcattaatgctaatatcgttttaagaggactccccagttatcaaaatgatagatgtggtggctggttattagaaatagaatattcgaaaatggactctcaaatgggagaaaaaagaatgttgcgacctatttaagtcatacaaataaggcttgatgatgtttttattgacagtggaaagacttagaataaagtggatactttaagagaagttcacaatcctgagatgagatttaaacaagaaatgaagtgccgtggcctgtgtctagcacagagttaactgctcaataaatgatcagctataatttaaaaattaagccaagatctgatatgcttttttttttttttttttttttgagacgggttcctgctctgttgcccagggtggagtgcagtggcgtgatcttggctcactgcaatctccgcctccccggttcaagctattctcctgcctcagcctcctgagtagctgggattacaggcatgcgccaccacccctgctaatatttttgtacttttaatagagatggggttttgccacgttggccaggctggtctcaaactcctgacctcaggtgatccacccgcctcggcctccgaaagtgctgggattacaggcttaagccactgcgcctggcctgatatgctgtcttagataaaattgtcctaatgggtgagagagagactgtttcaggatctctgggacatcagttgtgaacagcgtaagtttcactattttaccttttgtgggatttttggtaacggtacagattgactggaaaatattgtatatcattattatgaccttgtttttatgcagttgaattagaccctacttatcttgttttgacatgtttttattgtaaatgtcagtgttcctattagtactcattacttaactggtcttttgaaaatgtcttagtttgcccttttcctatacacaagttattattctaaacagtttatagtataactcatatataggtagagtttacttaagccaagtacttgtaatctatagatttgcatattgctaaatctgaatgaagaagtaggtcagagagtttttcaaacagtacagagaggagtccatctgtgatactttctttgaccaccctaccttcctacccccatcttatttattgggcaaaactaaggcagtctgtcctgtccttttacctgccatatatccattcctctagaatagctcttttcattgtgttgtgactgtgtatttgcttggctgtaggcctcttaagagcagagatacttttctaaaattgcctttgtgtttcttatactccacacagtgcagcataatggaagacgcatcatacatgtgactgcataaacatgggggattccaagtagaagaaataggatgaaaataagtatagagataataaaggtccttgaatgttcacagagattaatcatttcgtgtggttgtaatacacagttagtgaaaggaaagagtagatgatgaggctggaaaaatagacacagaccttaatttacaaagtctgaaatgctggagtcaagaggctgccctctataccctcaagtaggcactgagtagaggagctatgaatgacttgtatgcttgaaagcagttctccacaaacgtcattctggagtggcaaacaaaatagaatgaagggtggaatctcttagaactcactgcatgtctgctagattaaagttgtataatatttcactaggattatgatttatgtgtacaaaacttagatttttaatataaattggaaattatataatttggagggaagataacatttactgaacttttactatgataaatactttagaggaattaatatttttaacaacccaaaatattttttaacataacaccatgaataaaaaaatggaggtataaagaagtgaagcaattttctcatgttaactcagctaataagaaagtaggattggaacactggtggtataacctcagaacccatatacttagcctcaactttgattctagtgaaacacgacattgcaaaaataatgtatttccactctttagaactatattgtgtcagttcaatatgagtactgataacaaggcacatgataccattgaattaaagggatggcttgtcgtttggggattattttcttatctagcctagggaatacacacacatatatatgtatttcagattatgactctgaattcataggctcagaatttctttatgtatataatctaaaatattcaaaactcatagagcttaaaacaaaattcagacttctgtgtttagccaagatagactaacaggaataaattagccttcctgcctgaaaagaataaaacacagaacagaatatatgaaaatgtggttttcatgatattggacactaagcaacaaaaaacagtgacccgtgagagaagggaaacaacagtgtgaaccttttgacttccgcagcttgctgcctgaaagggtttttccaggttgtgctacaacatggaagtttgccccacctgtggctcacaggcttcatgcagcccaggagagctttgaatgcagcccaacacaaattcgtaaactttcttaaaccattatcagggttttttttcttttttctttttttggtcatcagctatcgtcagtgtattttatgtgtggcccaagacaattcttcttccagtgtggcccagggaaatcaaaagattgaacactcctgtgctacggggtgagaaaatccaggcacggcctagcagactccctaagttctggggagatcaagatggctagagttctcagggcagaatcctggtgaggaaacagatatatagagagaacttgtgacatctacagaggctgtctctcaagttttcagcagaatactgacaatcacattcatgtgaggaatctttctgagactggagaaggaactgcttgaaaggagtgaaaggaacaatactcagagttgcacataagcctggaaatactgccttcctctctaaccagattagagggtcacataattggtggggtattggttagagtactcagaatagtgttgcctcaatagtggagaacaattaactatagactaaatgctgctctggctgtggagaataaattttaaaagtaacagctaaaaggatcaaacatctatctagaaagtttaagaatatttataagaatacaaaaatattaagcactaaataaagtaaaaaaaatcccaatacatggtatctaatcaaatatctgcaatcaaaaattttgtgtaaagaagcaggagagcatgatcaaaatggaaaaaaaatcaactaaaattcaccccaaactgacaaagatgttagaattaacagactggaagatgaaagtagttattataaggtattccttatgtccctaaagttggaggaaagattaaaaatgttaagtagagatgtggaatccaaattgaacttctacagatgaaaactacaatgtctgaggtgaacatttttctggatgggattaatgggagatgagacattataggcgaaaagacgagtgagcctgaaaacatagcaacagaaattatttgaaataaagcacaaagaaaaaaaggcttaagaatgtaggagagcataagtgagctctgtgacaactttcagcaaactaaatacatatatttagagttagcaaaataatagatggcagaaaaaatatatttgaagaaataatggtcaaaatttttccaaatttgataaatgctataaactgacagacccaagatcaatgaatccccaagcaaaagaaacttgaagaaaattatattaagatacatcataatcaatttctcaaaaccagggatacagggaaatcttaaagtagccagagaaaagagatacattttgtatagaggaaaagaagataaaaataacaacaaattatttgtccaaaacagtacaagtaaaaaggaaagtggaacagcacatttagagcactaaagttgaaaaagacaattctctgtctaggcttttatatttaataaaatgtctttcaaaatcagaagtaaaataaataaagctttttcccaatatataaaagggaagaattcattttccagtcacctgcacagtaagaaatattaaggcagttctttaggctgaagaaaaatattgccaaatatttttgaatattctttgaaaaatattgaaaggaatgaaaagtatcaaaaaacgtaactatgtgggtaaatatataatacttttccttagtattttaaatctttttaggaaacaattgactgaacaaaaattaattacaatgtcctatggggtgtagagtagatgtggtggtaaaataataaaacaatacacagaggctgggatgtgcctatactatatgtcaagaattatgttacttgaagatagacattgataagttaaagatgtgtggtgtaaaccttagagtaagcactaaaaatacagagtaatgattaaaaagccaacaaaaggtgataaaatggaataataaagaagaaagcaacaaaagaaggtaagaagaacaaatgattaatggatagttagaaaacaaatagaaagtggtagattgaaacctagccatgtcaatcatcacaataaatgtaaatggtctcaacactccaattgaaagataaagattgttatgtaggattttaaaaatccaattatatgctgcctataagaaatctattttaaatagaagacactaatggattaagacctaaaagatgtaaaaagaaataattggctaatagtaatcaaattaaagctggagtagctaagttaatatcagacaaagaagatttcagagcaagtaatagtatcaggcataaagaaggccatttcataataataaagcggtcagttaatcaagaagatgtgatggttctaagtgttctctcacttaatagcatagcttcaaaatacatgaaataaaaacagaactgcaaggaggtgtagacaaatccataattaatggagatttcagtaccccctctcaataattgagagtaggtaagaagtcaatacgggcatagaaaactttagcactgctgtcaatctacttgacctatttaatatttatagaacactttgccacacagcagcagataatatacattcctttttattgcacatggaacatgtagcaagaaagatcatattaaatggatattaagtagataatgaacaactcaaaagcaaaaataaggtaaataatttcttgaaagacatatatcgccaaagctcaattaagaatacaggtggccttttgaatccatgagttccatgcatgtggattcagccatggatcaaaaatatttgaaaataacaataaaaataacagtacaacaaaaaataatatgaacttaaaaagtttagcagtaagacaaccatttatatagcatttaccttgtattatgtactattggtaatctagagcttatttaaagtgtatgggtgaatgtgtgtatgttatatgcaaatactacataatttttttatcagggacttgagcctctatggatttcggtatctctgggcatcctggaaccagttccctgcagatactaagggactgctgtaaataacatgaatatccctgtatcaattaaataaattgaatgtgtaacttaaaaccttctcatgaagaaaactactggcccaaaaagctttactggtgaattctaccaaacatttaagaaagcaaaaataccaattctatgtagatttctctagaaagttgaacaggagttaaaacttcccaactgcttctgtgaggccaaattaccttgataccaaaaccagaaaaagacatatcaagaagaaaacaacatataaatatcaattatgatatacaatttctcaacaaaattttagcaaatgtatcaataatatggtaaaaggataatagatcatagccaattgagatttatcctatgatattaaaaaacatcgtgtttcactatatgaacaaattctaaaaaatcagagtgttcatctaaatatagctgacaaagcatttgacaaattctgatgccaaaatctgttcccaaaacagtcagcaagataaagaatagaagagaatttcctcaacatgaaagaagggcatttccaaaaaaactgtaatatggtaacaaagcaaggatagtcactctcgtcacttctgttgaacattgcactgtttggtcctagcaatggcaataggcaatacaaagaaatgaaagtcatgtatttggaaaggaggaagtaaaattgttttacttgtagatgatgttattgtctatgtagaaaatccgatggactttacaaaaatctactggagctcataagtaagttcagcaaggctgcaggatacaaactaatggcagttgcatttccatatctaacaatgatcagttgaaaatctaagttgaaaacaataccatttacatcatcttatttattatgtaatactcatggataattctgcaaaagatgcagaagcccatgtgctgaaaactgcaaaacattgctgaacaaaattaatgaagacctaataaatgaagaaatacatatgttcattagttggaagactcaatattgtggggtatctcttctcccaaaattgttgtatgaattcagcataggactgatcaaaatcacagcaaaagtcttaccaggaatgtatgaagtccagtagagcagtatctcattgtgattttcaatgtcattcatcattagggaaatgcaaactaaaatcacaatgagatgtcattctactgtatgcattgcttgtaagaaagtacatggtacaaccatttttgaaaactgtcaagtttcttaaaaagttaagtatatgcatatcatatgattaggctatttcacgctttatttgccccagctaaatgaaagcttatattcatacaaaaacttgtactcaaaggctttgtagcagccttatttgtaatagtgccaaactgcaaacaacccaaatgcccatcagcagataaatcaagaaacaagttgtatattcatacagtgcatacaacggaatatttattgtttgttaaaaaagtaatgaattatttatatgtacattattgatgaaccttaaattatttaggctgagcaaaagaagacagttgaaaaagagtaaatacattatgattttatttttatataattctagataattaaaactactatgacgacttgcagagtagtggttgcctagggatgcaaaggtatggataggcaggatagaacaatgacacaggaacaggtggtaacttgtaagagtgaaggatatgttgttatataggttgtaatgatgatggggttatacatgtataaaaccatacatgtacactttaaatatatgatgctgattgtatgtttattatacctcgggaaagctgttaaaaaattgaacaatgaaagtaattgtttctccttttgtataagttggtttaggttttgggattaatgcttctggccacatacactttttttctacttgtggttagggaaacacagtgagggatgcttccagaatcattgtgcacatcttttttgggacttctatttggggatattgagaaagtaatgttactaattattgtctgcataatcagtatgagtttttcaaggagcagatggccattgtagtagtctgttctgccactgctaataaagacataaccaagaatgggtaatttataaaggaaagaggtttaattgacacacagttccacatggctgggaggcctcacaatcacggcagaaggcaaatgaggagcagaatcacatcttaaatggcggcaggaaagagagcttgtgtaggagaaaacccctttgtaaaaccatcagatcttgtgagacttattcactaccatgagaacagtatggggaaaactgctcccataattcagctatcttcacctagccccgctgttgactcatggggattattacaattctaagtgagatttgggtggggacacagccaaaccatatcattctgccccgggctcctcccaaatctcatgtcctcacatttcaaaacacaatcatgccttcccaacaactctccaaagtcttagctcattctagcattaacctaaaagtccaattccaaagtctaatctgagacaaggcaagtcccttctgcctaggagcctgtaaaattgaaagcaagttagttacttcctagatacaatggttgtgcaggcattgggtaaatacacctgttccaaatgggacaaattggtcaaaacaaaggggctacaagcctcatgcaagtctgaaatccagtggggcagtcaaatcttaaagctccataatgatcccttttgactccatgtctcacatccaggtcatgctgaagcaagaggtgggtccccatggtcttgggcagctccgcccctgtagctttgcaggttacagcccctctcacgctgctttcatgggctggtgttgagtgcctgtggcttttctaggcacacagtacaagttgttgttggtgaatctaccattctggggtctggaggatggtggccctcttctcacagctccactagacagtgtcccagtggggactctgtgtgggggctgcgaccccacatttcccttccacactgccctagcagaggttctccattagggctccacccgtgcagcacacctctgcctggacatccaggcatttgcatacatcctctaaaatctaggtggagttcccaaacctcaattcttgacttctgtgcactcacaggcccaacaccatgtggaagccaccaaggtttagggcttacaacctctgaagcaacagcctgagctgtacattggccccttttagccacagctggagctggagcagctgagatgcagggcactatgtcccaaggctgcatagagcggggtttgagtgtggggggcctggggaccaggcccaggaaaccattttttcctcccagacctccaggcctgtgatggaaggggctgccatgaaggtctctgacatgccctggagacatttttcccattgtcttggggattaacatttggttcctcattacttgggcaaatttctacagctggcttgaatttctccccagaaaatggtgttttcttttctatcacattgtcaggctgcaatttttttcaaacttttatgacctgcttcctcttgaatgctttgccacttagaaagttcttccaccagatatcctaaatcatctctctcaagctcgaagttccacagacctctaggacaggggcaaaatgctgccagtatctgtgcatatcaagagtggcatttactccagttcccaacaagttcctcatctccatctgagaccacctcagcctggactttttgatcaaatccattcaacaagtctccaggaagttccaaactttcccacatcttcctgtcttctgagccctccaaactgttccagcctctgcctgttacccagttccatagtctcttccacattttcaggtgtctttacagcaccaccccactatctgataacaatttactgtattagtagtctgttctcatgccactaataaagacatacctgagactgggtgatttataaaggaaaaaggtttagttgactcacatttccacatgtctgggaggcctcataatcatggcagaaggtgaatgaggatcaaagtcatgtcttacagacagcaggcaagagagcttgtgcaggagaactcccctttgtaaaaccatcagatctcctgagatttattcactaccatgagaacagtatggggaaactgtccctgtgattcagttatctccacctggccccacccttgttattacaattcaaggtgagatttgggtggggaatggccaaaccacatcagctgggaagtcaggaaatgtaactagaaaaatagtcagggtatgtttttataatttattgtcctatcacttcttctcaaagagttaaaagctaaatttatgttgaacaaagaaagtgtcatagcacataaagaagaggaattttctgcctgcttatttttgttccttgaaagcttttcttcttacaaaaattagtgcaaaattttttaaaaattattattttagatttactttcaacattatataaaccacttcctaatctcatttgttttgtaaaattttaaaatctgattaaaatacttaggccacaatttcttgatttaccaacattatacaatctcttttatctctccaccataaggggagtaagtatgatatcttttattgttgctttttttcacctcacctatagattgattcaatttttgtcaagtgatttttctaggctctgcttgagtgccttcttattgtgtataatgttgatttgttgctttatacttaaattccaacttggataagtttaacttgggtgtttgtacctttttcccttcatatttctgtatatatgatccaattatcttctgacattgaatgtgttgtggagaagtctgactctagcctgatttttcttctcctaagtcacttgctgttttttcctggatgctcaaagagtttttactttataattattttttttttttgttctgtataagttttagtgaaaagcatgtgatcatttgattggaatgatagacttcttccttaattttggagaaacgttctattgtttctttgagctgtttgtacctttttccttccatatttctgtagataggatccaattgttttctggcattgtgtgtgctatgaagaagtctgactctagcctgatctttcttctcctaagtcacttgctgttttttcctggatacccaaagggtttttactttataatcatgtatatatttttttctgtactagttttagtgaaaagcatgtgatcatttgatttggaatgatagtcttcttccttaattttggagaaatgttctgttgtgtcttcgagtcatttttctccatttttaggttctctacttcaagtatattgatttctttttttagacttttgatcttttatccactctttacttcttttgatctttatcagtaattctttttagcagtgtctgttctgttgtttttgccaattagtgtaatggttttataatcatataagatatcttactttgtttttagtttatttagaagtttctcttttatttcactgttttgtttgatcatttagactttatttagcccttttgttactgaattcatttccttatatatttattaacaaatagctttgtaatacaaagaaatcatgcataattttcttttgttttctcattattttttcctacaatgcagtattcttttcttaatctgctttgtgtattaggaaaaaattatagtatggtacatagttcccgacccatttctttctgtcttctgcttccttgaaatgggcttttgcattaatttggtatagatgaatttttcttttctccctttcagaattacctagggattgttttccttccctagctcctgtttgagagccaggtatttcaagtgcattatgttctgagcccctatgaggaaaggaagagcacagctgggatttgggcagcagtgatgaaaggatctgagctctgtactttctcaggttattcttcacatattttgtgtcaggatcactccctcttgtcatggaagtattctttttcaaagaggatatccctgaaatttgaatgattgctcccatttcagctacaggacctgatgcaccattgctatcagaaaatcttgcttggtgttagttttctgtatttgtctcatcattcctcagcattagtctgtcttccttattgtgattgtaaggggcttcaccccagcctgctgctccctgagaatcctttgttcttatgttctttgtgcttaatgctgaggataactaaccctgtgtgatgatataattctgtcttcactgtccagttttctcccatctggtagagatcacaatgactgggcctttctgtttttttatttttgtttttgtttttgttttttcttcgaatgcgatgttatgtgggtaggtagggattttagtcctataatttttaactaatttatccataagctaaagacgaactcagctcttcagaaggaatagtcagatttcggccgggcgcgatggctcacgcctgtaatcccagcactttaggaggccgaggcaggcggatcacgaggtcaggagatcgagaccatcctggctaacatggtgaaactccgtctttactaaaaatacaaaaaattagccgggtgcggtggcaggcgcctgtagtcccagctactcgagagaggctgaggcgggagaatggcgtgaacccgggaggcggagcttgcagtgggccgagatcgcgccacagcagtccggcctgggtggaagagcgagaccctgtctgaaaaaaaaaaaaaaaaaaaaaaaaaaaaaagaattgtcagagtctcatcattttcattccctatatcatttgagggaagaggggttatgacactcttccgtttcattccttgtctgttgtttttcaaacatgtcaggaatttgggcatatttcttctttagctgctgacagtaaaagtgttgttagtttcatttgacctttgttgttgttgttgttgttgttgttgttgttgatattagctgtgggaaagggagactctgtgatatggttttactctactgtattttccaggaattttttttatcacatttaaaaagtttttgacctgaaatctatctaaagtcacacagaaagccaggaggaggggcttccaatcgaagatgatatagtttgtgatactgcagctgacatttaagactaatattgttgcactttattaagtgcatattactcaatcaagaaacgttaattctgtgggtgcctcatcttctgcgaattaaagactgtgtttcccatgaccatacttaatgtcgtggtttaatgcatgcaaactttttgcatatgggcaaagccttatgtttgtgaatgtcttcatctgatttagaaatagcacacaaagtacattccaaatcttgaacaagatggttttcatcttaaaaaaaaaaagaattaagttctgaatgtcacagtagagagtttagttagaatttaacagattactgtgttcttgagcgtgtcaatttacaagtaatttcttgtttgaaaaatgaggacattgggctagatcagtgtttactcatcttgcttggtcataagaatcaccagagtatttttgtcaacagtattgattcccacatctgttccttggagattcaaattcagtactctgaatacagtgatttgcaaccattgttgcttattatcatcaccagggagtttttaaaaatctcggcactcaggcttcatcccctatcaattacataagaatctctggagccataggacccatggccaaacattagcattttttaaagcccgcgaagtaattgtgctataaggtgaagtttgtgaaacattggtatagcatgaggcccttacaaagtaccccagggcatttttataattagctaggcttaagaaatcatttattaaaatatctctaatattttatccaataattcaattttcacattgaatagtgcctaaaatgaagccactctgggtataatttactactagattattttgaaagatttataatgtcttaaaattctgttaccagaatagattttgcctctctctgatgaggcaacgctggatttggaatagtcaactttatgttaaggttttctccatctctcatacttttaaatcccaatgtaagaagtacatactccctgcagggggcaaaattgagccaagaatgtttataatagcttcgaatcttggcttggttactatgtggtaaactaagaaataacccaaataaactttaaaaataatatgtagaatgacttgtaaatgaatgggaagctttatctagttttttaaaaaggaaaatcctactcgtttgaaggaaattaatgacaaatcttgctaaaactaaatctgtatcttaatcagttattacattatagatttgtagattatagtaagattgtagagatcatagtgaaatatataaaggaatgtaaccctgcacactttttaagtactacttatataatacttctctttttagaataattactgacattcataagtattcatttcttatttcacagttatgtattttctattgtttatgactctacaaagctataaataagtatagtttatttccctgcatttgagtgaagccagaggaacttgagctctctcttgtaaaaatataaataatttgtgaaggaggtggtgtctgaagagtcgtttgataaaaagacagtttgagggcttggttggtgctagggaataccaaggtccattttttcaggcacagagcacttgaggataaaaacctagagctgaactagacaagatcaaagaacagctgagcagataatggagaaggagttggaggagtgaggaaggtactttgggaaatcccagtggaaagtgctatattcattaattatcccgtgactggtgagatgttggagatttttgcttccattggctgttatgtatgaacaagaaaatatatgagattttgcataagccctagccagactcttcagtaacttccaggtccctgtggggccatgcaagaatcactttgatggtgtcaaccttcagaatggtttgggtttgaatggtcatctctttctggagtccccaaaggaagcaaatgtgctctgccctctgcattcccagtaatgtgtctgacacactggtccaactctgggctctgccatgcctctctcctgcctccctctgatgtctcacagtcctcctcaggacagaggggttgggcttccttttgcttttgcttttccttttcctagtttcaggtgggtgtcagaaagggataaattggttgaggcatgaggggttctaaattgggagttatttcactaagtatgttctggcatatataaagaatttggtacattgcatgatacaaatggctaataatttttttctgttacttaactagaattatgaaacaaactctcctaatcattcagttaaaactgtttggagattttgtgttaattattttaactatcacgttaccaggaatattgaaatatggctccacctcttccactagctcagagacatcactgtgaactagaaaaaacacccccttttaaaaacactttattgccagaaatttgtcatgataaaacatagaagtctagatcgactatactttgaattacctgtgcctggagactgcagtatgcctttccttttacgtgctggttctggatggttcaggccactttcttgagtgttacgatgacaacaaagcaaatccctaaaattacttaaccactttgtacaagtttgaagtggacttgttgcccccactattttgttcctcatccatttgggattagatttgtgatgattatcaaaccagatcctagaaattcagctcatagttcaaagtggcccaagaaagtgtaatccacaaatctctgaggatctaggatttctggtgtgtactcatccatggtacatccacatgtgtcattgttaagttttcctaagtctggtgtttggtattccaggtgttgacatgtcatcaggctgcccttcattataactcaaaacaaggaacctatttctgtacctcactcccatctgttgaagacacttaggaaaggatatccttcagtcttaaatcattgttcaatttgttctttttctatttctttctttcatggaatatcttttcatttatatttttaaacatttatttcaacaatgttttatacatttcagagtatagtttcgtacttcttttgtcaaatttatttctattttattctttttagtgctattgtaatagagttgtttcagttttatttttgaaacatttatttccagtgtacagtaatgcagttgagttttgtgtattgatgttgtatcttgcaaccttgcagaacttgttaattctaatagtcttcaatggataatttaggattttacatgtattatatattaaatatattttttcataatgtatattttataatatacatgaaatgcgtgagtgttgccatctacaaatagagatggttttacttctctcattccaacatggatgctttttcttttcttttcttgtctgattctggctggaacctctggtacaaatgttgaatagaagtggcaagatcagatttccttgtcctagtctgatcttacgcggaacgtaacaagtatttcaccattaaatatgatattatctatgagttttttgtagaggccctttattatgctgaggaagttcccttctactcctagttttttagtgtttttattatgaaacttgttcttttctgtgtatattgagatgctcatatggtttttgtcctttattctgttgatatggtgtattacaatgattgatttacatatcctcaaattccttggattaatcccactgggtcgtggtatataatcttttttatatattgttggatttggtttgctagtattttgttgaagatttttgcttttatatttacatagaatattgtctgtagttttcttttcttttgatatctttgtatgattttggtatcagtgtaattgtgacctcatagagtgactggagaagtgttctttcctcttattattttggaaaagtttgtgaaaaattggtattgttatttaaatgtttggtagaatttaccagtaaagccatctgggcctgggcctttctttgtggatagtttctctatccctaagtgaatccctttacctactataaattagtaattagaaaataattactcattaattggaaaatccaattttctaattactctagagtcactgttggtaatttctatctttctagaaacttgtccatttcatatgtctgatttgttggtaaacttgttcacttcatgttcagagtattacttcattatcctctttatttctgtaaagtcagtaataatgctccctctttcattgttgatgttagtataaataatttgagtcttctcttttttatagaggtggggtcagtctagctaaaggtttgccaactttatctgccagagaaccaccttttgattttgttgatttttctcttacttttctattttctattttattagtaccttctctgatcattattatttgcttctttctgattgcattaggtcaagttagcactttttccagagtcttaaggctttttatccttaattgttatgataaaaagtcagctgttgacagttgtctttttgtctttaatgtttttactgtgatatgtctacatttggatatctttgcatttttactacttaaactttgttaaacttcttggaggtataaattaatagtgtttcatcaagtttggaagttttctgctgtttctctgaatatcttttactgttcttttcctcctcttcctctggtatttcctttattgcgtatttttggtgtgcttaatggtgtcccacatttccctgaagctttgttcacatttcttcattcttttttatttttttcctctgcttttcaaattgtatactctctatagatctatcaccagaaattcactgatcctttcttttgcgagttccaatctactcttgattatctccagggaattttttatttcaattattgtactttctatctccagaatttctacttggttctttttatagtttgtcttctcattgatgatattctcactttgacgagacattgtcagtaaaccttgttttttcagcatggcttcctttaggttttgggacatactcataatgactgctttgaggtatttgtctgttaaggctggtcctgagttctctctaaggacatttctgttgcttgctttttttcctgtgtactatggacacactttctgtttcttcacatatcatagtttttttgttgaaaactctacattaaaataagatactgcagcaccttttgatactgcccacaccccagggtcttgatactattgtttaattattttgtttagtgccttggctggacgatcttagtgaagtctgtttcttctgcagtggaaagcctttcatgctgccccccagaggcacagtcttgaacatgtgcccagttaacctgggatgacagtggttttaacagtgctctcttttactgttcttgtccctgatctgttaagctgttggcttctgttagtatcacacccatctgttaggcctcactaatttctgactgatttcttaattgtttttttacaatgccctggggtataaattgctccatagtctgatccagttaaatccaggaccctttgcaggataaatttttggggccagcctttgagcctctgactccaaaaagacttcttagctgtctctttctctaaactaactggccatggcttagctgaatgccctcataaagctaccagcctccttttaattgcctaccatcaaaatctccatttccaaagcactttcagatttgaacttccctactttatctattttaaataaagtcagttcctttggaaagagtttcagaggtctttcttcttatgggcctgcctttctctttgggtaaaatctctgagccactcctctggactgaaggcggagacaatggtctatcttggagtgacactgctgctttataaataggatgcagggtagggctgatcacctctagtcttcttggcttgcctctcctctgaaatatctgtgtctccagcttaaactgagtcacagacccatatttgctattgcttgcgtaaacaaagctctctgtctcgcagaaaccttgcatatgacatgtcttacattgaacctgctgtcatcccctggttttctctctgtattccttatgtcagatagggtcattagcatttacccagttatccaagctaaaaacctcacagtaattcctgacacttctcactcctccaccataacagatctgtcaccaaatcttgttattcgacctctgaaatgtcacactaatgcataccctcctcttcagtatgatgctaatttagccctagttgaggtctttttttctttcttagaccatgtagcagtcatccttccagtatcacacagccttcagagtttattttttcctacattcttctcagttaaagaatttttgaaagtgctaacataaaatattttcatggatttcctgttagtatataataaagcccacatttcttaacttgatatagaaggccctttatgaaggattataccccattaatatttctgaaccctagattgtaagtgaggataatatgcattatgggagttgtgaggttttgatggcatgatatatgtcaagtgcttacccagtgtctgaaacactgagtgctcgataactgttagctgttatcatcattattattatcttttctctctcataactgaaaatgtcttcagcctccccatccctaacacatacacaactccagccacagtaaactgattttttgttttttcccaaatacaccttcgcttttcaccccatagctttgtacttggtgccatcgctgcctggatttcccactggagtgcatcatggttgtaactgaggattgagagtgagtccccctctcagaatccctcattacacttactgtgtacatctagcattcagtatttctgtatttgtcactgttcttgccttaacagactgtgagttcattaaggccagtggtcatgttttatttgcctttgtatccctagatctctactaattaagatggataaagcctcgtagcacttgcccaggaaatttttgtttaatgtacatttatttttattgctagtctttgtattctttttcattatatggttttgcactgagcattgattttttttttacgctttacactttaattttaattcaaaataaagttttatctaatctgccagtttcccccatatgccaataggtatttctttcttcccttttttttttttttttttttttttttgagatggagtttcgctcttgttgctcaggctggagtgcagtggcacgatcttgactcaccacagcctctgcctcccaggttcaagtgaatctcctgcctcagcctcccgagtagctgggattacaggtgcctgccaccacacccagctaatttttgtatttttagtagagacagggtctagccatgttggcaaggctggtcttgaactcctgaccttgggtgatccacccgcctcagcctcccaaagtgctgggattacaggcatgagctaccgcgcccagccagtatttctatattttaacaaaagtttgaccctgtttattaaatgttgtaaaaggtctctgatgtcatggaaatagttccatgatagttatgtagctgcctctttgtgcagaataggtgtgctctaattcagaggtctccttaatcatatttattacctacatggctcatttccttctgacttttagaaatagtaggctattggacagtgaaaaagaaaatgattcttgggactgggtgtttaccctcttttaatgaggattatcttgggttatagtgagtaataaaactatattcaaggaagagcaagaagagttctgagagaagaaaatagattgaacatatattaatactattttcactgaataattgcagaataatctgcaaattatgaagacacacaagcaccctcagaaaggcactggaatgcctttctaactttgacaaagtgagagggagggaaaacttaaccctcatttaggtatgaatctcaatatctttaactgattttacaaaaggagaaactatattcaaattatagcataataattaaagagaatttatagatcatagatcaaaatcacaaaatggtcaagctgtttattagaaggagtttgaaaaagagagaatagctcaaaaaagtacctcttttaaaggtctttcattaattgccccaaacgaatataaatatttgaataattgtggttctggttgaagaaaaatgcccatgatccaaagattggccattcaattttaatatggtgatatatttcctttattcatcaaggtagactttttgttgacttgtttttgttgttgcatttttcctctttatgcttaacatgagaaaattaccctcttcagattttggagcagctatggaagaaataaagttaattctattaaagagtaaggagaagcttttctatcaactaagtggcagcattgtgtcaaagccgtaagcttacagtgggttgtggtagtgtgaatgacaagctagccctggcagtcttctgttgctccacttcctgtgtagacaaaacgtgattacttcctaagctcagttaccatctgaccctgcaaggaaggatgccagcactgtttttgtcagtaacctgcctttgttctccatcagttacagaatcacaaggtctatcactgcctggagaaaagtttacaatgttctaaaaagctcttattgcgttacagaaaagttgtctgatgaagaaaatcctaattatacttttgaaagtaaatggcttgctgtccttttcaaaagtttttcaagcttttaaaagccagttttaaagctagtacagactgtgtgtgttctttcttaattgtaacttgaaaaagaagtcctttccttttttagaaaattaattttctcgtctccttacctgaaaatctgtaacattaggttttctctgttcacatcatattatgtttctctgaacttaagatgctatcctcacaagttaaacatttggaaaaattacatatgatgaaggcttttctgagtattgggtcaaataacaattatggaaatagatcagagcaaactcaagagcactctgtacttggaaggaaaaaatgcattccaaaaattctgcattactggttaagaaattgatgagtaacctctttgtttctcatacaagccactgatcagtaaagtagaaattttactatttattgttcatgtatttgttactgctaatattaggaacaaaaaagagatgaatttattttttagatttcagcatttatcattaagaatttattgaacatgtgccatgtgccaaacactttgctagatgctcagtgttttccttgttctaaaattaaattttaaaaaatcgtattaactggaggtaaatggatagaattcgaaataaaatatgtgtcccttggggacataaacctgtgtaatcacttatgcattactatatatacttgatattacaatgtgagcattagagttgatgttttcacttcccagtacataaaactttttcgattatagaggtgtaaactcttgttttacagttttcatttaagagaataagctgtggaattttgaggaacaggttggctatttttatgattcaattatctttgttcgctttgcacttgctgtggcttccatgatttatgccaacagtcttggttttgtcttcagcagaaacaccaggggaagttctcatgacatctctcaccatcagtatggctaacatctgttaaaacagagttgatatgaaattggatagtttttctttttaatacttgatctgggtatggctctgatctcaaattgttaaaacaataaaactacattttatatgatttatgttttttctgattataagaataatacatgcttgttgtataatgtgtggaaagtgctgatcattagtgggaaattgttgaattcatatctaagtaatatgatagctttcctttaatgagcacctactatgttaaggctctttccatgaaatgatttcactgaattagtgtcaagcagctagtaaatgattgcactgagatttaaacccaggtctgcctcattcctacatatgtggtctttgtactgtagtctatagtacatccgtagatgtatgctcctacatctgtagtcttcatctgtagtctatacaatattggcttcctggttataaattataacaagtgaataatcacaaacacacatcctttttctttatgttgctgtgttgctttggatatagcatctaacctctgaggtcttctatttccttaggggtcaattgagtataataattacacctacttcactgtacagagttaatgaatcatttttcacagagtggttagaacagggcctgatgcatgtatcttttaattgtttcctaatgtttttattattacaaataatcataattcctttcatttaaaaaatcattttatcatttctcattcatgaattcgtgacatacttacaaacacatttaccagaaagcctgaatacattaaaaattcttaagtagactagaaggaaaaatgtttaagtgaaaagatatgagaaaaacagcctaaaagcatgtaaaagagaaaaacaaattcaaataagaagaaacagctaaataatttctataaagacaaaaattccaaataaaatttgatcaaaagtattttgtgggctgtcagatacttcttaatggttaggaatccaaactaaatttgtaacaagtttaattgccattattgacttcgatctagcatgactgcatagaaatattcatttctaacaaacttgtcttaatttgcttcttagaactggccagttagaatggcaatcattaaaaagtcaggaaacaacaggtgctggagaggatgtggagaataggaacacttttacactgttggtgggactgtaaactagttcaaccattgtggaagtcagtgcggcgattcctcagggatctagaactagaaataccatttgacccagccatcccattactgggtatatacccaaaggactataaatcatgctgctataaagacacacgtgcacgtttgtttattgtggcactattcacaatagcaaagacttggaaccaacccaaatgtccaacaatgatagattggattaagaaaatgtggcacatatacaccatggaataccatgcagccataaaaaatgatgagttcatgtcctttgtagggacatggatgaaattggaaatcatcattctcagtaaactatcgcaaggacaaaaaatcaaacaccacatgttctcactcatagatgggaattaacaatgagaacacactgacacaggaaggggaacatcacactctggggactgttgtggggtggggggaagggggagggatagcattaggagatatacctaatgctaaatgacgagttaatgggcacagcacaccagcatggcacatgtatgcatatgtaactaagctgcacattgtgcacatgtaccctaaaacttaaagtacaataataataaaaaaattaaaaaaaagaaataaaatcaaagaagcacagaaaaaaaagaactggcattttgccttatctaaaaggtagaacttgaaattttattaagctgagacctccagtcatgctaaactctaccataagatacacgatagattgaaacttacggacaattcatggttgatatatagtcactggcaaaagggtggcagctgacaaaaactgctagcacagcaagccttagtcccttacaccctggcagttggaccagaagatttagtgtttcagtgaatgccagcttaaaattcatttttgtaatagattcttgagtctgggttcattgaagcgtgaactcccaaggttttatcctggcaacaaaagatacgtggaaaatgaaatagtcataaatatgactgaaacatttattaaattgccagtaggaaagtaaggaccctagcttagtatatgtgttctttatgacttcaataaaatatcatttttataactcctatgactttttatgtgttggctaaatttaagtctacattctgtttacatgaactgtgtatctgagtttatctgaaattggtttttgtgataaatcaagaaatctcctttaatgatctctaaatttagggacataaggggttatgatgtaatgtgaaatatatagtttatatgtcatatggatgctcaaatttggaaattttacatttgttataagaagttattgtgctggataattttttcttatcattgggttttctttgcataggcatgtttgtgtattaaaatttataaagtacttaatgtattattttaaattaaataaagtgaaacattcattgattcttcaaatttactaagaagctctcatctgctagtcactgtgctaggtaatagagaaaccaccataaccacatttaaaatcctttctatatgtacttacggtctttttgggaaaatttaaaacaaatatattttaaaaatgtgtattgtgataagtgcccaaagaaaacagagaggtttttgagatactgatttaaaggtatttccagtgattgtgtaagaaatttcactctaaagagagaccctttaatctgagaccttgtattagtcagtatggcctaggttatgctatcataacaaccaaccgtaaaaatctctgtggcttgttttacttaataaacaaaggttaatttcagttcatcttacataactaagtgtccagtgtaagttggcaggggaactttggtcatcatagttactaagggacttggaatgaaggaggctctatctcaacacatgcctccatggctaccaaagcaaagagccggatggtgacttgcacattggtccttaaacactttggcctggaagtgacacttctgtgttttcatatcattggccataaaaagtcacatgttgtggccatacctaattttaaagggggcagatacgtacatttttctatgtgcctgaaaagagaggaaaattggatattgggaacagcactaatgacttgtacaggcctgaggaatgagaagaaactagccattctaagagttgcatgagttcatgtcctttgtagggacatggatgaagttggaaaccatcattctgagcaaactatcacaaggacagaaaaccaaacactgcagttctctctcataggtgggaattaaacaatgagaacacttggacacaggaaggggaacatcacacacctgtcatgaggtggggggatgggggagggatggcattagtagaaatacctaatgtaaacggcgagttaatgggtgcagcaaaccaacatggcacatgtatacatatgtaacaaacctgcacactgtgcacatgtaccctagaactgaaagtataatttaaaaaaaaagagttgcaggaatagagttcttgtaagaagtctactcggtaaggggccctgcataggaaaaggttctgaggtaggaaagaagtgagtgtgttttgaagacatacaagaacaacagtggaactagagtgttgtgaacaataattttgtatacagctaaatattgattaggtgagacattattttgaatatttttctgtcttccatttaaatattaatatggtaatggtgactaatatgctggaaatattttgattagttgtcaatggggttatctttatagattgtggaagtttgtcatattgtgttccatttatgatatgggggtacagtggcatgggatgtcattatatacttattctttaaagggctctcatttaatgttaaggcgtctgcatttataagaagaactgtgttttgtttcttctaagatttgacgggtttatgatagtactaagaagaaaaagaggtctaaggagtaaaaattgcagggtaaaaaactatagggcagataacaacattctgaacatacttttatatatgggcattaatgagatatgtctgatttttttgcagttaaactctgagaaatgcctccaaataaatcctgtacttaaatgataagtttgatttagtcctggaaaataggacagaattccctgtgatcactcagttgtttagaagcactgtgttcttaattaagaaagggatcttttaaagtgtaatattttggatagctttaaaagtctggaatataataaaggccacttcaagaagtcctttatgtgcctaccactcaaattgaataaaaactttgaaaactattgcttcagatcacttcttgcccttcctcccttcctcttttaaaaagagtaaagctttagagataaaacagaaatccctatattcttttcaattcctccttttccagagtgtaaccgccctcatgaactcataatgtatttagtacatgcttatacatttactgtatccggtatttccataaatattatatatcattgttttatatttttaaggaacataaatgctatcagtctccatgtattatgcaacttgctgttttcattcaacattgagtttgagatcttcccttgttcaaacatattaggactaatttattcatttttaactactgtcaaaattctattgcataattgattctattgcataaatgtacagcaatttgcatattcattctttcactaatagacatttagattatttttcatttttcacaataaaaaaatactactatgaatatctttttaaatgtttccttctgcaggccaggcatggtggctcatgcctgtaatctcagcactttagtaggccaaaataggaggattgcttgagcccaggagttggagaccaacctgggcaacatggcaagaccctgtctctacaaaaaataaaaaattagctgtgcatggtgtcttgcacctgtagtcccagctacttgggaggctgaggtaggaggatcacttgagcccaggaagttgaggctgcagtgatccctgttcgttgcattgcactcaggcctaggcaacagagccaaaccctgtctcaaaaaaaaaaaagtttccttgtgcatttatgcaagagtttcttttaactaaacatctagaattgaatgtgccaggttatatgcgtatgtatcttcaacttactaggtattgtctgattgctctcccagtcacatgcccgtgggtgtgatcgtattgtcactgaaactcagtgttgttgggttgagtagttgggctacggagtgcacaagagcctggactctgagtctcagccctgttgccaccgaatagtgcattgaccttgggctttaccatacctttcatacctctctctgtgtctcactttcctccactgtgaacagagggtaaaaatagtcatgtcttataaggttttcttgagaactacatgacataaaatatataaagagcctagactagtgcttgccacattttttggcctgtcaggtaggtatccaatgaaacctcattgttgttttaattttgtttctctgaagatgagtttgcacatcttttcacatacttaccaaccatttgtattctcttctgtgtctgtaaatatatttttctgtttttctaaaggtgtttgtctttcttgttgatttgcatgcttccttgtgtatgattggcattaattatttatggcaaatatatatatttctttctatgattcagctatctgctcttagactgttgctggcctttgcagttttagttaaggtgattttcttatacaaaacattttagctttaactaattccctttttactaatctcttctattatgacttttgctcagaagcaaatatttaatttctaagtacgtgaaaataatatccttcatctaatgcataagtaataacttagaaggacttggttatcaatattactgagagagatatgaatgagaataaatgtactcaagtatggataatttgtgaaaaatagctataattctatgaaaatctgttagaaaatggaagggaattctgcattaaataattggtttttctctcatttctgtctcttgcccattccatatgtaattcgctttctggaagtatattaggcagcccaatccatcatagacttccatcacatatgtggtggaaaatgttacaacacagcactgaagtcagacaccagagtgggattgatatgcggttaagtagtctctactggcaaccagatttgtctactctataaagaggattatgcttttgaagagaattgctatatactttaacattttttccagctattatcgcttaaaatgttttaagaaccattgatttatatgaaatatgaaaattccttgacatgccaccccccacccctgattgccaaccagacaactcattttcaatacttgaaatacttttatgggttcaaagtcattacattttacgtgtcctgaatatttcattaaggctttaacatagaattagtgaaaattcagaacttgaaaatgggcagactttaagctttcctgagtctgctgccccaaatctaacagtttgctttgggactgtcagcctcttgcaagatttaaaaaaaaaaaactcagccaacctcaggtagttttccaaaaggctgtctgtgattttcagctggtatggtttctctccgtaacttgttggatgtcacttctcataaagtgctttttattcatatcaaccctaaatcagtgtggcccatctaattccttgttcatatattttattgagctgttatttatttttataatttcaacttttattttagattcagggggtacatgtgcaggtttgttaccagggtatattgcaagatgctgaggtttgggatatgattgatcctgtcatccaggtactgagcgtggtacccaatagttagtttttcaacccttcttcccttcctccctcatctattagtccctggtgtctattgttcccatctttatatccatgtgtagccaatgtttagctcccacttgtaaatgagaacatgtggtatttggctttctgtttcttcattaattcacttaggataatggcctccagcttcctttttatggctgtgtagtatttcatgatgtatatgtaccatattttctttatccaattcagcattgatggccacctaggttgattccatgtctgttattgtgagtagcactgtcatgaccttgttcgtatattttaaaaaccttgtggctggtctcacatcttggtaagttagtatgaatgagaccagaacaatttttcacattataatgatgataaaaaaatctttactagaataagtagttatacctttgtaagggttaagcctcatttaaacatattaacttaatatttgcaggtgacatggaaaagattaaaaaatgggactctagtggagaatattaatatagcaattctaaattgatattaatatatcaattttaaaactctaatctaaatgcagacacacatgcaaaaaatgatagctccccataaactccacctcctacccacaagtgaacaaactgaaagaattaaattcgtattgcgaataatgtgtcacctgtatcagttaagggtcttggttgcaaaaaagacaaaacccaaatctgcctcattgaactaaaaataataaaagaatgcattgggtagatcattgaatcttcaggcagtctggagaaacaagcttagagaataggtgagagtgaggggaagttgccagcagtaaacaacagctagctagtccctgcttggccctttactgccttcatcgtcctcttgctgggcgggggaaatttccaaatgtgtgtctttgcatcagtttctcccaccaagactcagacaaagtaaacatcctcccaataggaagaaggcttgaatgcagaacagaaccggtaatatccacattttctctccatagctcatcatatattttgactatggtttttatgagctctatatatccatttttgttgagagttcagctttagaaaaggaagcaatattgaaaacaatgttagaacaatcctatggatctcagctatttagacttcccagaaattgaagtagagcctttctagtaagtaacagtttagtttgcccccaaaatgtataattacatatggaacccacagtataagatttgctattttctgtctctatatgaaggcgtgcattctgtaattacctaagaatgggaagaatctgcttaccgagcagaaacacgataggtacaactattctatatcaaaaatgataaatgtgaaatgtgtgagatttatagaaactcaagtaaagtgttttttttccactaaaaattttctagtatttttttgtaaataattagggacagaagatataaatagataatacaaataataagaatcatatttctctaatttttggaggctgtttaaacagagacacatactcaacctagcaaacatctggttggaaatttaaaattttagttgagcatcagaatgtttttctgtatctggaatgttagcggagtttggaaacatgtggacactcaactggggtttctttggatgtttatcattaggcattcagagcctctcccataagttcacatactgacaaacttgtactctgtgccataatcccttcctacctgggcctcctctcagtggcatgacgcatagtctcctggcaaaaagttagaggctgcaggtagataatctgaaaaacagataatatcacggctgatcagaaattgatgacagcacttttgttgccaggtcggaacagtactgctggaataaaggctaacagtcatgaatcaaaaggggtcttttacagaccacagaactggataaatgctatgcttttgtatttgtccattgtacttcctggtgaggtaaaaagggatttttttttttccctgagtaaaaattatgtgggtctggtatttctctttgctgaataatttatttctggctgcacagtattaattttcaggctgtgaaacctggctttgattccaaacagatctttgggaaatagggagcttgaataatagagaaaataactccgtgaggaagtatattacttcttggaaggatcctgctatccatttaagtggtttcttgcagctttcatatccaagaaagttttatccatatgtaattaggaggatcaaagccacagtgaggtttatgtagacttttctgcctctctcatctttagtcttgcgatatcactgtcatgacataatgaaataacgcataggaaagtgttttggaaaaccagagagttcttcaaaatgttagtttattaatggccacaataatcacagctaaccggtgctgaggatttatttctttatttatttatttgagaaggagtctcgctctgtcgcccaggctggcgacaatcttggctcactgcaatggcgcaatcttggctcactgcaacctctgcctcccgggttcaagccattctcccacctcagcctcccgagtagctggaattacacacacccgccctcatgcccagctaatttttgtatttttgtaaaagccagtcattgtgctcattacttgagagttttatctcatgatattcacacatctacatcatacactataagtaaagctcccctgttatatccatactacaaatgaggaaactgacttagcctattcaagaccataggcgtgtagctggtgaagctagaattctggctgtgaatccagagctgtctgactgcagccctgtgcttttagtcagtatgctaagtgcatatgtctataatggcagagacacaaaatatgacaccttacctgttgagattcctagatagaagataaactgcttgaaagttttaataccatgtggagtaaacatagatgcttcacctcattattatatatataaaatatataatatatatattctctctgtgaatactatgtataatatatatgtatatagagaggatatatatattatatatatggagagaatatatatattatatatagagaatatatatattatatatacatagaatatgtgtgtgtgtgtgtgtgtatatacatatatatatatatatatatatatatatgagagagagagagagagagagagagagagagagagagagagagagacaaggagacaaggtcttgttctgttgcccaggctagaatgcagtggcatgaacatagctcactgcagccttgaacttctcgcctcaagcaatcctctcacttcagcttcctaagtaattggcatgacaggcacattctaccatgcccagttaattttttaatattttgtacagatggagtcttgccgtgttgcccaggttgactttgaactccttgcctgaggctatcctcctgttgcagcatcccaaagcactgggatttcagacatgagccaccaggtctagaccattagtagcttttaagaagaaatttatgtgaatctttatcatgtcttttcacctggttcagccatttattagatttgtagtcttaggcaagttaccttatctcactgtgcttgagtttcctcatctctaaagtgggcataaggatagtacttatttcatagtgtcatgatgattaaaaaagtaaaaatatgtaatgtatttagagtagtgatataatattactatatacgtacatatatgtgtgtatatacatatgtatatgcatacacacgtgtcactatttcctctaccctgcattgctgataaaggcctacacaggaatataagaccacgtgctttttatcaccacttataagacgtgagattttaggttctatgtgacctttggtataaagaagaacaatgcaaaaaaacaaaggaactttgggactgtaattgcgtacaaatagtttcaatactattatccatttaagcaatagtttggcaactgctaagaaagtttgagtgttacggtcatgtcacaagattctaaagttctccaaggtacttatggtagtagtgatgtcatctggaggaaagccagttacacaaaatatattgttttattaaatctatttcaggcagccatgtttgaggataatgacaagggatcccatatactgataaagttagataagtgtttgccaaagtgtgttgcatcccacacttgtcttcaggaatgctatcgaataaaactattttatgagcaaataaattttgaaggctgcctactatagcctcctcttggcagttaagaatgcacaagagtacattaagggcccctgaaagtcatgtagtttcacccaattctgtcttttttcaacttgtaatatatttgaccacagaatcctgttttggcatagttctcctagtgttctgtagaactgatagtccattgaccacattttgggaaatactgagttagaccatatttctggatctaaactcagcaggtgcattttgtcctgaaaagaccttgacatatcagattcatcagttgtaggcatttaattaccattttatgttgtgtgctacaggagaattagtcaagagccctaagcagttatgtcaactcgttttgacttggggccagttgctgaaactttctggattttatttcctcatctgttaatcacataatcagatcaaacagtttctaagatggttcatgtttaaaggttaccaaaagaaaaaaataacaatacatttctgaaaatgcttttatacatgcctcatctagggtgagctggatgacttttaaaaagctgacagcaaagcccaatgcctacccagcactgcagattatattggaacttttttgaacaattagagtttaccttccataggtagtgtgtgtctggcttcttagacacttggccagtattgtctgaagtccaacagcaccactgcaacctccctcagcgttgcaaaaatacttactcatagttcatccactcagagaagagaagctaaatgccgataagatttgaagtggcttgggctgtaatgccgtggagtacctactgaaagagaatttccatagctgagaagtacttgcacacaagaagtgaaaagtctgaatcgaggaaaacattcagcaatctcagatgtcgtggttctatttagaggttatatcaaagtggccagtgaagcattgaataaaccaggctaatttatcaactgaataaaacggttacagtcttaaaacaagggaagggataaattagtacagaaaaaggcatttcattcagtgcaagcactattgatcaaacatggataaactccccccagccccctcgcaccatgatgatcagtgccactgagagatggcagagtgagatggttaagagcatggattttggtgtcagatacacttgtacttcagactcggggtctgttgtgcatcatcagtgtgactttgaacaattttatttaacctgtctaagcctactgtcatcatttgtggaggaaagctattcatgctgaccaaatacggttattgtacagattaagtaaaatgatggctataaagtactacgcaaacttcatggttgtgtagttgtgttttatatatatataacataataataataaaagaagtcattatagcagattcttgtctctaaaacttttatctttaagtgttttatggtgctagccaactcgtaattccaggatgcctttgaattttattgcagtttatatcagaatctacccagtttcaaacataactccttaaagaatcattacctctacaccaaatgctgtgatattccccatttctctgtggtactgggagacaactactccaatatgcattgaaagaactttctgggatgatggaaatgctctttgtgccgtccaggacagtagccactaagcacatgtggcccttgagcacttgacatgtggctagtgtgactgggaaactgaatgtttactttatggaatttaaattttaagtttaaatttagaaaaccacatgtggctagtggctactgttttggatcacacagctatacatgatttaaaaaaacccacattggtgtaagattttaaaactgctaaaattgtcaatttcatgccacagattctgcagttaaaaagctgttattgatgctttttgaaaagagaccacagggtgttcttttctggtggtaagtcatcaatcacattagttaaaagctttctatgcatagactgtggaaagtttcccactttcacactgtggaagacaaaatcttctgtagaaacctcacggagctattgaatctcattgtaataatggtgtgctgtgactaaggacttgatcccctgcgaagctgaaggttccatgaaaacagaagtagaatatacattctctgtttatatggtacaaagctgtaaacctgtctattaagacacgctttttgattatgttcttatttattttttttttgtctacttgctctgtcaaatttgacttgtatttctaaaagtttttgctctttttatttcactatattttttagttagataaatcttatatcctcttaatggattttagttttaatccttataatactctttttttgactcagtttaatacttttggaattaccttttggaattccattctgatattgattattactacttctactttcttttgtattttctttggtttttctttgccgttctgtttattttctactcattttattttgatggttttaatatagacaggatagggctgagttttgttattttagtcagatctattgatgacttcattgtttgattaaaatctaagcttattcatatttattgtgatttcagtatattttattcccatcattttaagtatataaagcattatattttgtggttttccttttgtcatttttattatcattttggtttaatcaattatacttcagttatctattttcaccacctttctttaattaagaaattctgtgtccttcattgaactaatggtcacctttttatctttcaccattattttgaaacacctgtacctctgtcacaacttttgcgtaatgtctaaattgtacaaaatgtcaccccaagacattttacttattcactcatcctggtcccaaattgagattgtaggaataatttactagcgagtcttcatatggcagatacttttgctatctctcagttcctgttgttatcatttcaggctattattaagttttatcttatcacatggctcttttgtttcaagaatcctttctcagaagtgtagcctgtgaatgctatttcactgtactttaactctcaggaaacacaggagaaaacgaatgctagcctatttaatctcctttgtaggtagactgttctttctggaaatggaaggatttttctctttttcttttattttcagagttcagaaattcagagatctcatgaagctttttcgttgagtatatcttttttattatcattatttctgtctaggatgccatgagccattctaacctgaaagtgtgaagttatttttcatttaaacttaggatattttttccaattacatctttattacttctgtacttgttttttaaatcttagtttggaattcatattacttacattccagtttctaggctctatgttgtgacctgtttattctcactgacttccagacaactaatttagcttgaagcagtgaccatccctttttttgcacttctgttgagtctaaatattgaaaggattcactctcctgaactaaagagagactttagtcttttaatttttgtctgtgacatgaattttctcactaccaatactagtaagttatatgggtttccctgacaataacacattttcaggctgtataaaataaggtcatttttattttgcaaagcaggtaacacagtactaggacccttctgttgagatgagaccgggggatgtctttgctcttgcgcctctcctggtgctaatgtataaaagacaggcatggtataaggttctaattccaggagccaggaatggttcacctccttacagaccactaccaccaccaccactgggccatcagtgccagcagggtcacttgattatcactgttcttcatgcagcaaataactgggaaagagcttcccctgtgcatttcaaatggatttattgatagatgctacctgtgtcctcttagaatgtcctacggtctaatggttttctaacttttcagcatttccctagaattctcaagtaacgacaaccccagtaatgaatcacatggcatttgctggcttggagaatctcagcacagttgcttagatgttgtattggaagttacatgccaggacagaatcatagagagaggtttttgttttcccattacacattagtttcctcggaaaggtgttatttactaagtttgattgactcagtagcatgtatttggctgcttacatcactcaggaggcattgatttgggcagaaatttcagtaggaaaatactacatggaatccatgggctctgtcagcaaagtgtgtgtaacattttcatggcagccaccataatccagtcttgtgaccatattatttttggaccaaagatgcattagatctgttcaagcaccttgtttctattggttctatttctgactttattgataatggataaatgttttctgagtacgtgtcacttttccctgaaatatattcaggcctacttaacgatagtacagattttcctaagatactataaaatgtggtacttttaaatttgacttgcttatgatccatcttttgtgttaatcatttatatctctggcccccttattaactcatgtcaaaatattttcatctctttaactttcttcttcaaaagtgacgatatccttctgcttaactaatcttactagtttttaatcttcagcaatttttgttgtccttaaagtaagttaattggttttgctcttgggagagtgcacttttagggttataggctgtgaatttgaggaccacatctttgatggccttcacccgtatgaaacgtgacatcaaagatagcaattttgtttgcatcactggccagcacctaattatcgttacggcctcttcattcttaaaatgccctttgatgtcagcagtagccttgtgctttgaaagactgcagagaaaggtgaaagcagtcctttggccaagcccacattccactgaaatattacatgatggtattaggttgaaataaaatgcaaggcaactgtggtaattaaagtaattactcatttatttgcagaaacgaaagtctttaatgtttctctcaatgcacagagataatttctccctggtgtaacacggctagatggagactcatctttgggagaaaccagaagaaaagcaaacctgggcatggtaattgggagttaggaaattatacataggaggcaggaggaggcatctgtggggttgtgacagtactcattagcacggtgaaggcaaagttaccaaaagctgagaatgtagaaaacccatgtgttggggtgaaggaacatagtgtaggggtaaaagcacacaagcacttggagtgaaatggatctcaaaggtgaatctcactttcacttgtctttagctctgtgattcaccatgtattacttaatctgtgacttttaatttatttgtaaaaatggcaaaaatatttttagtacttaagataaaaagatatattaaaagggccactacaaagtaatatgtaccacattgttaatttttctagttttcaagaatggggacaatgagttgctgtcaaaattcaacaagaagatattgtttttacccattaaatgaataaaaaataaactctttgcctctactctgcattggagagagtgtgagggtacagacttccttgggcactactgatgacagtgtaaattggtgccacctatttagagagcagttctgcagtatttttcaagctggacacttgacccagcagttccagtgccaggaattagattacagaaaaacttgccaaagtatagtcagtaagtatgttgaagagtgcctatgtagcactgtgtgcacttgaaatcagttgaaaacaatataaatatccatcacgaggggcgtggtcaatgtcgcacgtgaatatttccatgccctccatggtgactctgcatccaaaaaatactcagtttatttttgtgttaaatattcaggcttgctttatttaaatatgatttcaaaagtctacttactcccggagctttttaaatatttatttttaagattgtcgtaaaacacacattgcataaaatttgctgtgttaatcattttttttttttttctgagacggagttttgctcttgttgcccaggctggagtgcaatggcgcgatctcagctcactgcaacctccccctcccgggttctagcgattctcctgcctcagcctcccgagtagctgggattatgggcatgtgccaccatgcctagctaatttcgtatttttagtagagatggggtttctccatgttggtcaggctggtctcaaactcccaacctcaggtgatctgcctgcctcgacctcccaaagtgctgagattacaagtgtgagccactgtgcccagcctgtcgtaatcatttttaagttcaggggcttgaagtacattcacattcttgtgcacccattgccctcatccatccacagaagtctttttatcttgtaaaacagaaatctccttacccctcaaacaaacagtaagccttcattttcctcccaccccaaacccctgccaaccaccattctactttctgtctttatgaatttgactactctggataccttgtgtaagtgaaatcatgcagtatttccccttttgtgactggcttatttcactcagcacaatatgcacaaagttcatccatgttgcaacatgtgtcagaattttcttcctttctaaggctgaataatagtttttggtatgtatataccgtattttgttatctattcatctgtcagtggacgcttaagttgattccatcttttgttattgcaaatagtgctgctgtgaacatgggtagataaatatctcttcaagtgcctatagtcttaacagattttagtagtcgctttaagagattttaaataatatttgtttctattttcatacctagtttatgaaataactccatgccttttgaactgttttgtttattaaatacatcagatatctttttaaagtgctttcttaggtacttcagtcgtgcaccttaaaaagtactcaactcctaaaagctaataaattaaaaactacatgtataaatactcaaacttataattttataagacctgaagcttaaatgatccaattctatatataagcctaatgacaatcatcataactctaaataagttactcaataatttatttaaaattgtggttaaaaggcagtctctcatgcattaaaaagagttttttttgtttttgtttttgtttttaaggccagtttcatggaataggccaaatgttttcaggcattacaggtacataatatttgcacagatctcttaaaataaaaatattaatttaatggctttgattctcttaaacatttttgtacttaattctaaaatttctgagattgaaagatgcttaacctcaaggaaggcaattatatcagttatttgagtttatttgatctaaagatttagacccagcatgaagtctggagctgcagacatccaaggcaaatcttactgaaatgaaggaaatgtttttattatcccatataattttgggtactgccttctttgcttgctgtgtttatatctgtgattagagattttagattctcaattataacctcatcattgaaatacatggaacctcatttataataaggacagaattgttggtcaaaaactccattactcgaaggaattagtcacctagccaggatccttagattaagttacacatattgcagaattctttattttacatgtttatgtctgtaactcccatacaagatgatcactttattagttactgagaacataaataccttcttgcctaagttgaaagaccatgcaagttgataggaaatcctacatttttaaatgtactttccaagatcaggtaattcttttctgtaccaaagtgataatgataccttatggcgttatctgacttgcagttacagcatagaaggtctctaacattgtcattccattgcacaactccagggaatgacatttacattaaagtatgtgggaagcttctaagttatgcagggcacaatctatgcagttgtacactgtaactgcattccactgacagtcacataaatgatattatagccacatgggcagctgatgtattgttgtccctctggctgtttcccttctcaagtagggcctcatggggacatctagtccattgatctcactgctttctttcatttcttaatctagcagtccttttcttacttcccgtcttgtccagcatagattccatggtctgtaatttcaaaatatgctaacattctaccctgagcttccttgccattctgtttttttcccccacatctgacagacaaaagcaaaaccctggatgaaccctaatctctgaatgagctcagctgcctagagttgctggaaaaagtcacaataaaaaccttctttcttaaccccaaaccccctaccagactcttttgtctttaccttgaggaaacttctccaaaggttgtctggttgtactcattgtcttattttctcatctccagccagttccttaactctctccaacgtggctgcaacttccatcacttcaccagaagatctcttgctaagatcaccaatcacctgcagatgcatggaaccagcctcctgcaatttggctgctcagcagcattcagtactgttgagcctcctttctacagcatgtgcttcctatgtcctgtgggagtacaatctcctgttgctctcccatctctctggctatccatttcctgtttcctcagcagactcattcccttccagcccactatcaagtgctgaaattcctcaggactgtatcctagactcgtttctcttttaactatattctctcactccaaggaattttatccacacccattgctttgaaaactacccaactcacatgactcattagtgtgcatcttcaatccatatattctaaattctgtaacacactggacgtctcctgttgggtatctaaaggcacctcagtgtaacatgttgaaaaatgaacctaaaatcctgattgtcttctattaccagtatatcaggaaatgacaccatcagccatcctcataagtgaactaaaatcctgatcctacttttggtatctcttgcttactcatcttccacattaacacattcacccgttcattttttgaattcaggaacttttattccaagctctgttcacctgtacaatttctggttccactgtatcttgtgtcttgatcatgagatttctaaaagatttcctagcatctactcttaacactttagaatacaaatataagcttgtcattccatgccagaaagaagtctctccactgacttttttttttttttttttgagacggagtcttgctgtcttgcccaggctggagcgcagtggtgcgatcttggctcactgcaagctccgcctcctgggttcacaccattctcctgcctcagcctcccaagtagctgggacaacaggcacccaccaccacacccagctaatttttttgtatttttaatagagacagggtttcacctgttagccaggatggtcttgatctcctctccagcctcatccttcaccaatctcctctcttacatgagccacacactaccctaggtgcaccttgcttccaccccttcatagggcctttggactttatgccccgttggccttttctgtttcccccaacaaactgtaaattaactctaaaaggtcaaagacattggtgctctcttctctcactttcttctgtatgtctccttcctcctctctttcttattcacttttttcccctcactgttacatctccagagcccagaacaatatctagtatatactagtcactcagtaaactcagttgtagacttaatttccaagttatacaattaagagaacactccaggttcagaacactgtatataaataattcaaaaaggtaagtgtaagagatgattaattgtgtttttatttagaaaaaagtatcacaaatctcaacatgttatgaaaagggcattttattttttccgtatggtttggattttagcaagtgtattatattttattttaagaatgtttaattttctcaacttgtattttctataaacaataatgctcaactttggttttctagcatgatttatcatctctaattgtgtaaaaaggacttgtgaaattacagcaaaattcccaagcaaatgtgtttatttaatgtaaaatgtgaacccaggttataataaaaattgtagaaaacagcaaatattaacaaagatgtggaagaactagaaccctcatacattgctgaggagaatataaaatggtgaacctattctggaaaataatttggcagtttcgtagaaagttaaatgtatatttgtcaaataacagtttcttagaaagttaaatgtatatttgtcaaataagtagttccactcttaaataactaccaagagaaatgaaaacatatatccacacaaagactttcatgcagatgttcattgcagcattatttataatatcccaaaagtaaaaacaacccagatggccacagactggttaacagatgtagtacagccatacaatggaaatttattcagcaattagaagaaatgaagtattgatccatgctactgtatggtcttgatgaacattatgctaggtgaaagaagcaagacaaaaaaagaccacgtgttatatgatttcacttatattaattgtccagagaaatcaaatttatagtcacagaaactagattagtggttgactgaggctgggacagggaatggacacaagttctttttgggtgatgaaaatgttctaaaactggattgtggtgatggttgcataattcaataaatttactaaaaaccattgaattttacacttaaaacaggcgaattatggtacgtaaattacaccttcctatagttatttgaaacaacaaaacaattagcagccaaagtttttgatgagcttgctaactgcactaattttttaatgtgaataaaaatggaaattgcataagcaaattaacacgccatgttgcacttagatattagaaaatcaaactagcaatatttgtgtttcacagcctaatttttaacaaaattttcttggtcatgtcataacgtgtaacataactgtttataggtcattagttccaacatactaagtgataagcaattttccccttttacacttagttaacacactgcaagtatccttgtgactatgaatggttagcatggtatacatcagtatttttcccacagtgcaacttttaggaagagaatgcatggccaatcacaattaattaaggtattttaaggactcttttgtccataattaaactgcaggtagagtctgggacaggatgttttaaccctatcaggaaatttaaattcttttacaatatctagtatttgttcttattttacatggtagtaattcttgaattagtagataagattgtaagtttaaattttaaagtatttagttaccaaccagaaagcaaattgtcatcatatacaaacataggttcagcatattttgtaaggagtaaaatgtaagcaaaacaaataagaaatggtcaactctattcctgccaagtggaaggttgccttaattagtgacttcaacaagaaaggtcatttgcagaggacaaacagctgtccttgtccagatattccccttctccacagagacggtactaagaggacataagtttaaggtgtagttagaagaaggaatgaatctactgtcaagttggtttatttatgaatttggttatgagggagactgtgcagatttcattctgggaatcctaaaagtgcatagaatgtgaacatgggtattcacacattgacctaaaaacaatatgtgtttttatattttttttgcaaaaaaacagacttttccccacgtattcagaacttgatataacttataattaggaatttaatgtttatttaaaatgacaaaatatttatatctgaaggacaataggatagattttaaaagtttgcaacctgacaatttgcagtataggaagtgtgtttgtttataaggttgccatatcttcacgtatactccaaagatctttttcaaaaacgagacttgcagccagcacatctgttgttcttatgcaagggattaaaatgagctatttttgttgaagttcagctgcagagtaacaatgttaaaatggcttgccaagaaattacctattctcgattttgtttcttaatattgaacttctaaactgttctttgcttctgtcggagacagcctcattcttctttaaagcaaatcgaagttttatgtggttttaaggtttttgttgttgtactgcagcacgtatatgatatctaaggcttcctagcttagcattttgaatgttaaattatatccaagtttgattttcctagaaacagtttttcataaaaattataccaacattattgactcttcctcctttaaatgttaggtagttttgttctcataaaactatgaattaaatctgtgtagctttccccttggagtagaataatatcatttatgttagaccttatcaagaaacctgagtggtattttgtattcccaagaattaataaactgtattgacataatccctgtgtgtaaggaaaaacacacaactttttcatgtatttctgttgtattttatagcaaatgagaataattgaattggtgaatcctcagaaaactgacctttctctgatttcttgtatctctcaaaacagcaacaacaacaaagctgaaattaaaatttatttagttcatgattcagttctgtttcaccgatcatcgaaaagtttcactgaaagtaaatcacagaagaaagcaggatagagcagaaatacccagggctaactttccaactgcctgcagtctatatcagcccttctgaaactccaaggtgcatattaatgcccggtcttgttaaaaaatgcagaacctgggttagtgggtcagggtagggcttgagtctgcatttctacccggccccaaagtgatgctgttgctgctggtccatagaaaccttgagaggcggggatctaaatggactgtacttaatattcatagaagaatttgcctatgtatcacacatgccatacatttactaaggcttttgttatcaccataacagagctggacaatgtacagtcacttgctagagaggagcgatcatataatactaacttacgtgtaaggaattcatgactatgtgccttattaatgagatcttcctaactaggctacccatagaactaaactgactgacacagaaacagaaatcagattcttagaactgaatatttacaggcagtttagattgcccaaatatatgtgtgatatggaaggagcatatctttattgatttgttttaattttctaaactcttgttcacctagtcagaaaagaaaatctctgctaagtaaagaggagtcattaatgctgatgccttcagggcccaggaaggaaacatcagtgaatgtactgagctgggatttagtggtgtcctggagaaaacacacttcatcccaccagtgctgtgtgacatggcaggtctagcatgaccagaacttccaatttttcaagagaagccagaaatacaaatttcatgtggaatttcccaagtttacaatgttggctactaatttaaattctgtaaaagcattattcaggccaagaaggcacatctgtatcccagacacagccctgagccacccatttacagtgtctagtgtggaatacattgaagtctcttaaggtacttctcatgaatggaaaattatgaatttttaacatgaaactctctagccttctgtctttggacactttggtcagaagaaatagtctctgttttatgcatttggaggcactggtataagattagtatatgatcataaaacctgtctttctttcttctcccacattccagattacaggacaggcccgtgtttcactcaggtcaacaaccagatgtgccaagggcagctgacaggcattgtctgcacgaagactctgtgctgtgccaccattggacgggcgtggggccatccctgtgagatgtgtccagcccagcctcagccctgccgacggggtttcatccccaacatccgcactggagcttgccaaggtgagtcagctgtctgcctgtgcacaccatcgcagacctgccacttctctttttgttggagttggagaatctggcactggatggtagcttttaacagaatactgatttccaagagtggcctcgttaacaaccctgaccagagaaggtttatcttttagccacctaatgaataattgtttcaactgttgacattaatggagaagagaaagagatgaagaattgggggaaatgtaaaaatacagtgtaaaatatttaatacaatcaaaggatgaaccactctatttttatctagatggcatgactcctcccttaactatactcatgcaaatacccaggaaaaacctattttttctctttatctcattcaagttatgagaatctgaacccaagtaacaaggagaagaaagccacctaatattggccctctatcattattaatagtgtcttcaaagacaaaatgtgaactctgtctatgattgcagttattacagactttgtaacctgggttggtcatgatctctgggttttgacactccctaactgcattcatgacactgatttctatattagggccagatcagggccctgaggatgctaccttagtagactgcaatccaagtagccaaaaattgttacctatttactgattaattattttaattaattttcagctgccgcaattcttacctttttctagcaacttctctgatatcaaatgtcttaaatccatttttagagctcggaaatggtctctctaatgacttcttaaatggcagttgccttcatattgcatagcagtaagatcacaggaaaacagaaatgatttttgtattattcacataaataatattattcatatttgagactttgagagttagggttattttctataattaaaacatgcacaaagttagatccaaagtctttcaaattgatgttagtaagctgtgtcacaagtgaagatgttatctattgggcctgtgtaaatcttacattgtagcaagcctggtcagtgtcctaaatctcaaatgagaattacagtttggggagcacatacgtaactttagttcattgaataataaaatgtgagtgttctgcataattttgtaaatgtgtccctgacagcagcatccacagatttttgttagtgttgtagttttataaaaggtatatttttaaaatggtctatttctaaaatcattttgaatccgaactacggagataccaaggggatgactatataactaaaacatttaccgactttatatttaatcacatatgaaagctcacatatgtgagctgtggacttagaatagttctttttagtgatgaacacagctcaggccttaatgatgaagactgagtcaaatgccatttttaatctattgtttactatggatagtaaaattctgtatgttttggtatgaatattagtctgaatatatagagttcctggtagtgcaacagtttcttctataggaagatattctatattatattgtatctgtctttactgtgctccatatggtctttactacatcttagtatacagattaccatgtaatttatatagtggatatagattattattaaaaataaaatactctactatattgatttactagtttaataatgactggatttactatagtactactttttgtttattcggtaccctttattaccttctaacatactaacttcatttctttgttgtttttaattctcttttgactagaatgtaagctctatgactgcagaaatctttttcacttattcactgatgtctcagacatctagaacagtgcctaatatacagtagaagctcagcaaataccttttgaattaataaatgacattaagattgaaatacttccaaaacccactatttcagagaaagaaacagttcaggttaagaaaagcctttaacttcaaccaaaacattccaaattattgacttttctcatgttctgtatttatacttatgcttttttactttcatactttgtcagaggcctagtttttttcccaaacacaattataaaaaatgtgtcatctgatctcaaactttctgaatgtcctttagggtttagtaatgtctgaaggattacttatttgatttggtttatgcatcaaagataagtttcaggctccatttgcctaaaaatctgagggattaacacagtaacaggaacaaaatgaaatttgccacatgattaaaatgtctggaaaagcacgttgaaaagttctgctttatttcaaaatcatggcatagtcagaaagttctcaattaaatactaatccgtagttcaggctattttaagacatcttactgtgatttcatttttttcctttaaattcctagactgtttcctgaatacttatgccaaattagtttggaagagatggggcatgaaaaaataatacattaaaacatggtgcatatatgtcattaaaaaaacagtgatcttttttatacgatgattgagaagtgttacagagttaaaaataaatttcaactatgtggatgataactgtaaatagcttaacactagctctaaatcatggttcttttgaagtttggaagataatgatatcctgtagctgatgaaattagttgtgaatgaaacatgcccttgtaataaacagagtagctgtggaaaatgagggacaacaggaaattaagataatacttaaagaattaagctgtgagaaaatcagtaactttattttatttatttattttgctttatttcttattaaaaaaacgaatacatgtgcagaatatgtaggtttgttacaggagtatatgtgtaccatggtggtttgccgcacctattgacctgtcctctaagttccctcccccgaccccccaacaggccctggtgtgtgttattcccctatctgtgtccacgtgttttcaatgttcaactctcacttatgagtgagaacatgtggtgtttggttttctgttcctgtgttagtttgcagaggatgatggcttccagcttcatacatgtcccagcaaaggacatgatctcattcccttttatggttgcatagtattccatggtgtatatgtaccacattttctttatccagtcttatcattgatggccatttgggttggttccatgtctttgctattgtaaatactgctgcaataaacatatgtgtgcatgtgtcttatagtacagtgatttataattcattgggtatacacccactaatgggattgctgggtcaaatggtatttctggttctagacccttgaggaatcgccatactgtcttccacaatggttgaactaatttatatttccaccaacagtgtaaaagcattcttatttctccacagcctcgccagcatctcgtttcctgactttttaataatcaccattctgaatggtgtgagatggtatctcattgtggttttgatttgcatttatctgatgatcagtgatgatgagctttttttatatgtttgttggccacataaatgccttcttttgagaagtgtctgttcatatcctttgcccactttttgatggggttgtttgtctttttcttataaatatgtttaagttccttataaattctggatattagacctttgttagatgggtagattgcaaaaattttctcccattctgtaggtttcctgttcactctaatgatagttacttttgctgtgcagaagctctttagtttaattcaatcacatttgtcaattttggcttttgttgcaattgcttttggcatttttgtcatgaagtctccccccatgcctatgtcctgaatggtattacttaggttttcttctagggttattttggttttggattttacatttaagtctttaatccatcttgatttttgtataaggtgtaaggaaggggtccagtttcaattttctgcatatggctagccagttttcccagcaccatttactaattaggagatcctttccccattgcttgtttttgtcaggtttgttgaagatcagatggttctagatgtgtggtgttatttctgaggtctctgttctgctccattggtctgtatgtttgttttggttccagtaccatgctgttttggttaccgtagccttgtagtatagtttgaagtcaggtagcgtgatgcatccagctttgttctttttgcttaggattgtcttggttatacagggccttctttgattccatatgaaatttaaaatgtttttttttctaattctgtgaagaatgtcaatggcagttcaatgggaatagcattgaatctataaattactttggatagtatggccattttcatgatattgattcttcctatgcatgaggactgaatgtttttccattgtttgtgtcctctcttatttccttgagcagtgttttgtagttcttctttaagaggcctttcacatccctcgtaagttgtattcctaggtattttattctctttgtagcaattgtgaatgggagttctctcacgatttgactctctgtttgtctattattgatgggagttcactcatgatttgactctctgtttgtctattattggtgcataggaatgcttatgatttttgcacaccgattttgtatcctgagactgctgaaattgcttatcagcttcaggagattttgggctgagatgatgcggttttctaaatatacaatcatgtcatctgcaaacagatacaatttgacttcatctcttcctatttaaataccctttatttctttctcttgcctgattgccctggtcagaacttccaatactatgttgaataggagtggtgagagaggggatccttgtcttgtgccggttttcaaagggaatgcttccagcttttgcccattcactatgatattgcctgtgggtttgccataaatagctcttattattttgagatatgttccatcaatacctggtttactgagaatttttaacatgaacggatgttgacttttatagaaagtattttctgcatctattgagataatcatgtggtttttgtctttggttctgtttatgtgatggattacgtttattgatttgtgtatgttgaacaattgaaccagccttgcatcctggggacgaagctgacttgatggtggtggataagttttttgatgtgcttctggattcagtttgccagtattttattgaagattttcacaatttgttgttgttgttgttttagcaagttttttgttgttgttgttgttgtgtctctgccaggttttgatatcaggatgattctggcttcataaaatgagttagggaggagtcccttcttttcaattgtttgaaatagtttccagaaggaatggaaccagctcctctttgtgtttcttgtagaattcagctgtgaatccgtctggtcctgaggtttttttggttggtaggctattaattactgcctcaatttcagagcttgttagtggtctatttaggggttcaacttgttcctggtttagtcttggtagggtgtatgtgtccaggaatttatccatttctactagatttctagtttatttatgtggggtgtttatagtattctctgatggtagtttgtatttctgtggggtcagtggtgatgtcccctttatcattttttattgtgtctatttgattcttctcttcattcttctttattagtctagctagcagtctatcagtttcattaatttttttcaaaacaccagctcttggattcatttatttttttttggagagtttttcttgtctctaactccttcaattcttctctgatcttaggtatttcttgtcttctgctagcttttggattagtttgctcttgcctctctaactcttttaattgtgatgttagggtgtcgatttgagatctttatagctttctgatgtgggcatttagtgctataaatttccttcttaacactgctttagctgtgtcccagagattctggtacgttgtctctttgatcttattagtttcaaagaacttcttgatttccgccttactttcagtatttacccaggagtcattcaggagcaggttgttcagtttccacaaaattgtctggttttgactgagtttcttaatcctgagttctaatttgattgcattgtggtctgagagactgttatgatttcagttcttttgcatttgctgaggagtgttttacttccagttatgtggtcaattttagaataagtggcactgagaagaatgtatattctgttgatttggggcagagagttctgtaggcatctagtaggtccacttgatccagagctgagttcaagtactgaatatttttgttaatttcctgtctcatttatccgtctagtactgacagtggggtgttaaagtctcccactattattgtgtggaagtctaagtctctttataggcctctaataacttgttttatgaatctgggtgcttttatgaattcaacagaagagttagctcttcttgttgaattgttccctttaccattacgtaatgcccttgtttgtcttttttgatctttgctggtttaaaatctgttttgtcagagactaggattgcaacccctgcatttttttgctttccttttgcttggtaaatattcctccatccctttattttgagcctgtgtgtgtctttgcatgtaagacgggtttccttagtacagcacacgcacaccgatgggtcttgacagcttatccagtttgccaataagtgtcttttaattggggcatttagcccatttacatttaaggttagtattgtcacatgtgaatttgatccggttatcataatgctatttggttattttgcacactagttcatgcagtttcttcatagtgttattggtctttatattttgttttttgttttttttttttgcagtgtctggtactggtttttcctttccatatttagtgcttctttcatgagctcttgaggaacaggcctggtggtaatgaaatccctcagcatttgcttttctggaaaatattttatttcccctttgcttatgaagcttagcttggctggatgtgaaattctgtgttgagaattcttttcttgaagaatgttgaatattggaccccagtcttttctggcttgtagagtttctgctgagaggtccactgttagtctgatgtgcttccctttgaaggtgacctgacctttctatctggctgcccttaacagtttttccttcatttcaaccttgaagaatctgatgattatgtgtcttggggttgatcttctcatggagtatcttaatcgtgttctctgtatttcctgaatttgcctgttggcctgtcttgctaggttggggaagttcttctggataatatccagaaatatgttttccagcttgtttccattctccctgtctcctcctggtactccagtcaatcgtaggttaggtcattttatgaagtctcatgtttcctggaagctttgttcattccttttcattcttttttctctattcttgtctgcatatcttatttcagtaaggtggtcttaagactctgatatcctttcttccacttggtcgatttggctgttgatacttgtgtatgcttcatgaagttctcatgctgtgtttttcagctcccttaggtcgtttatgttcccctctaaactggttattctagttagcaattcctctcaccatttatcaaagttcttagcttctttgcattggcttagaacatgctcccttagctcatcatagttttttgttacccattttgtgaagcctacttctgtcaattcatccatctgatccttcgtttagctctgcacccttgatggagagatgttgcagtcatttggagaagaggcactctggccttttgtgtttttaggattttttcattgattctttctcatctttgtgtgtttgtctagtttctgtctttgcagctgctgacccttggatggggtttttatgggggcctttttattgctgttgatgctgttgttgtcactttctgcttgtttgtctttcttttagtagtcaggaccttcttctgtagggctgctgcagtttgctgggggttcacttcaggccttattcatctgattcgcccccatgactagagatgtcactcaaggagactagagagccgcagagatgggtgcctgctccttctgggacctctcacctctaggggcaccaatctaatgccagtaggatctctcctctataaggagtctgacaaccgcttttggagggtctcacccagttgggtggcactgggagcaggatccgtttaatgaagcagtttgtcctttggtggagagagtgtgttttgctggggggaaacccactcggccgggctgcccagattcctcagaactaccaggaggagaggctaagtctgctgatcccgagactgcagccacccctccccctaggggctcaggcccagggagatccaaattctgtctctgagcctctggctggagttatcggagatcctgcaggaaggccccacccactgaggaaggatgggtcagggttagacctgaagaggcactctggcctcagactgccacagccagtgtgttgggctgtgaggacaagtcttgggaccaagccatccaacctccctggctccagcaggggaaaagcacagccgggagctatagaaatggatgcagcccttccccgtgcccagagagcttagtgtgttcagcagttgcttttttttttttttttttttttttttttttttttgttgctaaccctcccccaaggagctcaaaaggcttagagagcagacagcagcagctggagctggtcgccacaacccccggggggctccataggcttaagcagattcctgctcagaggctgtaataatctgtacgttccagggttgagatggtagtcccctgtggcttgggtttgagagtgggatcctccgattcgtgggttgcacagttccctggaaaaaacagtttactaggctgggtatcacactcactcatgacctcccttagctgcggggagggggtttcccatccccgtgtggctctcaagtgggccgtggcaccacactactcatccttctctctgtggatcacgccagccttctagtcaactttgatgaaagaacctggatacattggttgccagtgaaggattcacactctttgtttttttttgatgggagcctctgagagacgctgcttctagtcggccatcttggccccacattttactttaaactgttgccatgctaacattctggacttaagtagtgtcagaaaggtgtgccctcctagcgtggtatgaaatcagtcatatcaattcttgatggctttaatattgagagccatttgagttttagccgttgtgcttaatccacatttaatctactttcttccattttattatacattaaaggaccaaagttaactcatataggacttaaaatttaagctatcataaaacaagtgaattaaaaatgttaatagtgtcattaagcccttttccaataatatttgtgaactttaaatatataacaaattgccatgtgcatatgatgtataattttcttacaaagtttcttctttttttgtctttagtctcatgaacctactctaattaggagtgacattttgtttaagattagtacttggctttggatcttttaggttttcaaatgaacagggtgctcctaaaatttttttaaatatattaaaattaaactggcataattattaatttttgtaccatgtgatatttagggattaggcttttaaactacttcaaatgcttcaaaactgaaggtatagcagaagaaaattgtttgtgaaatttcatctcttgcttcatcattgatgataataacattgatgccaagcctctgctcctttccaggtaatgtgaaatgcacaggaattcacatatttgacacaggccctagctaggacacaggataaggtcatgaataaagaaatagcaatacagaccctaaattggtttctgcaaaacaaatgctggtgtgtgttcttttcatatggcgttagtgcaccagaaacataatttctttagtctgactgcatgtgagagagtagaggactttaatctcagctgaaatcaggcagatgttgctagctcctcaattgttgaatgagcagaagacgccctgagtagaaagttatttccaagccttccacatagccaagtaaaaagtaaacttggctattatctgatttatttgattagaataaattattaaagatagttacagccaaaacaaattcatcttggctgcctacattaaccaagttaacgagatcattataaagtctaactttaattcatgctgtattaacacaagttattcctaaacaattaaaaaactttaaagcaaactcaattatagaaactcctatttaaagataacagaatattcctcttcttctaaccccacaaaaaactaacatgaaaatgaataatagagaacaacacatcattctaaaacaaaatcctggaacaaaaccagtgatgagcacatgtagctgttgggaagtcactgggacagggagagttttctaagcatttactctgagtgtcataatcctgaaaggtgtttgaacctactaagagcagagagctaggattgtggatgttctattggagaggaggagatgttcccataagagacagatctacttcagaacctcacagtaacagagggtaatggaaggagaaacttggggggggggcaagccatttctgagtattctactcccagtcttccatcccagagacactccttgagtgaggtacaggagggtggaaggacaaagaggaagtatggaccactagcaagtaatctgtaaatataagagtcacaccaccaactgacagttgaaaattgatgctcaagggaaaaaaaagttgggggaggagtttggtgacaaactgtttcaggactatgccttgtggaagtttcaaaccaacacgtttcctttgagccttccccactctgcatttcagcaggaaatggctgcattgagagatgaataataaagagaaaggcctgcatataaaaactgaaaaaaaagaaaaccaacaacaaaaaaagaaaacataagtaaaaggcgggtatgaacatgcttcaaagaattactacccaaataaatgcaaagtttatatacttctctcttatctcaaggaaattaaaaacaacatttttaatggaaatttaaagcaatgatgctttgtggagcatcagttataggaaggccagagtggatgccaagaagccagttataaagtttctgcagtagtccaggtgctatatgatggaggctgagaccgggtagtagcagaggaaagatttgagatattcttggaaagtaagcagttgttgctgatgaagtgatgtgacataagtgagaggaacatgccaagtttctctcttaggcttctgactttaacagctggaacacgatggtgacatttgtgaagataagatcgagatagaaccatgctctgttcttgttattacaatttcagggtcctgcagatatcaagttaccaatatatacttgttttgatgatcattttaacatttgaattttgtgtatcatacatgagtagatattcattctggatcaaaccatattaaatgattgctaggacaccccatatgtttcagattccaaatagaaatagacctattatttagttgctgcccttaaagttagacatttgttttcataggaataaaatattatgtgtgaatatctacagagtatagaaataagaatttctgtttactaatggaaataataagcactggggactccaaaagtagggaggctgagaggagggatgaggactgaaaaattacctattgagtacctactgagttttcactatttggataatgggttaactagaagcccaaaccttaccattatgcaatatattcacataacaaacccgcacctgtatccccgaaaccataaaaattgaaaagaaaaagcaagttcaatgtaaaaaaattaaaattagaaatggatctaatttggtaacaagaaaagttaaaaaacacgctatgaaatatagtagtaatttctatgtcccctggttgctacacatataaattaaatgaaccatttttatatgcctataatactgcacatattttccatatttggacatgaactaaaaataatatatcatctaataataatttatgtaataaaataagtttaattttttagaacaagtttacacggagaatttggagaataaatgaggttataaactagaattattgttgctttgttacattatttttaaccttaatagacatggactgacgttattgcataaggtataaatttcaaaatatataattgtgttctataaaattgttacatgtgatttggaataattcaaaatttaaagaaatagtaagtttttgcctgaatcgaaggaatgagcaaagataacatctgtacagtctggtcattggagaattaatcaatcattagtagttgcttgtgataggactttgcagatgtagaaattcttgcatagtttgaaggcttgaggcatgcttttttatatttataaagagcacatcttggtccaaagtggttattttttggttatttctatataatttcttttaaattttcttttttattttaactgctaacttgatctaactaaaagaaattaattctacataactgcagagcctaggagacttcaaaaataagggtttcgttcttctaaaaaaatactttttaggcagttacagaataaatcctatgatgctggattgtttttctttttgaaaaatcactgaatctactataatccgtatgcagcatacaattttatgaataatgttaaggttttatagacttggtctcatttttcagcttttaccatattttttctctgatttatctgccaggaaaacaagtttctagagctcttttataccacactgtaatgagagtgggagtgtagtacatttaaaaatgaggtttaaggctgtgcgcagtggctcatgcctgtaatctcagcactttgggaggccaaggcgggtggatcacctgaggtcaggagttcgagaccagcctgaccaacatggtgaaaccctgtctctactcaaagtacaaaattagccggatgaggtgtctcatgcctgtaatcccagctactcaggaggcctgaggcaggacaatcgcttgaacccaggaggtggaggttgcagggagccgagatcgcaccattgcactccaacctgggcaacaggagcaagtataataataatttctcaaaaaataataataacaataataataatgaggtttaaaatgtgctgaattagaatgtttagtatatagacttcttgccatatattgtattcatagttgatttttgtttacatcatgtatcctttaataagacactgaaatctactttaattcagtacaaaaatactttggacttttgtaattagttcaatagatatagctaataggaggaagaaataatctgtaggcttgaattcactaatttacacactgagatatacagaacttttgagcttaccaaaaaataatagggcaaattgatatgtactgacacagagatgtgttcatgaaatattttataatgaagaaaaacaagatgcagaaaaacacatatactatggttttattctcgttaaataaacagaccatcatcctgaatatgtgtgtgaataaaagtctaaaaagacagaagcaaatttatattgatggttatttctttaattttctattttctgtatctttaacatttgttgcaatgagatatgttattttgtaattaagtatatagcattaataaatctattatgtaagcttgtaagtttgaagagagtgtaacaaatttgtgtaaattcacatttatttttatatacagtgtttattataaaaatcaactgatttttttacttgtatttccaaaagccaggttttatagtaattgattatctctatttttttgtattttatcatcattattttattgattccatttactttgggtttaatttgctcttctttttaaaatgtcttaatatggaaactgagatcattgatttaagaagcttctctttttgtactataagcattttaatgctatacatttacctctaagcaccactttagctgcatcctgcaaattttgatatggtgtatcttcattttaagttaattcaaaatatgttctatttctccatgtgattttttttctttgacctgtgcattgtttcaaagtatattgtttaaatttcagatatttgaggttgttccagattttttcctttattactttctagtttaactctgttgtgtttggagaacatattttggattattttaactttcttttacatttaatgaaccttttacatggcctcagaatatagtctttcttggtaaatattctgtgggcacttgataagaatgtgtgctctgcttaagtgaggtggagtattctataaatgtcaactaggacaagttggttgaaaatatggttcaagtctaatatatccctgatgattttcagtctacttattcttttagttaagagaagaatgtggaaatttccacatacttgcaggttatctatttctgttttcagctttatctgctgaaattacccttgctccaggagtttaatgctttataatcatgcatgcacagttagcattatcatgtcttcttgatgaattgacccctttgtcattatgcaatgtccatttttatccacacactttattacttgtcgtgatgagtactacttatagtattaacatagccattccagatttttttaattgaattcttaatatatctttttcatctctttactttttaagatgtcaaaggagttttcttgtagacagcctaaaattgagtcttgctttttaaaaatctgacaatcagactttttaatggaatttttcgtaccactgacatctcatatgattatcaattttattgtgtttaaatctgtcattttactatctcgtgtctgtctcacctattctttgttactctttttctctttgcctgactcttagattaatagtgtatattcttgtattgcagtttatctccacagttggattattagctatatctctgcttattttttagtgtttatacgtatttaacttactacattctattttcaaatagtataatattattatgccatagtttaatagtatactattatatagtatactatataattatacagtatactattatatagtatactatataattatacagtatactatatagtatactataattatacagtatactatataattatacagtatactatatagtatactatgtaattatacgtatactatatagtatactgtataattatactattatatagtataatagtataatgccacttcacttataatgtaataactttacaatggtaccatttacctcttcaatttttcatgttattgttgttatgctttttacttctatgtgttataacatccaaaatacgttattgttgttgttgcttggaaaaatcaattctgttaaggttaattaaaaaataagaaaatatattttatctctattaacatattaccattcctactgcttttcattttctgtgtgtaggttagaattttaatctcacttttattttacctgaagagcttccttttacatttaaagtccaaaaattctttattaatgcttcgtgaattttattatgtcaatactaaggatttctgttcctatgtggatgaaattaatagacaatttaaaggataggatgataatttcaatgtctaaaactgaaattttaaatttagagtaagaggacgacaattccaacaattccaatataagagtgttcaaggaatatagacaactttcacatgaggaaataaaaaagctagtaagtgtaggagctagtaattagagaaatgaaaactaaagtaataattagtattcctttacaatattagggtatttataatattacaaatattacaatatttacaatattacaatattcctttacaatacaagacaattaggatattggaggccaggcacggtggctcatggctcatgcctgtaatcccagcaatttgggaggccgaggcgggcagatcatctgaggtcaggagatcaagaccagcctgaccaacatggagaaaccccatctctactaaaaatacaaaattagccgggcgtggtggtgcatgcctgtaatcccagctactcaggaaggctgaggcaggagaatcgcttgaacctgggaggtggaggtttcagtgagtcaagatcacgccactgcacactccagcctgggcaacaagagcaaaacttggtctaaaaaaaaaaaagaaagaaaattaggatattggatagtaatatcatgtattggcaggaaagaagaaatgcaggagtcttcatgaacagtagaggtgtgtagactgctagtggtatgaagactcctgcaggcattctgaaggaccactggacactatttattcattataccctatgatctagtaattctgctctgggtctacagcaaagtgataaagaatctgagtcctcaatgtccatagtcattccacaaagaaacgtagtggagacattcactgtaccattcactgaggttttgagaagctaaagataaaccaagtgcccatgatcaggagaggaaacacattaagtgttctgcagccaactgaagcaacagattgtccacataacagtatggatgtatgggggaacccgcccccaataattcaatgttatttcacgtaggttcttttctatttccctaagtgttggccagtctgagaaataaagggaaagagtacaaaagagagaaattttaaagctgggtatccgggggagacatcacatgtcggcaggtgccgtgatgccccacaagccgcaaaaccagcaagtttttattagtgattttcaaaggggagagagtgtacgaataggctgtgggtcacagagatcacatgcttcacaaggtaataaaatattacaagacaaatggaggcagggcaagatcgcaggaccgggccgaaattaaaattgctaatgaagtttcgggcatgcattgtcattgataacatcttatcaggagacaggatttgagagcagacaaccagtctgaccaaaatttattaggcgggaatttcctcatcctggtacatagtacgcctgggagcactaagggagaccggggcttatttcatcccttatctacaactgtaaaagagagacagtcccagagcagccatttcagagacctccccctaggaacgcattctctttctcagggctgtttcttgctgagaaaacgaattcagcgatatttctcctatttgcttttgaaagaagagaaatatggctctgttccacccagctctcaggcagccagacctaatggttatctcccttattccctgaacatcgctgttatcctgttcttttttcaaggtgcctagatttcatatcgtttaaacaatttgtgccgttaacgcaatcatcacagggtcctgaggcgacctacatcctcagcttacgaagatgacaggattaagagattaaagtaaagacagacataggaaatcacaagaatattgattggggaagtgataaatgtccatgaaatcttcacaatttatgttcagagattgcagtaaagacaggcgtaagaaatgataaaagtgttaatttggggaattaataaatgtccatgaaatcttcacaatttccatgcttctgccatggcttcagccggtccctccgttcggggtccctgacttcccacaacaggatggatcttaaaaacaaaattctaaaaggaaaattaagaaacaaactaagatatataacatgataccatttacataaattaaaacatatgcatacaaaggtgttttacttctctaaccccactctcttgagaaaaactgagtttcttagaagaatgtttatataaagtttttatagtaaaaaaaagtatagatattctgaaaaccagtgtcatctgtgttcaaaatgttttcttcttgcagatgttgatgaatgccaggctatcccagggatatgccaaggaggaaactgtatcaatacagtgggctcttttgaatgcagatgccctgctggtcacaaacagagtgaaactactcagaaatgtgaaggtgagtctctctactttgggaagcatgcctaattgtgactttaatgcaagaaaaacaggacttcatttgaaattttgaagactactggtcacaattaaaactctttatctactatgaaagcataggtttaagcctagagtagttctgtgtttgtgtattgtagccttagtgggtttgatttgaaaagagtcaatgagcatttgcatctagtttgttatctcagttgtgttgcattgagaatgggagtaatccagccatttatgtttcttcttaataaagtaggtttccatttcacttataaagttatatcaaaaacgaaaattgagatagaaataagaagtccaagtgaaatacagtatcatgtgtaaatgatgtgttagtagttggcaccgtgtcatatattataaaataaaatactctaattggtatactgaatattgtttggccatcaaatttttttaaatggattattgattcaggaagggtttggaaattaccactacaaatatctcaataaagaatagcttgctcaaataaagatatcaaaaaacctaatacttttctgcaatattaaatatggattataatattgaaatgtaaattccattagcagttcttaatagaataaatttatttgttatatatatctgtgatcaaaacctgtatcatttttataaaattcaagaagtttctaagtgcatgtggcttcaatgatcatggatatttagaatagttttgatgattctagtagttttgatacaatgtttatcttttcagttatgttacttaaataaatttatttcatctaaggcagttttctaaaggcaatagagtataactgttctcattttttgtgacataagcattatcatcaagtcaaattaagtcttttgctctttctctttccaaaagtagtttattttttgttgattggttgtaaacagctgcattcctctttgtaaaaaagaaaatgggaagaggcaaaatctaaagtttaattatagaagataaacagcagtatgaactatattatttcataagagatagaatgtgggtacatatgccattgtttcaatgccagaaaccataatcttataaatccttgagacatgtattatcctgttttttttcatttgccctggttcatgtatacttagctccaaattaattgttatagttatatacattttatgtaattacaaattaatttcatgctccctctaggaagaaagtttaaaaaaacatagttgattattttaaggaccaaataaattctctgtgaaattgtttacaagaatgcccaagtgtcttatactacttaaatacactgtcgatagtcaaagtcagcctgtagtggaaaggtgaaagtaacacttggaagacatgaaaaaatatctgaattacctgaagaagcacccacattagaccaaaaactcagggatctgcagaaattctgggttgtgctgctttttcctggccgctttttgtattttttctcctggctttttgtaagttgattgtgttgctcaaacttttctcactccctttcactttttacttctggactaatatctaaactagatgtacttgggaacaaagtttgattatagatgagaaggcacagccactgactgattatagtagttgtgacatttctaatgcacatcgaacaatgtatttcttcttagttaaaaatggaatgaggcttttctatgttacatttcatcaaagcagcatacagagccaagccagacatgggagaaagacagtacaagtctttattcaccacttgcctatgttctttaggaaagagggacattgatagcacgtaggcaccacccaaagccctgaatccagtcgtgcctttctttgcttcctgcccaggcagccaaatccatttaaccattgcccagaaataattatgtgatttaatatttgggattggtggggaatagcagaattggaagaagtagtgattagaatttgaaatataaaggttttatgaaggccttacttgtgtataaggcatatttatttaaatatttcttaaaagcagctattttcaattttatttgggtaatattgtttctttatataaaagaacaagtgggccgggcgcggtggctcacgcctgtaatcccagcactttgggaggccgaggcgggtggatcttgaggtcaggagatcgagaccatcctggctaacaaggtgaaaccctgtctctactaaaaatacaaaaaattagccgggcgcggtggcgggcgcctgtagtcccagctactcgggaggctgaggcaggagaatggcgtgaacccaggaggcggagcttgcagtgagccgagatcgcgccactgcagtccgcagtccggcctgggcgacagagcgagactccgtctcaaaaaaaaaaaaaaaaaaaaaaaaaaaaagaacaagtgatatttgcttatataaaactatttaatgtaatcagtagtataatatatctggaaaaactataaacagttgctacacttagtgacaggttttgaattgtagtcagttttatggataatgtagtgtctgtaaaaatcttgccataaatgtaatgtttgctctaaataaaaatataactatagcaattacttttgatcaactatcaaaggtaaaatattttaatttattatgtgaattacagtgcaaatataaaacatagtactattggcagatttaagatgatgttcttcctgtttttacagtagcacatttcatgtttctgctcacacagcaattaaattctctttaaaaaccttttttggtctttaagttactaggtctgttcagaaataagaaaagtaagttcagtattttgggtctgagtaattaggaaaatggtggtatccttaacaagaaactgcaattagcttattaatcgttaaacattatgttattgatattttctgtgtgtatttttttgttaactatctcactccaacccttgaatgagatccttcaggacagagcctctgtctttagtgctgtatcccagagcctagaaaagtttagtaggctccaaacaaatatatgttgattaattgagagtaggatatataataagttagtttatttgacttgggctgaaggtccaaatggaaggtaaaatgtgggtccagagttaaaactgaatttggaaagaagctactggtcttcctcaaaggaatttttgcttcatcttagcattttttgttttgttaataatttgattttcctttggttgccattgagagatcaagagcatgtaaacattaaatgcagtttcaaatgtttagatcttctgtgtcatggttcctctttggtcacctgcaggtaatgcttctgatgtcaaggacctttgctttttagctaaaagaaagaaatgtcttctgctcattcactgtgatgtcttcttaacagaaatcttattctgaaaggcttattctgccaaaaaatcaagtttgagcatatatagtttttattaaaaatgttttaatgctgggggcagcattcatctcctaacttaatgtttgaaacatgtctgtcactatctatcatggaggcttatgttgtttgattctcctgcgactctttttttccctcatattcagatatagacaactaggtaagctgtaaatctgaacccaaagcagaaagaaatacatatttctcccttttcctctctctctgtgtgtgtatgtatgtatgtggtgtgtttgtgtgtgtgtgtctgttttaaggagaaccagttattatccccctttgctcaattagggtcctggatctcaaaaaaacctctcatgatgctcactgcagccatgtttatttctgctgtgccagtttggttcccaaatctaatttcctaattctgtaatacagcggataaaattattctttggtggaataaaccatttcttcacatgcaaagagaaggttgtttcagttaacttcctctgttcaaacatccattaatttaaatatccatttaatttaaatgaagaagggaaggagaacacatcaatataatatgaaatggtacactaaaagacagctcagcgtttttcttttgtacaataaagtattttcgtttgaatttcagtccatgtggataaagcacaagcaggagccagatgtccttgcgtgatcctcccttccagactataccttcgttaacattccttgagctagttattctttcctggcttacatgggaggcagaaaaagaacatcattgtattggaaagtttcccttaaatggctctttatgtggcagatagttgtttgcaatttagtttgaagagttttcagctttgttccattaacacagcattttgttgtttgagacttgtgacaacaaatatatttatttaggctcatgaaactcataaaagttgttggcacagtctcctctgctgctgttccaactctgcttagataaaccatggaaaataaactttctgtactaaactgaaaagtacttgctcttattcatattacataaagtatattaattttaaaataaataaaaataaatccattaacattctcaaggggaaaactcattaaaatggagagtgaagcaaggggattgctaacattggaaacagataagactttttgggtcataaatttaaaaaccatgaaaatcatcttagcttaatttataacactgtagttaaaacatatgtattccctctctcttgaataagaaagtcaggggtgctacactcaaacctgctttctgcccccatcacaaataatttattcctcacttaccatattgtatctgaactatttttcttgcctgactctgccagcaggatatatgtaccaaaataaaattaataaaagctgtattaattgaacattttctatagtccagacaatatttaaactactttacatgggttatcttattaaatcatcaccacagagctgtgaggttagttactattattaactcaccttagagatgaaaaaactgaggcacaaagaggccaagtaactttcttaggattatatggatgagaaacagaagagccagaatgccagtgtgctagattgactccaaagcttttgctcctagccagtgctattgagcaaacaaaggtgttggatgaccaggcggcacacatcccagcctgggactgcactgacggggaaactcatggagacagcagttgcagtaagagtgtgattctccctttgcccattgcattttgtggtagtaccctggccagaatctaccaaggctggaagtagatccagtttaaagatcctggcactggctgtagagattataagctgcgtgattggaaaaagcatcatctgtctgccctgaaaaaatgaaggcaaaaaaatacagagccttgaccttcatttctgtttcttcacttgagccttcctggttgggagaactttttatttgtatcgtcagggattgcagatgtatgacctggcagttcactggctccaacccaaatctactgcttcaggccccctccccagattgaccaatttaagcactgcactcataatagctggtttccatggagccttttaagaagttagcccatgagggctaattcctgaaaaagtaaacgtttctctccgaagtattctatgccgcctctctggctgatatgttagatattcagttaagggatttttgttatattttctgttaattaaattaaaatgtattctgtgcctaaataattcattcattatgactttagaattgtaattgcaggtcttggaaaacaaaagtaggtgtaagaaagtggaactgaactaattttatctttgttcacagaaggtagttgatatggcttggccctacgtccccacccaaatctcatgtcaaattgtaatccccaatgctggaagaggggccttgtgggaggtgattagatcatgggggcagatttcttccttgctgttctcgtgatagtgagtgagttctcatgagatctggttgtttagaagtgtgtagctcttcccccttctgtctctctttctcctgctctggccaggtgcctgcttcctgttcaccttccaccatgattgtatgtttcctgaagcttccctagccatgcttcctgtactgcctgcagaaccatgagccaataaaataaaactttttttctttatatattacccagtctcaggtagctctttataacaatgtgaaaatggattaatacaggagtcagtagcaatagtctaaagaaatagttttaaaatagccaagagtgtactttactattcctatggaaagataagacagcaaaatatttgaaagactggagaacaggacattttagatactaaaacatgttataaagcgaaaatatttaaattactatggtactagcatgtaaatagcccaatgaaacacaatagaaatttcagtaaaagttgaaattgtgccatttaaatcaataagggaaaagatcaaatatgcagtgaatcatgttgagatgacagggtattatttgaaacagataaatttggatctatgtgtcacatcttataccaggataaattttaaatgaatcaaagatacaaatattatctatacaattttgtataaaatattatgtatacaaaagaaagtgatactaaaaataatcatgagcatttttatatagtcttagacctgagaaagcatatttcagtgtgttggccacttaaaagttatagagaaatagattaataaattcagttacataaaataaaataaattacatggcaataaaagaaaaaaaaattactaaccagaaaaaaagacaaatgctaaactgggaaaagcatttgtaactcataacacacagaaagacaaatttttctagtacaaagagattccacaaatcagtaagaaaatatccaataaaatgttcaaggatatgaattgactattgatggcaagggaaataccagtgactcgcaaaaacatatttatccttatttatataagcagagtgtatttagaataagagagtgtaatataaaactgtgagacactattttttacttctaaatgttgataaaataaaaattctaatggcaaactgtattggtgagggtgttaagaaatagacactctcacaaattcctgataagagtataaaagtgccctatatagagggcaatttagaaatatctatcaaaattacaaatatccatactataatatttaatcacttagttttaattctaaaaagttgttttgtctatactcataatcaagaaatgatggattttaataaggttattccttctgtcttttttttgtaatagcaaaatatcatagacctatataggatagtggactgattcaattaaaaacatgcacacagtgggaaactgttcatccttacgaaaagatagcagacactttatatattgatataaacgtatgttgaaggtatattgttacatgacaaaggcaatttgtaaacattttcataaaaaatattaaaaagtgtgtgtgtgtatgtgtgtgtgttaatgcatagaatgtccatggaaggactagaaagtctgtggcattggatattgttgggggtgaaattgtctggcttggaaaaaggaatggagaggagatttcacattgagtgccctaacctaagtttttgactttgaaccatgtaaatgtattacttattcaaaaaatttaaaacagagagtaaggttgggggtgggaagacccatttatttggcagtttttttcttgagccctcagtgaatttccgtccagaactcttgtctccccggaacaatgtatacaaagctgttagagcctctgtcacagggcattgcaacctttatcccccagaacagtaggtacatctatggcacattatgtgctgccaagtagacaatatatgcacatctaaagcttactgaatgtgggatgaaaatatgggacctttccacttaccataaaactattacttttataaatcaataaaagtttaagagtgtcaaatgaaatgtgtttgattttaatgatcctcccattaattgctgtcagagaaaaatctcattaaaatatatttagtgacttgaagtaaaagtaaaacagacattaagggacagatcaaagatggttattacaatgaagctgattataatatgcttttggaaaaaatacaagacttaaatgggtgaatgtagccgggcacggcggcacacacatgtaatcccagcactttgggaggctaaggcaggcagatcacttgaggcccggaagtttgagaccagcctggccaacatggtgaaaccctgtctctactaaaaatacaaaaattagccagacgtggtagtatgtgcatgtggtcccagctactccggaggcttgaggcattaggatcacctaagcccaggaggcggaggttgcagttacctgggatcatgccactgcactccagcctgtagtagtcatgttatgaagaaaagagatgttgttaagtcattttgaaacaaaaagctagtaaaatcctggtcaccaactgcaaacaaactacatggcctactgaaattaagactttcaaaacagaaaaacagatcaatttctttttcttttttatgatgctttcatttatttatttcagcatttctcctgtctttctgtctgtctgtctgtctatctatctatctatctatctatctatctatctatctatacatacatactatttatctatctatttatctatctagactactctctctatatgtggtgctccccttttctctttcaggtgcataatattgtattaatcatagtatttgattcatgattcttattattattgatccatgacctacttttgctttgctattacaatgtaataagcacccatgaagccaccaaaaccaaaagctaggaccatgacaataacctgcatctacccatggtggttatgaggcccccatataaccatcactttgtataggaatctcacattttcttgttaatttttagataattttattaaatctagagatactccattcatcatcataatcattattgcagttgttaaacgttacaaaagagttttaatgctgtgtggaatttaactttttcacttcatattataatgatatgattgatctatgtaattgcatgctgctctaattcattctttagagtgggatacaatattccattatgtagctataccatagcgtgtttgtcagctttcccattgatgggcatttgtttccccatttcttttcattgtgaatagtattcaacatactttcaggtacaaagactctgtgcagtgttgtaccaggtatcttcttcaaagtagactatgaactccaccctggagcgagtcatttggattttcccaaggaatatgtctgtcctgtcttttgatctcttcattaccaaaaggtgactcattcacatttctatcacgagagatctctgtgtgagcagcttaggtcatagcaatgttagcatgctggagccttgttttggcttactgttgctgggtgcctgattgaagaacaaagagcttgatattccccgcagttagggtgagtgatctacatctccacctcagcccaggactgtgtgtctcccagccctctgtccagattggtgagggaataactgccaagggattctgccctggcttaaaggactttgtcttctgggttactttttatgtctcttccatgaggcgctggacacatcgttcagattaggaaatcatacaggagaaacgaagataccgcaaatatttccatacttttttttctttttttttttttttaagtggagccactgggtttaagaatcaaagccttttttgactttttcttatttgtgctaagcaaaaatgacatcacttagggttaccgttttcctatctttctccatataaaatagacaattacttgtaatccaatgaaagttctttgcactaaggaatctgctttttatgatacatttatgttgggaggcagagcatagagtagtttggaaatttagtgcagagtcatttggagaatatatattaacagttaaaatgtgaaatggaaatttgaagtatgtatgcttttataaactatttgggaagggcatactagcagtgatatttttagtctgatttttagaagcccatgctgtgtttcataaatggaaacgtcacatccaagaaagtgagaccagcggggaagagtgataggaactccagaggggcagccaaacagcagctcagagctgacatacgaggcaaaatgagcacttagcacctcctagcatatttatcagaagttgccaatctaaactatttgagtttcttcccacaaatggcgtgcactagtaaaacacatgtgttaagcaacttggacagcaccttgacggtgttagttaactaacagccatatttcatggggaattactgaagtgacgtcactcctttaatttcaacctaaacaaaactgtttacatggaaagttgcatgcataggtttctataaaagtctagaccagaaagagttctttatttgaggcacagtgggtaacatcattgtcataaacatgaaatctgtgaaaaaatacatattccaaaagaaaattattcagcaaaaggtaatctttggcatgtgaagacaggctttgatctggattgtgatctggagcaaagtttgaaatatccagatgacattttaactttttaaaaatctattttattttcaaacatatttatcccagtaacaagaggaaaattatagagaaaaatgacaatttaagttttcagtaaaattaaggaaataaatttggggagggaagagaacatttgggacccaaatgtccatctgtgctcctgctgcaccccatatgaattgtgtcatctcaagaaaattaatgcctgcatctttacaataggaataataatggtcttttctgcttaaggtttttatgcataacatataaagcatttgacactttgggtccttgttaaagacaaggatagcaaagaaattaattgtggaagagttctgatgtgtaatttcagtgatgacttttagtacagtttctaataaataaattcttttaaaaagctaacaaaaatcttgaaaataacacagttgacttactagagcatatatttgcctagtctgatgaaagtattaacaggcaatgaaatgaccccaagtctatcatgagatgagaaaatgtggaactagggtatccattaattcctgactggtctcagcctgtttttattcccctgctccagttccacctaaattacagcaatggagagttaagacccagagggcttgatttatttaacataagacagtggtcaggaaattgcactttgatggattcaggaaaaatttcccaaatgctgagaaccaatgttgtttccctagtgccattgtatgtttaaattctttttttaaaattatgaaaaaaaagcatggtaaagtaattcacatgattcttgcaattcagtgtctgctaaagatgactggaaaaattgagagcctccaagacatctttctcagagacataaaattagatgtgtgttaatgataggaaaacctattctaccctgaatgaaaggatcaggtgaacattttgttgaactttgccattagaggaaaaaggtatctgaaatattgcctccctttcagttactaaaaaattgctcgataaatttttattttgcttaacatataatagccatttcatagtagaatgaaaaaacaataattcaggccaaaataaaatgcaagttctataatattcatatgtatctttatattctcttgacaaaatgaggaagaaagaaggagagggacagggaagaagggtaggaggaagagagagagagagagggaacctttctccatctcacaaattaccttggctcagtgcctgaaagaaattagtctactctaaagaaatcctgctgtagtcaaataaaaatgtaacaaaacttgaaatgtaatacctagatccaagactgcagttctcgccagtgctgtcacttactgcccatatatatatatatatatatcatatatatatatacacactttattcactgccaggcattgaaaaatgtatgcaggtctggagacaaatgttatgggctgccatttcttttagatgcatccttgggagtatattatggcaggatgtaaataaacaaagctgtgataatgcttgaattgtctttctttcttaatcccagactaaatccccttatcttaatgcaaacttttcttattttaatatagtgtttctcatccatactttgcctttactggattttagtacaaataattatattttaaggataatatgaaggattctgagaattttagttctagtcacctgctgtattggtcgcaaggttaggtaaattgtttctccatgtgccagtagttgttttacctgcttccagaagacagctatttaaagagcccttattttagaagacacaaaatcaatataaataaacaaatttagttatagtatgagaaggtttcttttaatgtcatacagatactgagtgagttgctatgtttttatgtaagctttgattttcctagagggctgtggtttcatatttcacatattactgtgtattttctagtttaattataaaactatctgaggtatatttttgtcccagtctagcagcagctaacataggacaaatgaagggttgggttgcaggtttgtgccttttggtgaacggcagaggaaaatttgggcattattaaccaacagctgtatgctatcaaattaaattttgcatagcttgatttaactagccatatagctgatgctaatctgaagcgtaaacatattcttcagctataggtttcatcttccaaattctcagaaatgctaccaggactatgtgactataaatcaaagctttgcttttcccattagtaatagtgcattataataatctattatgttttattacatagaagaaaattgctttttgtattgttcttacctgttttaaggattatagtaaaaacctcttatgttgcaaaatcaatattaagtatttgaatgttataacaagtttgtaaaagagaggatcgtaaaaattatttatcttttagtactgcagtctaacttcaaacttgtatgttgaccaatattttccaatcctctgatagaggaagtaggccttcttttagaaagtggtttcccaaataagttcctgacctgccattgttgtgtaaacctcacccaaatgctctgatttccagtttcatttctttaaattggagcaaacccctaacatcttttttttaaggcatctgatatggtttggctgtgtctccacccaaatctcatcatgaattttaatccccataatctccacatgttgaaggaaggacttggtgggaggtgattggatcagggggtggtttccccactgctgttctcatgatagtgagtgagttctcatgagatctggtgattttataaggcagttttccctgctcttgctcagtctcaggcttactctcctgctgccgtgtaaaatgtgcctcttcttctgccatgattgtaagtttcctgaggtctcggtagccatacagaactacaagtaaattaaacctcttttctttatcagttacccagtctcagggagctctttatagcagtgtgaaaacagactaatacaacaccctaaatgcaggtcaaaataaaatactagttttattaaaacttttttttatcacttatgactattaaaataaaatttatttgtccacagaccacctaaagtcatcgagccagtcactaaatgcagtctttctagatccgaacactaaatgcagttcttctagatcagggcttggcaaacttttctgtgaagagccagatagtaaatattgtaggctttgcaggtcatactgtctttgtcacaaatagacagctctgccagtgtagtgcaaaatccgccatagacagtaaaaacgaatgagtgaggctgtgttccagtaaaactttacttacaaaaacaggctgtgggctgtagtttgccaactcctgttcttgatttcactattcttactctgtatttcaaatggtgtcaattttacttaattttaccactattttcttagtgactggctagttgattttaagtggcccacggacaaataggttttattttaatattaataagctataagaaaaaaatttaagaaaaaatacaaccagtgcatcaaaactatgtgtttatgaatgttattcctgaaaatattattgattatcccaaagttcatattaaatttttaaaataagtatacatgtagaaatagagagatgtaatttaaatgattcagggtatttcaataggtatggaggtgaagttttaaatgattggagtttgggacatgttattgtaagatttatcattatcatcattattattacagtagtccccttatctgcagtttcactttctacagtttcaggtacctgctgtccactacagtccaaaaatcttaatggtgaattccagaaataatccatatgttttaatgcgtgccattctcagtaaggtaataacatcttgtgctggagatgtgcctcatccatctgtccagcatatccatgctgcagacactccttgcctaggagtcactcagtagctgcctcagttatcagattcactgtcacagtatcttagcgcatgtattcaagtgacccttattttacttaataatgccccaaagtgctagagtagtgatggtaatgattcagatataccaaagagagactgtaaagtgcccccttttaaatgaaaagatgaaagctcttgacttaataaggcaaaaaagtcatatgctaaagttactaagctctacagtaagaatagatttttttatctgtgtaattgcgaagagggaagaagaaatttgtgctggttttgctgttgtacctcaaactgcaaaagttatggcgacagtacatgttaagcacttagttaaaaatggaaaaagcacgaaatttgtgggtagaagacgtgaacagaaacgtgttcctgattgacagcaatcaggttcagtaccatgcatggtttcaggcatccattgagggtcatggaacatatttcccagagaaggagagactgctgtattagaaagcgattttaattcttaaagtaagtgttgtcaaacaggaactcaggatcttattatttttgccagaaagttccaaagggaaaggaatggcccactaagataacaataaatttggctctactgtttttctttgtagatctaccttacttattcccaactatcacctcctattttttctactcttcgttatattacttctctttctaatcttctctactattgtctagactgctattaaaacctgggcattcctgaaattagaagacatgaaattctctcaacattatccaaatcatttcagttgttctatgtttatgagtttgtctacctgtacactacatgggatatgagtcagtgtggcacttgaaaagaagttcatgctattgcaatcagtattttgtgttatttatttatttatttatttatttatttatttttgagacagggtttcactctgtcgcccagactggagtgcagtggtgctggtgtgatctcggctcactgcagcctccgcctcccaggctcaagggattctcctgcctcagcctcccgagtagctgggattataggcctgtgccaccacacctggctgatttttgtatttttagtagagacagggtttcaccatgttggtcaggctggtcttgaactcctgacctcaaatgatccactcgcctcagcctcccaaagtactgagattacaagcgtaagccacctcactggcctgtattttattttttcaatatgattttgcaagagaaaacatataagcaactactgctataggcttagacataaataggttctgttttagacacgaatgtgaacaagaaagaaagtgctttaaacataatgctatgtttgaaatatgaatgtaaaacataaggaagtaagccaaatataacaaaaaagtaaagacttaaattttaaatagaacaataaatgtacaataatacaacataagagaattcttttatgttcaaaatccagaaattataaaagaaaataaatgacatattcaactacataaaagtttaaaaaaaatgaaaaatgaaaaaactactggcaaagacatcaaaaagaatgtcaaaagaaaaatgccaaagaaaaaatatttgcaagtaatatttaaggcaaatgactaaattaaaggcaaagccctagaaataggtaaagaaaatggctaacacctaacagaaaaataactaaaatattagaaggtaactcacaggaaaggaaatgcaagaataaaaaaagtgctttaaatgatatgtgaaaaaagtctcagaggttgctttcttgttttgttgaattctaagtacaacagatttgtagtgcttgaagatgttttgtaacagaaaacttgaaatttgcaaaagaaaaaagttctcatttagctttagtgaaaccatactgtaaaaatttaattgtaggcttagaaattaattcaacttaataaactcgtagcatatcatctttcacaaattaaattatcataatttttctcccacatggaatgtttttcttaatttactatgatagaagaaatatttctcataattaacaagtaaagcaaaacaggaagtatagtatcctggcattaatgtaaaatttgattatacattttaaaatatttcttctatgtcttcattttccttgtttgaaggtggaagattgttattttgatgtttttttccacaaagtataatgttacgttgtgtatagatcctttatgccagtatatataaacactatttgcaatggctagttaattacatattaatatttctacctggaatttaaaaatggtgtggatttcatgaataaaatatattctcaaatctgttcctctttaagaagataattaaaatttcatttccgatttttttaggaatactgctatactgtaaaccattgtcttcagtatttgtatagtgggtgggcagtaggagtgggaggagggagaacagaagtgacgaaaggaaggggaagactgttttgcctttagtggcccatcgctcacccccaagctgtgtaaaaagagaatccttaaggagattgaagagaacggtattggggatcttttttgaaaagtgtcatccatgaactagagtgtgggagagggagaaggtaaggagtacagcctgactcacacctggaaaggctgttctgcgtttccagagtttgaaaggcagaggacatgtgagtttcccatctgccaggtgagggcctcacagaaaacagatgagttgaattgtcctgagaggggctctgtccatgcaactacctggagggtggctgatcccagcatgaggataagctgtcaggaacctggggccaatgagagtggccaggtagaggagttattatccctagaatcatccgtgagaggtgagagaccttaggattaggaggattctcaaaacacactaggctttggacctgccacacccagatgacactgataccagaatcactcatacaaaaatatatttacggagttccgtcactgttctagaccctgggaatagagtaatgaacaaaacagatcaaaatctttgctttcataaagtctacattatagaggcaagagacagtaaacaactaaagtctgtgctatgtcagaaagaaaataaaacaggatgagagcctataaaatgctaatgtggtgtggaattttaaacaggcaaccagggaaagtcactgacatggccttatttcagcaaagatctgaaggaagtaaagtgataagccagggctgaattcctgatgggggccagcaagtgcagtgcccctgaggtagaggcacccctgaggtatctaggggacgacattaggagtccagtgtgactggagctgagcactaaggaggagattaattagtaagagatgggtttagagatgtagtccagggccaaatggggaggggccttgccagccacggtgcatactttggactttagtttgaattctcaaggatgggagctgttagagcttttcagttaagaagtataatattctgaccttcattttggaaggtttactccagctgctgggtagtaacaagataataagggaacaagtggggaagcatggagaccacttgggaggctcctgcaataatctaagtgagacttgatggtagcttggaccaggggtttttgtggtaaaagtgatgagaagtggttgaattccagatgtattatgaaggctgagccagaagaatttgttgacagatcagttgtggggtaggaaaggaaaagaattgagtaatttcaaagtttgtagaactgaaggttgaaattgccattaactgagatggagaacatctgtggggagaacatagcgaggagaaaagttatcaggaatgtttaccgaaccgaacttgggttcacctgcccaatgcaggtaagccaaacactggcatcgagattgcagcaaaagaaaatgaggcatttattgcagggtgcccagcagggaaaatcaggcagctcgtgcttcagacccggactctccaatggcttataggtaaggatttctaaaggcaggaaagcagaagttacaggcaaagtcctaagtcaatacatggagcttatacattggtttgactgaaagaggctgggtatcttgaaccaggggcttacagaccataggtagagccaaatattttccaatttgcaattgattaataaagagcagctttatttaaaattgaaatcagcagaaaagaatgttagctctggcacgtgggcatggctttctccaggtgcctcaagaagaactttagaagaaagaatggcggtcagagttcagtcctcagttccccttggtctgaggtctatgtgccagcagatccttttggtgggggtcagggtttctgaaaaacaactcagggatataatggtaaggtgctatatttagtttctatagagaacaaaaatctcattattctaacttccttggttattgttttaagctactattaccttcttgcttattaagttgctcatttacttctcaggactagctatgtgcctggactttctctcgaaggaactcaagattatcttttatttccatgcttggtggggcagtggcaggggggtgggcagaagctcaggcccctacgagggatcccacctccatctcaggagcttagttttagagggttaatttgagacatctgttagacagctagatagatatttctaattgcatatatgagtcaagttcaagggcaaggtcaaggttggcaatataaatttggaagtcttcaacttagagttggtctttaaagccatgagactggataaagtcagtcaggggaggcattttgctagagaagtccaagtgctgagccctagaacatttcaacatttagaggtgcaggagatgagaaagcaccaacaaaggagactgggaaggaaaagtcagggagattatagctccataatcaagaaagatcttcgttcctagtacctgtcctctcacgtccttactgcaaccttgaaagtgctcatagtagttgccagctagaaagaaaggactggaaagatagaagaaagaagacaccatgccccttcattactgagggcttctgagcctgggggatgctcaccctaggaagaagggaagctttaactgaatgaaagattagactgttagatttgttacattttatttatctgaaggggattggaaaacctgtgtgaactgcatgagatttcctagggtcaagaaagaactggtcaagagagaatatgcaaaacagcagtgggagaaatagttgctttctgcttgcactctagcagtttcaaatacccatttaccatatattctctcagttgacatgaaactattcaaaacactttcagcttcatgacttatcgtcctaagtctacaggcaaaagtttaacttttgcataaatcatcaaacagcaggtgctctgagtaacttaaggaaaagggaatttcaaatatgaaggttttcgaagtctcggtcaagatctctgaagtgtgtgggcgcacttgagaattgtccagatgtgtaatgtgaatgtgtctgtgctgtattagcatagttagagtgtggtcctaatgaggttcagccacagaattggtagtctccccattcagctattttgaatttgtcgttttgcatagagaatgccagtgaatggcttgttgggtttatgcaattccatcaccccactgagaacatcaaagtgtgtggtttacaggcaaagcattaggagtgacttctccctactcacaccttcacacgtacaggacctactttatgcatatacacagctaggtctatgtagttcaatgtatatgcagctactttttaaatttaaatagggtacatatgaatgtaaactgtcaagagaataagaaaatcaaccaataatgagaaaattcaactctatgaatttgaagattaacattcttcataaaaattgcacatgtatgtgtctcagtgaatgagggtaccattttcattgagtttctttctttttatgatattaagtgtgaaaaacacagaggctaatgctcatttatatgataattctatagtggaatgtagggtggatttctttttcatttggtgccatttatttagaagatacaaaataaatgatttttagatgcatcctcagagtactgataaaagatcaatacttcttaaattaatgttcttactgcattatgcaaaaatttgttttaaaatcctcaggattttatgatcacaccttcatgtactgatgcttaatgggaaaatattaaattttccctattaaatactacattccaaattctaaattcttgcagctttgccaagttcaaataagtatagtaaatttaactttggaatttcctgacttttgcattgctgaaattttagattttgcccaacattaagggagtctttcaatttaaattccctttatttaaaatgtttagggcaattgtgaaaagtgaggaaattggatgaaagaaattttctggaggacatggttttcacagcttgtcacttaattgttaaaaaatattcccctgtaaagcttagtgtcattatgttaagtcttcagtattttaaaacataaataacttgatctcacttgtcttaaaggtctatgttttaagttttaagtttgtcctaatgtgtcttaaatttggactaacaaaaggtgacaaaatacttccacttgagtaaattacctccccccgaaaaagacagagggacagagagagaaaaaaaaaaaaaggaaaaggaaaagagagaaagaaaaactactgctggcaaacagctatgccttccaagaaatatttgctttggaatgcagaccaaatattcaaactcatattgtttgactatgttatcagtaacttttatgtattttgaaacagagatagctttcagactgttataatgttaaaaagcactgtgatggagctgcctcttgccaccattattacttcatgcctgagttactgcaaattagtgtttagaaagatgcagtattgatttcaggccaaaagggaacctttcattactttgctgcagtagtagcctttcaaaaatgcaattattcagcctaagtgaacaaaaagctcttaattaaaaagttcccttagttcctattaatgataacaaagactattttcaatgtatttccttagactaataacaatagaaaagagggacaagaaagaatatatattgtactatagtaaaatcctgaaataatgcaaaaataatgatataatgtgacagaccacaggctttcatcctctgcataacccttgttgttttccatcattctaaaaaatatccttccctttctatcttctccttgggtaactgccctcgcttttccttcttgttcacatcaaactttggaattatccctaatcattctctgttttctttcttctgattaactcccgaacaccttctaatctagggattattctcaccagtcaagtgaaactaatttcatcgatgtcaccagatggaccttttgcattttttatcttactgaaacatccctgcggaacaatcatctataagcagttggctcccaaaactacaatacagctctctcttctgagttccctacctttgtctggagctgcctgccaggcacgtatactttaaacatcccacaattatctcaaactcaacatacacagactgagtcttcagctccactacacccaccccacgtataccttatcatcatttctcacgttcatcatgacagtgattggcacaattattcattctctttcccaagttataaacctgggtacaaatcacccattttatcatcaagacatttaggtggagtctaaatatatttcctaaatatattttgaattcatccactttcctgcctttgtcactaacgtctctcttctagatttctgaaacagctttccttcaggactcctatctcctacatgttccactgcaatcctttctccacactgcagcacaactacctttctagatcacaagtttggtcatgtcactttcctatgtggatctcccattctcaggataaagttcctgcctgatcattctgtttacctctccagcctaacttcttttcacacattctgattcagacacaggtagatttatttagttccttcaataaattatgctctctcttgctttgtgatatggtttggctgtgtccccacccaaatctcaccctgagttgcaataatccccatttattgtgggagggacctggtgggaggtaattgaatcatggtggtgggttttctcaagctgttcttctgatagtcaagtcttatgagatctgatggtttgataaaggggagttcccttacacatgttctcttgcctgctaccatgtaagatgtgactttgctcctcctttgtcttctgccgtaattgggaggcctccccagccatgtggaactgtgagttcactaaacctcttttctttataaattacccagtctcaggtatgtctttattagcagtgtgagaacggactaatacacctggcctttgtgaatgctcttccttctacctggagaagaatattccatttgattttcatggcctgtttatctgtttcaatttaactgtcactttcccagggaagtctttcctggcccctttctcttctgcattctctcactacctttcactatttctgctgtagaatttatctcaccatattgtcatcaggtataatctcagtctcttggccaccactgacggcttctggagaaggagtccaactagtttcagcttagctcactgtttttcaatactatttgtggtctaaagaaatatttatcttttattttgaaaccagctgcatctttttttgtttttctctttttatatgtcatctgtcagtgctatgtgtttggaaaaaaaggatagtaccaaagctttttgactggaagtcaaaatctgcatgtttaataagctgtccatgtgattcttacacacagtaaagttttgtaacatctgtactctgttttactctcttgagaagagtaaaagatatctgacatgaacttactcaacttcagttctattactacatattcattctccatttcccctgtctttgatgaagtgtcttcacatttttccagagcaaaatgttccagctctgcacattaattccatcacctttctgtactccttttaactcttgccattaattagttcattttctagttgggatctcttctctttcctgactcttcctctttacctgcaaagccatcctaaaacacattaaccataaaaccactctttcaactctttagtcacttctcactatactatttcttgctgcctttcttcactgtaaattttcccaaaagcttagtgtataccagttatctcaagtttctacttatttcttatccttttgtaaaattgcttgtgttccctagaatccctcattgcatttggtgttcttgcttattctgtttcttcttaattgtttttcctcaacatactagtttctttttgctgtcataacatgttgccacaaactttgtggcttaaaacaacagatttattgtcttacagttctagagatcagaagtcagaatggtctaaccaagcccaaatcaaggtgttggcaggattacattccttttgaagtgtctagggtacagtccatttttttgccttttcaagtttcgagaggctaccctcgttccttggcttgtggcctcttccatctttaaagccagtagtgtagcatcttcaaatctgtctctcaatctgacactctatttccttgttctactgataaggattcttgtaattacattggacagaggaccagataatctaggattatctctgcatctcaagatcagctgattaacaaccataattctctttgtcgtgcaagctcacatactgataggttctaaatatgatatcattgggtggctattattctgcctcctgctattgactttcttaaaacgtaatagcttttcagtaatactggtgactctgtttaccttttctttatcttcacttgcttcccttctttcaaatgaatatatccccttaggacttacctttaacgtttttcttctcgtgtgatctcttcattttatattattcatctcaactgattttatccacattgatggtttcaactgtctatacccatagattccaatcaccttgcaaagacttactctagacagtcaacaatttttagatattagtaactcaaattgttaatcatgaagccattaattttcccagaatatattttttactttactgattttattaatattagctcaataatgaaacttattgccatttccccttattcttgcttttactttcaggatattttttcatgtattcttttctctcccagtcccaccttcattagctggaactgagactgtgccatcatctctgctgtccctgacccatttctacgtcagccctgatcatctttatcgacataggtagaaatctttgcctaaagtgaagttctgatcactctccttgcctgcttaatgatttggtcactcctcattgcctacagtgcaaggacagattactgaaaatggcattctaggcctgtcacttaactttctagttttattgttttctaagtaaatgccctcaggtcatggaaagctgcccatttctcatccatgccttataattggctacctccatactttagctagagtattttcattgtctggaagaactcctccctcctgtcttccttgcatgccaaagttccaccccattctttaggggcctttatcaatcaataactatatctgccaagaacttttgccgattctcatggttgaattgaggtaacatgttgttaatcttctttgatggaataaattatattgtgccttgtttcacatttaggtatttggtatgtggcaaatcaaaggcctttttaattagcaattacttaatgagttcatgaatgaatagtatatgcccaatcagtatctgtttatttgatttcttaagagaagttgagagttttaaagaatgaatagcataattttcattaactattgtttctttttatttcaaacaaaatatttatttaagagatatacccatttatggccatttagttgtcatcggtaagctaaattttcaatgtgtttaaatttcagtctgattcaacccttttctataaaaaatacctttgatcaatgtatatactatagctaaagctaacatttgttttttgaagctgaaggtaaaacaatgataattcagaaatttcataactatccttgccagctttgatgtatacttttatgctgtatgggaaaaaaatcaaaagaagatcctggggattacatttgccccccttcccaaaaacaaattatctattagaggaaaaagtttttatgttaagtggctggtctggaaaagttagtatgccagatttcttgtttataataagaatgtaataagtaagatctcttccaatggctaatggttcatattaaattagaaaacctgaattcagttaaaaagaacatggaatgggaggacaaggctttcagaatggtgatataagcaccttggtagactctctcccaagtaaaataagaatttaactcatgaaatacattttttaaaaaataccaacaatataaagtctctgaaaattgaagaaaaaaatccagccccatatagaaaagactatacatcattgtcaattatcaaattaaccccatataaaaagaagtatacatcagccgggtgcggtggctcacgcctgtaatcccagcactttgggaggccaaggtgggcagatcacctgaggttgggagtttgagaccagcctgaccaacatggagaaacctcatctctactaaaaatacaaaattagccaggcatggtggcgcatgcctgtaatccaagctagtacttgggaggctgaagcaggagaatcacttgaacctgggaagcggaggttttggtgagccgagatcatgccattgcactccagcccgggcaacaagagcaaaactcttgtctcaaaacaaaaaaaattatacatcagtatcagttgagatttatctcaggaatgccagattggttcatcatctgaaaattaattgatgtaatatattatttaaataaaagacaaaagccgtgatcacctcaatatatgcaaaaaaccaaaagcatttgaaaaaaagccaatacccttgtattctaaaaataatcagaaaattaagaatagaaagaaaaaaataagaatagaaaggaacgtactcaactttatagagggcatctatgaaaaactacaactaacatcatacttaatggtgaaagaattaatgctttccctaagattgggcacaagactgatgtctactctcaccatttctcttcaacattgtactacaggttctagccaaggcaattatgcaattaggtaaataaaagttacccggactggaaaaaaagaagtaaaactatctctatttgtagatgacacgtgtttagtggacaaggtaacaactgaagtgaataaggaatacactaaagtggctatggtgtactctaaaaactattagaaccaatgaatgatttaagcaaagttgcaattgtacaagatcaatgtacaaaaatgaattttatttttatacaaagaataaatggcttaggaataaatttagcagagtaggtgatagatttgtacactgaaaactgtaaagccttgttaaattaagaatgatctaaataaacaaatatacaccatgcttacagattgaaaaacttaatattgttaagatggcagtactctccaagtcgatctgtaaatgcaacacaatccctgtcaaaaatgaagcttgcttttttgcagaaattgaagaactaatcttaaagttcatatggatgcaaaatacacatttttcgtagcagcacatagaatattctccaggatagagaccatatgttaggtcacagaacaagtctcaacaaattttttaaaaatcaaaatcataccacatatcttctcagatcacaatagaataaaacaagaaatcaataagaagagaaacattgaaaaatgtacaaataaatggaaattcaacaacatgctcctaaatgaccattgaagaatgaaatcaatgggtcaatgaagaaaggaataaggacattttaaaaatgtcttgaaacaaatgacaatggaaacgcaacataccaaaacctatgttatacaacaaaagaaatgctaagaggaaagtttgtagcaataaatacctgggtcagaaaaagtacaaagattttaagtaaaacaattaatgatgcacctcaaggaactagaaaagcaagaacaaaccaaacccaaaattagtggaaggaaagaaataaagatcagagcaaaactaagcaaaatagagactgaaaaaacaatacaaaggatcaacaaaatgaaaagttggtttttctgaaaagataaacatgattgataaaccactagttagagtaatcaataagaaggagagatgactaacaaaattagttgagatgactaactaatcaaaattagaaatgaaaagggagacataacaactgataccacagaatgcaaaagattattaaagactattataatcaggtataactaaaaaactggaaagtctagaagaaatagataaatctgtggacacatacagcctaccaagattgaatcaggaagaaattgaaaaccagaacaagccaatataagcaataagacttaatcagtaataaaacatctcccaacaaagaaaagcccaggattggatgtattcactgccaaattctaccaaaattataaagaagaactaactccaattctcctcaaactattcccaaaaattgaaaaggaaagtactgtccttaatgcattctacaaaaccagacaaggacaaaacaacaaaaaagaactacaggccaatattcctgatgaatatagacgtaaaaatccccaacaaaatagtagcaaactgaatccaacagcacatcagaaagataacacaccacaatcaaatgagatttatcccagagatacaaggatagttcaacatatgcaaatccagaagcattatacatcacatcagcagaatgaaggatgaaaaccatatgatcatctcaatagatgcaggaaaagcatttgataaaatccatcatcccttcatgaaaaatccctccacaaactatgcatagaaggaacatacctcgacattaaaaatgccatgtatgacacactcacagctgacaccatactgaatggggaaaagctgaaagcctttcctcgaagaactggaataagacgatgcctacattcaccacttatattgaacagactacagaagtcctagccagagcaatcagacaagagagaaagaaataaaaggcatacaaattagaaaagaggaaatcaaattgtctctctttgtagatgacatgatcttatatttagaaatcctaaaaattgcaccaaaacctcttagatctgataaataaattcagtaaattttcaggataaaaaaatcagtgcacaaaatcagtagcatttctatataccaataatgaagtagctaaaaaaagaactcaaaaggcaattctatttaccatcgctgcaaaaacaataataaaatacttaagaataaatttaactaaggaagtgaattcttccataaggaaaactgcaaaacacttacgaaagaaattgaaggggacacaaacaaatggaaagacattccatgcttatagatcagaagaattaatatcattaaaatgattatattacccaaaacaatctacagattcagtgcaatccctatcaaaatatgaatgtcatttttcacagaattagaaaaaacaatcctaaaattcatatagaatcaatggaggcatcacactaacctgacttcaaaaatatattacaaggctctagtaaccaaaacagcatgatacttgcataaaaacagatactagaccagtggaacaggagaacccagaaataaatcctcctatttacagattttcaccaaaggtgccaaaacaacattgaggaatggacatccttttcagtaaatggtgctgggaaaactggatatctatatgcagaagaatggaactagacccctgtctctcaccatatacaaaaattagctcaagatggattaaagacctaaacataagacccgaaaccataaaactactagaagaaggcatatgggaaacactccaggacattgtctgggcaagaattttatgactacgactcaaaagcacaggcaacaaaaacaaaaattgacaaatgggactctattaaactaaaagcttctgaacagcgaaggaaataatccacagagtgaagagtcagtcctgttaaattggataaaatgtttgcaaactatgggttcgggctcagtggctcacgcctgtaatcccaacactttgggaggctgaggcgggcagatcacctgaggtcaggagtttgagaccagcctgttcaacatggagaaaccccatctctactaaaaatacaaaattagctgggtgtgatggtacatgcctgtaatcctagctacttgggaggccgaagcaggagaattgcttgaactgggaggtagaggttgcggtgagccgagatcgccccattgcactccagcctgggcagcaagagcaaaactctgtctaaaaaaaaaaaaaaaaaagtgcaaactatggacatttctcagaagaagtcataaaaatggtcaagagatacttgaaaaaatgctcagtattactaatcatgagagacatgcaaatcaaaattacaatgagatgtcatcttattccagttaaaatcactattattaaaaagacagaaaatagcagatgctggtaaggatgtggagaaaagggaactcttatacactgttggtggtaatgtaaattagtacaaccaatatggaaaacagtatggatatttctcaaaaaattacaaataaaactgccatgtgatctggcagttccactacatagcatttattcaaaggaaattattatatcagagggacacctgcaccctcatgtttatagcagcacttttcactgtagcaaagatatggaatcaacctaagcattcgtcactggatgactggattaaaaaaatgtgatatatatacacaatgaaatactacttggttataaaaaagaataaaatactgtcaattgcagcaacgtgggtggaactggagggtatttatgttaagtgaaatgagttcagaagataaaggcaaatatttcatggtctcactcatatgtgtataaaaattgatctcatggagtgagagagtagaataagagttaccaaaggctgggaaggatgtttggccatagtggaggatgaagagaagttacttaatgtgtacaaacatacagttagacagaaggaataagttccagtgtttcataacaagagtagggtgactatagttaacaacaaggtattttatatttcaaaataactagaagagaggacttgaaatatttttaccacatagaaatgatagtcaagatgtgagggataccctaaatgccctgacttgatcattacacattctgtgcgtgtaactaaatgccatgtgtcccataaaaatgtataaatgttatattttaatgaaaaacttttttaaaaagtttacatggaaattcataggcaaatcatataacatgtgggacatatgtaaagaatttttataactcattcgttaaaaacataagtaacttaattaaaaactgggcaaaggaattgaacagatatttctccaaagacaatacgcaaacggcaaataaggacatgaaaatatgctcatcattattaatcatcaggcaaatgcaaaccaagttataatgtgataccacttcacacctacaagcaaaaaaaaaagtagataatgagtgaaggtgaggatgtggtgtgtatgaaggactccctcatatattgctagtggggatgtaaattattacagctgctttggaaaacagtttgtcagttcctcaacaagttaaacatagaattactgtatgactcagcaattccacttctaggtgtatatctaagataaatgaaaacatatgtctacacaaaatgaatacctgaatgttcatggcaactttatttataatagccaaaaaataaaaaatggaaataacccaagtattcattgactgataaatgaataaactgtggtatatccatacaatagaatattatttagcaattaaaaggaatgaagtgctgatacatgccccaacatgaatgaaccttgaaaacataaactaagtgaaagaagccagacacaaaggaccacatattttatgattctatttatatgaaatgtccagaataaacaaatatatagagacagaaatgagatcagtggttgcgtagggcttggagaggaataggaggaatgattgctaataggctggaatttccttggggggggatgaaaatgttctgaaatcaggttgtagttatggctgcacaaccttgtgactacactaaaatcatttgagttttacactttaaatgtgtgaattgtatgacatgtgaatcatgtctcagtaaagctgtttataaattgaaattctgagtacagttgatacacaccatgcttttgaaatctgaaaagaggaaagcagacatcaattttccattgcaatttgtaatattgatattgcctgttgtctttagaaaagctggaaataggcagcaaattattgcacttaacacttcaatcatgaattttcctagtgtcaaacagtatacgaataagtggaagttcagtgtatgcaaaaatatgcttacttttttctatatcaaaaagatattatacagaatattccaaatatgtatagttcttggcatcagtggaaacaaaatgttctaagaacatgtttttaaaacaaaatttcttgttttatttgtactaagcttctgtaacataattgttacatggatggctttttttctgtgacatgtacctataagaatggacagtctctctagggtgttcttagaattcattgatatctgagatcatgttatcactacttatcaaattattcattatattccgtttagtgtaagatttacaggaaatgttggttgacaaatatgaggttatgtggtttggcagtcagaaatctgtcagatggttttgtttagattggatttccttttttaaaaaacctgtgttcagagtcttcacattactgaagacttcccagtctttctctttttttgccctttgaagtcacacttgacaatccccctgttttcacagtgttcttccttagcctccgtttttcacattcttcctccttcctccatgatccttccttcccagactcctattctgcttttcttcctctgactttttcttagatgttgatagttctcatggtttcctccttcaattccagtcttttcatttgtcttctttggaaatctcatatgttgccataacttcaaaggcaatccttatacttggtgataaaccacaaatgtccatctttataatttacctctttgctaagtttcatacccaaatttttagctctgtagattagaatttttactggtttctctcaaacatcccaggatcaaaatgtccaaagctcaacttaactgtaaaacatgttcttccattcgtgttccattctttgttaatagcactatgtcatcatccttgtcaatcaaaatagtagtgtaagatatctttctggtgacaaagtccttcctgttgatttttccttcaaattatatcctgaatatatgttcccttcctcatcataaagccttacttcaagttctcaacatttatccctggactattatatcatctgtccacattaaacacaaggactatctttctaaaatattgataggcttatgtaattcttttgtttaaactccttcatagacactattcatcaccttcagaataaaagccacagtccttggcttggcttttcaggatttagcatatgcctaactagctaagcttattgtccatcagtttcccagctgttctagtacactgtgcattcttcaactgtggtgtattttcagacccagttgcccatgctgttttttgttgttgttgttgttgttgtttattagttggaagctaacttcactcgactggccacaaaaattcattcaggactccaggcctatgccaatcagaacattttcctggccagaggcatcattcagaaattagcatgtgacccaattctagaaattaggacaaaagggatgatttgctgggggcttctggaaaaagttttcttcctctcaggagagagcactggaaaagacactctcttccactaggtgtcccagtcaaaggaatagcctaaagctgctgtatccattttgctcccatcagggaaggcagctcaagtcaaaatacagaggaaggcctagttgaacatatctcacagaaactgaacaagacacattggttgaaaccacttctagacttcagatatgacagctattaaatttttgatttatatcagtttaaatcagtttttctgatatttgcagaccaaagctgcaaactgatatagtttcaaaaaagatcaaggagagatgggtggcagtatattcagtgtgcagaacatggatgaaaccaattcccattgttaagactctgctttttcccatgagcagacttgtcacctttaggcacacttgtttatacatagataatatatgctttatatttgtggatataatacttccaaatctgattatgacatacagtattgaagaactaatattcaaaagagctaaatgcatgtatccttctgaacataaatgctaatgctaaatttaaattgatggataaacattgtgatacagacaggaggcagggaaatactaggtcgaagacggggtgggggtccctggcgagggctccaccctcaagcctggacctgcgaccctaaatgagatcatgaattcctgctttcctgcccgaatgttgccttttccaaaaccaccctggcccaccatatcccctaccctgtacctataaaaaccccaagctccactggcaaaggagcagagcaccatggcaaggaaggagagaagaagcatctgaatgtcgagaggagaagaggcagctggacatcagagactacggttggagaggagttcagctggggacggtcagagaggagttccgctagggatgaccaaactccaggggaagataatcttcccactccgtccgctttccacctccccatcccactgaaagccacttccatcgctcaataaaatcctctgcatacaccatccttcaattcattcacgtgacctgattctccctggacaccagacaagaatttgaaaacactgggcatgagctttttaacatttaagccatctgcaaatggcaaagctaaaaaagcattgtttgtaacacacaccttctggggctccacaggtcaccggcaacacctagacactgccgtgggctggtacagggtttgttcctgccggcatccggaaacactcatcctggctcctgcacctgctcacctgtgtgctcccctccagcaaagggtttgagcatggcagccaagtaaacaagccacccctgtctcaagtcctgtgaggggctcgagggaactctcccatctcaattgggcaacactgtattaaaatgcaggggttttggtcagtattttggggttttgttgttgttgttttaaaaaagcaccttatttttaaatttttaaaatatggtagatgtctagcccaaaaatgaattaaaagcatttctattttttatacaaaacctgagagccttttatgtataattattttgaagctaaccttttagggttcctactcaactgtaaggagaattgtgaaacacataggttttttttgcacaataaaattgttaacagaaaaaccacaaatttaatgtcactccacatgtccttctatgtcccagatttattttatccaaaaaaagaaaatgtcaaacatcttttaattttctgttctttttattgtcaggaagagttttaagactagggcatagggaagttgtttattatgaaacgaaatgcctagaaataaaagccaatgtttaaatgaaaaagttgagtctcttaatgtttaatattttgcataaatcctgggcttcataagcaccttgataattcatataattttagatgttaagagagtgagaaggcaagttttagttcttcacttttttaatgcttgctttaccttgtatccttcttttctttcttttctttttctcttccttatccagaggtgataagtttctgtggtaattaaagtacagctgtttagtttcatctctcttttgaatccatgctcagttgtattaagatgcactgcactaagatagcaacacaggatgcaacaggacctaattttgcacacgtggttttattttgttggattaagtctgatggcagctctttgaccacattttgtatttactcctcatgtagtcaattcatgttagaattctgatctctcttgggaaattggtagatttttgatttgtacctctgtgccttcagtggctaagtgttaagcctcaaatgaagatattatttcatagaatgtctgaatctggtaactttttttataagaacatgccaagaagacacacagcgtatagttatttcatgataaagcttgtaggcaagagtgacttgccagaataaatggaaaaaaataatgaatagaccaataaaaggatgtaagaaaggcattggcaacctttttctttttaagcgtggggttaaacatattttgtgtgtttataataggaatataattatttttccttttttattggacattttaaaagaataaatgcaactgaaaagagaaaaactaaaagtcagcttattttgacttttcagtaattatctgtatgtatggcttttattgttgtttcttctagttactggcttttgctacctctgttcattaaaaaagacagccacctcccaggaatttgggtggatttttctcacaatgactcatttcctttttaaatgtattagcaattagctcccagttatccctaattgcagctttgttagacttcccacctctctctgcttactgaactagaagagaagtacattaaaagtttatataaatgactgggttttctgctttaaggaaaattttaaagaaagcagacttttcattaatgggaaaggaaatagactatttccagcattgagtatgctgaatggataaatgtagggaggtacaataggaaaactggacacttcccaaagcctcccaagtttttgccctttaccatgtttctgtattattttagattgaagttgttcccagaatgtcaaatactcccatattcaaatgtaagtacaaaaacatatcctgaagccaagtttaaaaaaaagttatttgccactcttcattgcttcaaatagtgtgaaaattagttatacattttcaaatacagttattctatattttaaaatgtaatccatgtatgtgtttttttaaaggctctagtaggataattccctagttgatgtagaatggaaactaaaacattgacatctttacttatttccaatttaaattgcatttttaaaaaagggtatagagttctgctttagttggccttgttttaactgccatgggagtttactttcatctcagttcccatagatatgtgtgagaaattctttggggcctgaaacaagagtatcttcagggttatatgatctgacctaatcaaccatgaatgctctcatactcttaaaaaaaaaatctcttttaaaagctatttaatgaaggcctttctcaatcatcttctccttcttcccttgattagacattgatgagtgcagcatcattcctgggatatgtgaaactggtgaatgttccaacaccgtgggaagctatttttgtgtttgtccacgtggatatgtaacctcaacagatggctctcgatgcatcggtaagcctcgcattttgaaggctcaatacactgggtctttataatgacaaaacagcccaaacaggtatgaagatggcaacgattataaaatattgaagaaatggctgaatgagttgtttaatgtaaacggtaccagtattgagggattgatagaccaggtactctttgcaaagacttcagtttcagaatccaactgggtttgttttatgttgtcaaagtcattttgggaataaagaaagacacaaaggcacgagaaaaattttttaaaatctgctttgggagacagaatgtagtaattaaagcttcttttgtgctatgaatcatgaatgttattaacatcttatttacttagaacttgtttattctattgaaaatagttactatacaaaaaagacacctttaattttgtgtttaaatatattcaaattaaaaccattgtatgctctcccttgtttatttagaaagatgcaatagtgctacagtcatggtgaaggtaatctgttattgagcaaggcttagacatctgtcttattgcgagcatagagattatgaagtgtcttttgatgcataatcacagcacagtgagctaccctcacatttcccttcctgagcttttaacctagtctattccaattttaagctgacaataggtaaaaagagaggaaaaaagaggcactgttatctttactggcactaaagattcatgtagtgcaggaattaggaaaattaatccaatacttaaagaatggtgttgtttggtccactagagggtggccgtttgggcagtgtctctctctccccaaaccaggcagttagtatgtcagcaaccaactgccaggatctctgtaggtcttgatgattccctgatgattctcatgtgcccaagagaactgagttgatgagatggaaatacagagtcaaggatgtaagctagaagtcgtaggccaccaataaaaggactgtggcctgaattcatttgattaaatgtactgatatatcaggtcatccagcagtgaacataagagatacaaatcctgccttcagaatgccatattgtcatcataaataacagtagaagcctactaatagcagtaatagaagaaacagtagtagtagtaaaaataatagctgtcatttaagatattacacataccgtgtgtaaggcactgggcttctccactacctcattatctcatagctgtgaggagtcaggcaagctaccatcttctctacacttcagtttcttctaataagtgtccaataaaatattcttcattattattcttattaagaggaggaggaggatatgcctgctctggacctatataaatatgtcatatggtccttctaatagccctgtgtgataagtatagttattccaaatttacaaataaaagaaatatggtttagagaggttaagtgacttgcccagtgttttgcagccaatgaatggagccaggattcaaatcctgacctctctgactccagcctcttgtgctactgtgacactgaactaccatttacccactttaaggctgtggagatcctgtggctagatgtcagggcctccagcatgactgatttcttcactgtcatgctaacagcctgctttgagaagtaagatgtctgttgggagcctcatgtcgtgtctttgaatgagaattgtttgtgttttacagatgaatcagagtttctatcttgcattaggtaaatcatttttcgtgaaatattaagtctgtataactgagcagataaactattttagggttactgttgccagttggctcactgtgtagtaagtttgattcatttaatactctaattcccccttatccacggtttcactttccatggttttgttttctgcagttcccactgtgattcaaaaatattagatggaacattccagaaataaacaattcataaattttaaattgtacatcattctgagtagcacagtgaactttcacaccagcccgtccagggtatgactcctctttttcccagcatatccatgctgtataggctccgcacccactagtcacttagtagccatctcagttatcagaccaactgacagtatcgcagtgcttatgtgcaagtgaccttattatacttcatcatggcccctgaacccaagagtattgatgctagcaattcagatatatataaaatgagaagccataaagtacttcttttaagtgaacaggtggaagttctctacttagcaaggaaaggaaagaaatcgtatgctgaggttgctaagatctatggtaagaacaagtctatccatgaaattgtgaatgaagaaaaagaatttcatgttagttttgttattgcacctcacactgcaaaagttacagccacaatgtgtgataagtgtagttaagatggaaaaggaattaaatttgtgggtggaagatatgaacagaaacgtgttcaaattgaaagcagttggattcagctccattcaaggtttcaggcatccactggagatcttaaaacgtatcccccgcagataagggagaactactttataatttggctgtcagctttctatgagagttgaaaattagtgcaactacctacatctggcttgattttcttgaactctataggaaaataatatgtttatgcacacgtgcatatgcgaacacaaaataatcagcttggaataggtatagattcaactctttaggagaaacgtcgccgtgggagtcgtcattgaacactgttgtctgggtgctgtagaacctggcttccggaaacttgtctcctagaatattgctagaagaaatatgcctggagaaggaagtgaggttattattgtgaagttctggaaataccaaatacagcacatgtattttatttggtaatcaatgtggagtaattgaaggcttttgagaacaaattgtaatgcagggttgggggcttgagaatagagagaaatgaaactagttatgaggtagaattgccaaaacaagtttcagcgttttattccccatttctaaattacttctttttatttactcacttacatttcaaaatctttctctagtcaaacaaaacttgcattcatatttttgttctgcattggaaaagaagcatgaatcctcattttattcagataagaccaacgtacctaatgatttactaaggtgggttttcttagaggagagttttgatttaccaaaaaattatgataaactctttttatctcttgcctccttatgttataaagtcctaagtctctacctgaacattcaaagccttacctaacctgtattcctgagtcatctctaaccacttgccacctcacacttgtatttccctcattgttgtacaagaccacactgccatgcctttgccagcagtaccccctctgcccgaagcatcttgtttttccccttctatgctcattaaaatccagctcaccctttaagtcccaaaataggtatcacttttccttttttgttttttaaagatggagtctagctgtgtcacccaggctggaatgcagtgtcacccaggttggaatgcagtggcaccatctcagcttgctgcaacctctgcctccttggttcaagcaattgtcccacctcagcctcctgagtaactgggattacaggcacccaccactacgctggctaatgtttgtatttttagtagagacagggttttcctgtgtgggccaggctggtctcgaactcctgacctcaggtaatccacccgccttgacctcccaaagtgctggaattaaaggcatgagccatgacctctggccagtatcgcttttctttgtagccgtttcacctaaactacattttcttcttgggcaaaattaatcagccccaccattttgaaatgaaatgaaatatgttttcatttgcttcattttagggtttactgcattgtcacaggtacttctgcgttactcactggctagactgtgggctttgttaggccctgtcttatgcagcttcatggaccctgggctttatgtaataggcatcttgcatagaagtttgtgctgagtaaatcttttctgaatgaacaggaaaaccagcaaatgaatgaatgagatgatattgaatgtaagaacttcatgttgattatagcggccttgcagcctttggcatctctttggacatgatgtcgtgccactgaattacggtcctggatgctcataaagcaagagctaacttgaggttcggaaagctaagtcctgcactaaccaggagtcccattcatttcactatcaacatcctgaacactaggaacaaaggaaggtctctagggaagggagaatggctctccagaattacaaaaccagtgttataattaagtaagcagcttaaaaatgttttgaataactatgttacatttggaataagtatgtgttttccatacatgagaaaaaattaatctaacatattaatgtgtacgagatctttgatttctaaaattctgagtctgtattttctcagattgaatttatttggttgaattatatatgttggagatatttgcacgctatttattttctaaccacatgtatgctaataaagagttggatgaacttaaagctctttttaatactaaactgcgtgttatctgcagctttattctgagagctcacatgtgctgaaagtgacatttgctgaattttgtcttaatttcttattctagttaacacagatattctgagtgtataccacatgacaaagcatcagtaaacttgatcctatttcttttgtgtgctggaaaacagtttcacatggtaggagagtttaaccaggcaatttaattataagacacgataattttccgctttcattgtatactaaatataaaagtcaaatttctgatttgtttatctatctagtgtgtttaatcatctttttatatatccaggaaagaactgttttttagcatagagcactaacatgtgccagttccaaaaaaaaaaggagttaaaacgtacctaataatatttctctaaaaagcgttttaaatagcactacttaataagccttaagtcattttggaagtaactgtcatggtcatgtccaaggaatgattaatacctaatttgcacattgttatataggcacagaagaatggctggcagccagcaataaataacgcgttggcaaagagcagtgagcaacttctgtgtgcaggataatgtgtctgctgctattgtgtacacagggtgagaaaggaccctaagcacagggacccaaaagggccagttaagttcagaaaatgggattaagcatttagaaattcttccagtaatatgatggtgccacagcatgctaaggcatttcctcaagctttccaaacgtgttagtgcacaatactgctgtggagtattcttgaaaaaacaaaacctgaaaacataatgtgaaaaaatataataccaatataaaagaaagtttgaggcagaagtgatgaccagtatatgggttttttttttcctttttcaagaaaagggcaaggtacagaattatttatgtattacacagcactctatgtaacgctggctgttgattccacatgcatgtgtgcatttgaaacaaaacacttggagaacccaaaattatttaactaaagagggaaccagaaatgaaagagtatgaggatatcagttttaattaagaaaggaagaagtgtgttagaaggagaagttttccttacagtgaggaagaagcccgtcattcactattttaaaggaagaaataaacctgggatccacagtggttccttttcattgctcctagttctatagttactcttaaacaatgtaaacatgaaagtattttaggaatagtaagaatccgcaaaatcaatcaaggggagcccaggctggaaccagaccatcaaagaggtgagtgcaggcatccagtctcaggagacaagcatgagacaatggctgctatttaccgaacacctactgtctatcactattgttctgacctgggctaatctcattggtgttttctggctgaacccttcatttcttaatgagcaaacctaattccacaggagacatttatttcaacatacaatccccaatttttgccaagttttcatcacattgtataattaaccattagttctcttaaatcaagtttacacaaaatgtcaagctatgaaacaaactctgataagtgtacctttattacgtttcaaaatagatttatattttaatcagaggagatgaattacttcctgtttctcggtgtgactgtaaatatgactccttgtaagccttgttcaggaaatgtagtaagggcgatagaaaatgattagaggaatagacttgttttcattacttaggacacattggttctacagttaaacatatagcaagcattagagggattttgtttttacaggctttcatctggctttgcccctaatgattccctgtttcaaggaatagtgtgcctggacaactcttgtttctaacaggtgcctcttttttatttcaaatatttttccacatgatacattttttaatacagtgctttctaagggccatgaaatttcatacaaaggaaagagaggtaattcccagcctctgatttgctttgaaatatgcctttttggagaccttaactgtgagatgctacaccagtgtatgtctcatcctggtaggttttggctcaagaaatgagaagtaggttgcctgcctcctttttgttactagaaaaagctaattgtagaatttatgaaaaaagttacaatttactttgcagtcctctgttgctgcctctctaccctctcacctatgacttagtttccttcagtacatgtattacaggactgaccagaggtttccaaactgtgtagaacaatggttattattagtattattttttctttgagacggaatcttgctttgtcaccaggctggagtgcagtggcgtgatatcggctcactgcaagctccacctcccgggttcaagtgattaccctgcctcagccttccaagtagctgggactacagcaacgtgccaccacgctgggctaattttttgtattttagtagagatggggtttcaccatgttggccaggatggtctctatctcctgaccttgtgatccacccacctcggcctcccaaagtgctgggattacaggtgtgagccactgtgcccagccagctattaatttttttaatttaaagacctctctttaacataaaaaatgtacttcagatcctcacattatgataatttaatattcgtgagagcatacataatgaaaatgttcttggatatttagtaataatgataaatgaatttggattttattagctatagtggcatattcataaatgtgaatcatggtagtgccaataaactgttaagtgttacattgcagtgttcaatgaaaatatgcatttgtgaacccctctcaatatcattgcatactcccaaagtctggggattggtatagaatggattcctgataagtacttgcaacattttgattgacatttatattagtctgttttctcactgctgagaaagacataccagagacttggaagaaaaagaggtttaattggacttacagttccacatggctgggaaggcctcagaatcagggcaggaggtgaaaggcacttcttacatggcagcagcaggagaaaatgaggaagaagcaaaagcagaaaccaccgataaacccatcagatcttgtgagacttagtcactaccatgagaatagcatgggaaagaccggcccccattattcagttacctccctctgggtccctcccaccacatgtgggaattctgggagatacaattcaagttgagatttgggtggggacacaaccaaaccatatcagcatttttatacatattaccttatgtataaaatgtgttactgtatttggtccatgaattgtttagaagtataggatgttttcttgtttattttgttattgatttccaacttcatttcatacattgtggtccaagaatattaccagttgataccaattcttggaaatattctggtacagtatttgcttcatggtttaacaaatgatttatttttataaatcttccctatggacttgaaaaagatgggtgttctccaattgatgggtgccagattgtagatatatccattagatcaaacaactgtactattcaaattttctttgtacctacagaattttgtctactatatctattactgaaaaagtcatgtaaatattccactgtggaggtagatttctcagtttctccatgtagtctagtaattttttattttatatagtttgatcttatgctataagtgataaatgtttaaaagtatctgccatattttcctggtgaattgaaccgttttaaaattatgtattgactctatttttttttctttatttgtggtctatttctaaatattttcttttggtttattttgtatcacaaaatatcttagtatactctggtttgttttgtatcacaaaataaaccaaaaaataaagcttctggtagcagaagctttaagtatatacctactatgtattttccctctcaatctttcctcttccttatgttttaaatgcatttcttttaaacagcctatatctattttttgttttatttttacagtctgtaaatctttgtctcttcagttgagatttaaatccatgtgtatttattatattactgatatatttgtttttatttttaccatagtccttgtgcttcctacttatcttactttttttgtatttttttctcctttcttggtttcttttagatttgttcaggatccccccgacctgctgccgtgaactcgattctctttctcctatttgttaagaagttatgtactttatttctgttgcttcagtggctatcctagctgttttaagatgcatatttaaaattacctgtatgtttgcctatatataaataataaaagaatatttaagtggttaaactttgatcttcccctcacaactttttaaaatctagtatattgccattcctatgtgtgacaacttaatcattattgtttaatatgttagtacttatttagatttacccacttatttaatattttttgctcatcatttcttcctgcatctcaaaccttccattgggatctttttcttttgcctgaagtgcctctttcaacattttgtttatcaaaaaaactcttggtagaaaactctggttttgttttcttgaaaattaccttaatttgccctctgcaaacatgatttatcacagtacagaattttaagttgacagttattttatcagagtatactaagatattatttcattgtgttctggcatccattggtgctgccaaaaagtcagcaatttatttttttaaaataccgtttctcagcaggtgatctgtcttgtttttccacctatttttaagatctttacctttgtagttctgcagtttcacagtggtatggctaattgtgtatctctgtttatttttcctactttgaatgtattggacttcttatatctgaggtcttacaacattgctagaaagttctaagttagtatccattaaatactgcttctttcccattctgcttattactcttcctagtactcttattacatgttgtattagtctgttttcatgctgctgataaagacatacccgagactgggcaatttacagaagacagagatttattggacttacagttccatatggctggggaggcctcacattcatggtgcaaggtgaaaggcacgactcacgtggtggcagaccagagaagagcttgtgcagggaaactcctgtttttaaaactatcagatctcttgagacttattcactatcacaagaacagcacaggaaagtcctgcccccgtgattcagttacctcccaccaggtccctcccacaacatgtgggaattcacgatgagatttgggtggggacacagccaaaccatatcagatgtacacaggtgtacatctaattagcttttcattctcaccttcatatttcttaacctctttttaacgtttcagtgtctttgtctctatgtgctaattgaagataatatattcatatatatctgccaactcagtaattttctttatccatgtgcaatacacttgtgtaatgtatttgtcagatactttatttcatttcatttatagaagtttgatctcttttaagtctgttcctattcattgtttatgggccttttccccttgttcatgtcttcagacttgaattgctttaaatatattaaatataatttagttattaattaatatttaattattaataatttaaaataataattgtcagaattgatctgaccatttcaatatcaaaaatatactggttacttaactagtttttgttccttagtgtgttattaatgtattttcctgttagcagctcttttttctaggaactttatgagaattttttgagactttcattaatattaggtcctctaattgtgttggctcttgtgagttgcttggagtgtctctaacctgagaacctctttacgttatattcttcctttgaagttcttcagaccaaaaacctactatgaattgaggcatcaaagctattgatgtgaggaagaccttgtggttacagattcttaagagagatcttttttttttcctccacagagcatcaaggtagagacaggcaagtttcttagttgcctccattaccttatccatatactatatccataaactaagcatatggctctttggaaccctaccttacgagggagttttctgttatgtattgggggagagtggaatctgggctttttatgtcttatgccccgggcactgtgaaactatcagagttgaaattcacagtctccggagtttaatagtagcctaaaggtgaaattagttgttcaaatacctcctaagattctcatttcacctcatttagggactctgttttatccttcatttcatgcgagctggatgatgtgtttttaaatattttttcacattttatccaggatattttaattgagaggaacattcagggtagctaattcaccatgaaagctgcaagaaatagagcatatgttgttttatttcattctcccaccaaccatgttctgtacagaagaagagttaaatacggttgaaaatcgaacaattaataatatttgaatgtaaaactaggtctcttgactcaaggctatggttttgttttttgttgtttcgttttcaaattctatattacaacctccttcttgtagaagccttgaagagataaatatattcatcctaacttgtagcactgattgtgttttataacgttagtgattattgttaagagtttggaactttcttattttaatttacatcctggccttgaggaggtagtatatgatacttcgggttcataaaatgaatattccaaaaattgtttcctgtgattattcttaggaatagaaacttagttgtgaaattattcctaatgacagcctgtccaaatccaactcaagtttttgaaatttctgcagtgcctttaattatgtgtgcatacatcacatttagtgctcggttttgggtcttactgggattttggggagaaatagaaggagttgttcgattcttatacagagtatcttaaaggtaattcatttattttatgatagcttaaaagcaatctgaggcatgctatatatgggccattagaggacataatgtgcttactttaaactctgtatccagtgctaaaaattttaactttacctgttaatggaattataagcaattaacagtttcatcttcattattgatatgcagatcctgattgctgtggtacatctttcttcttgtgatcatagacaaaacaactttgaaagcatcttgatagggttgaataatatgttgttaatgaagctcacagttttttccattggttactataaaggcagtttcagttataacccataaagtttacagatgatattgataatttatccctatgcaactttgcattttatgcagtcttttgcaatcatcataacctgtcttctagcctttatctgatcattttgatccattgtgtattctgctatcagattgacctctattacagtcatatttgatcatgtcacttccttacatcaaatcctactggataatgcacagactctttaccatagcactcctgccaaactgtgcttacctctgagtggtcaccttattttgcctctcaatatctagtttggcacagtcagttttccctagttcttgaaactgtctcatctggctctggcttagaatgacatatatacactgacaattcacagatatatatgttcagcctgactatgcttctgcattccaggctcatttattcaacattccaaatataacatgttttaaagaggagccttgtcttgtgttctctaatcccgtttcttccctcgccatccccatctcagctgtgtaagtcaaaaacttaggaaatgtctaagactctctttcttccataccccacacccaagcaagttcccattggctgtaccttcaaaacatgtctgccctctgctcagcctcatcatctccactgctgccaccctcatcaaagccaccatcatctctcacctgaatgtcttcagtgtcctcctcactggtctctgtgctctggctacagtcagttctcatcgcagccaaagagatcttcttaaaaatgtaaaccattgtcttctctcattgtaaccatccaggaaatctccaaaccctccactcgaaatccaagtgaaatcccaaggtcctttcctaatggcctataggaccatccatgatagcctctgctgtctctctgagctcatgctcctgcactttcccttccacatgctgttctctagtcatagtggcccatctttcttcacacacatgaagcacattctcttcttcctcagaagctgctctttcctcagatacttccatggctcatgccctcattttagtcagctgccttctcaaatgtcactgtttcaggttgcatctgatcaacttttataaaatcatcagtcagatgttgctgcattacagacaaccacaaaatcacagtgacatacaacagtgcgcatctccaggctgaggattgggactgggttgttgctttccttcaagcttcagaattgcctgactttagcttcttactgcagtctgtcctcctatctgctccacgtctttcattgttctgtccctggctcaatgaatgtctgagatattaagagagtgaagaaaggaatagataacagagattaagtggtatgagtcacttcacctacattcatctcatgtacagtgattgttgtaagaacctgaggtaattctgccatatcttctgtcttatttatacatgcacagatcagagaacaggcatgtgtttctcgggcctggtgaatggccgctgtgcacaagagctcccggggagaatgacgaaaatgcagtgctgctgtgagcctggccgctgctggggcatcggaaccattcctgaagcctgtcctgtcagaggttctggtacgtggctggctgttagtctcctcagcacagacactgttaggaaaattagtagcagtactgtattttgctctctgggagaccaaggcaggtggattgcttgagtccagaagttcaaaaccagcctgggcaacatggcgaaatcctgtctctacaaaaaatacaaaaattagccgggcatggtggtgcatgcctgtaatcccagatacttgtgggactgaggtgggagaatcacatgagcttgggctgtcgaggctacagccatccatgatcatgccactgcactccagcctgagtgacagagcgagaccctgtctcaaaaatatatgtatatattttgctcctgtccttgaagtcaagtcatatttgttttcctttgtgtgttttcagtatgacttgagtgtttttgtggggagtgtgatagcattgttatttaggatcagttttgataatatctaatttagtaacatcagacaaatacctgaaagctgtttgacttgtttttgtgcaagtgttgttttttaaattattttgaatgttagtatttcaattcagtttttaaacctcctgatctttcatccagagctcaaatatctatgaggaagaaaactctgtcttcatttatactttatttcaggaataccttcagcttataatgtctcagtccttgaagatatttcctctcttctcatgatcttgaaaattaatcatacaagagtatgatgatggctctcattaactacgctgtggtaactgccatataaatgatgctatattgggaaattagggttaatgagaagtagttcctcttgttacgtgtaatatgagtagtaaagtacaaattaatgtttctcacataaagatatattaatatattcaattctattatcattttctcattgaattaaaagcgtgtaaaataattaaagttttcaaatatacttacaaatatttatgccaatatgtactgttaacagaaaagatatcatgacacattaatcattcttacaaaatctctaagtcataaaataccaaaatctattagtaagacaaaaaggggcagaattaatgcctagtaaataattttggattctcccagttccactagtagtatataattaataattttttttccttctgatacagtgccttaagtctgcaaacagttaaggcaataaggcaattgctatcttcttgcttctctttactcaactttgtcacctggacaaaaaggagcagattttaaagcttacttgatattgtctaccgttaaaatccaagttagaaaaaaatatcattctggagcaatattaatacctaatctcctgaaaaaaaatggacaggaaaaatgtataggtataatgctgaagagaatgtaagtaaaaccatacagatagaatgaattagcataaagctttaacttttatctgtacaagtaaattttctgtatttataattatgtctggaattttatgagttgcacttaggtgcataaaataaaaatacacatgtaaatgattgtttatgcaactcagttaaaataatgtgacaatataggttttaaattttttctaaaacttctatatctttttcttgctactgccagcattaaaaacatgtattgagatagtaacctacttaatcatattgtgtagtataggtaacccaaagtgacttagtacagtgtaccaatggcttttgttatgcagaaagacattcacctgtgcttaatgccaactttcttttcttctagaggaatatcgcagactttgcatggatggacttccaatgggaggaattccagggagtgctggttccagacctggaggcactgggggaaatggctttgccccaagtggcaatggcaatggctatggcccaggagggacaggcttcatccccatccctggaggcaatggcttttctcctggcgttgggggagccggtgtgggggccgggggacagggacctatcatcactggactaagtaagtggtcagttttcctgtggactctttagtttcctgcctcaagtgacattataatatctaacataattttaatttttcaaaagggttgtatgaacacacttgcacatgtgtgtgtgtgtttgtgggtgcgagagagagagagacagagggaaaagtgtttcaaggtctgatacatagtaatactaaatttgggaaaatgtaataggaaaatattacttttatgttctgtaaactttctgttaaattagagaaaagaatgtgtgacccaggtcttcgcaaatacatatgagagcccagtaatactccaatccagttgacaccaccaaaaagcatgtttttggtttcaatgtatttcatttggctgtttaaagctgccctgttcatgcaccccttgaattattttccagaaccatttctccactgagataaactgaatatcttgctctgtgcagatccaaatattgtaacgtacatatctttcctttcctcacccttttttgttaaattgcttaagaaattgaaaaccgtgggcttcagaccagagttggcatttgtgtgcttgacatttaacttcattctttttaaaagccctctcttgctaataatatttaaagatgtcctacagtgttatgtttattctttttggcatattgccgatttactatatctgaatattcagcagagttacaaaggagaaacggaaagcactcaaacgtatggtagaacattcctgtaattttaaaaagacatgattaagggcagcattttcagatctgtaacttaacagatacaagttgcaaccatgtgtctcagtaatattttttagattctccacattaaagttttaataaaatataaaatatgagcttctgatatacatctaattaatttactattaaatgtcctttaaaaatcaattcagaaaagtaatgcatgttgtaatgattaaatataattgtgctttaattttccgtagcaattctgaaccagacaatagatatctgtaagcatcatgctaacctttgtttaaatggacgctgtataccaactgtctcaagctaccgatgtgaatgcaacatgggttataagcaggatgcaaatggagattgtataggtaagtttgtgattctttaataatccttcttagtttttttagtagctattagattacaggatcaaattggaatgaatatgatttttttaagtcttttgaaatacagctaatttccaaactgtctcttctgtgtgtatgctattcagtgtgcccccttaacctatgctgagctagatcactttaagaatttcctaccctttcaagtcctaaatattgtgatttctgtctctgactctccctttccattctccttagaaatgcttactcttaatataaactaaaaataaaaaggaatctatgtaacaatgaatatattttaaaaacaattcgtcaagcatgaatccatctttaaaagatgacaagacaccaatggactaaaatctgatatgtcagggcagtagttttcaaatatgtcggtctcagactcatttcaactcttaaaatcattggttatctctactttgataattacctaattagaaattaaagatgaaaatattaagacatttattgatttattcaaaaataacaacaatgaatccattgcatgttgacataagtaacatttttatgaaaaactacatttttgaaaacaatgtgtggaaacaagtgtcgttgttttacatttttgcaaacctttttaatgtctgccttaatagaagccagctggattctcatagctgcttctctatttaaggtttggtgatgttttgttttgttttgttctgttttgttgaggaatgaaaatctatcctcaagcagatacatagatggaaaagaagaggaatattgcatagactttcagataattgaggttattctttgatattccaccaaaacttacaaggagtaattcttaaagtttagttaaccatgtagaatctgaaaccatattagtacactttttgtactctgttacataaagtccattggtttgtctaatgctttgagtggattttgtaacatgcattggtcatttgaaatatattgatgcactgtattatgcacatctttccaaagttgaaatattttactatgtactatcaaaaaatcatatttgagaatatcaccatcaaactcataaaaatgccttcaaattgctgagaaacaatcaagcatacagtgttaaataatctttctgaattctgtcatttttaagcttgaatgttaacattagcatcaaatatacagtctgttccttttcttaaagtgacaggctcactgcattattttcaagaaaatgtctgccagattaataactctgaataactataatttgtcagtcattcttcaagtaaaaatagtattctgcagaaaaagctgctaatggagtgcacaactcaaaacaactacgcagaaacttttccttgagacaggcactcgtggtgcttcagtcagcaacaatgtgtaatgtacattttgtcacagaagtattttaaaaatgtatattcaagggccaagattattattaattttgtggcttcaccaattatattcttaagtgaaaatgtctttttcaaataccctgtgagttcattgtattgactggtaggacagtttggtgccattgccttaacctgtgctaagcaactatcattgctcttgtgccatcagagaaaatgttaacatgattaaaaaaaaaaagtaaatagcatcttaatatgattgtgaaaatagttttgaatcaaactcactctgaaaggatctcaatggtctcccagaggccacaccttgagaacagctgctataaagagtccccaactttcttgtaggtcatatacaaaaagtttaacagtgagagagttagtagtggtagacttgaaagttttcattccttaaatgccatttaaattgatttgtgctcagtaactgtgatctgtatgctagcaacgtggtgaaagaagagaccatcaggaatatccaatctagcagcaggatctgcagtagttaggggttacattagtgtctgtgaaggataagggatttccgcatggagttaaaaaaaaaactccatagagaaaggccaagatggctcagtagacacagccaggaagagcatttcctactgaaagatcagaccatcaagaagactggcacactctgagaggatcttcagaaggaaggcattaagaatgtatggaaggagcacacagaccctggactgaagtaggaggaagctgggaagccttcatggggctgccaagtgccaggacttgttcctgaccctgagaagtgaattaaatagttgaggagtggcccactctttgcaggggtctctggaatcctacctgcagaagatcttacaacctccatggacatttgagacatgggagagctgcttggatagggggcagggacaggactccagcctgtgcagagcccagagggtttggcaccagagtggctacgatgcccataccccagggcttgacatcctcctttagggggctttggccttggttgactgttggacctggacagagcagagcagtcttgcccatgggacaaggccagtctgatctgagtgtcccccatctgccggcctctgccagtgtccctgcatggctgtgtccacttggagcacagcctcagatgcccatctggggctcttcccaggtgtcaccaccatagctcctttgccagcaaaccctgcctaaccattggagaacttcagcagatgggcctctgccagcattctcccacctgcagcctctccccacaactttgctggcatgcacttgcccacagccttcccccattgctctgctggcacacatgcacataggcctcatcaccccatcaccactggcatgttcttaagaagcaaactgatctgatagagctgaaaaactcactacaagaatttcataatacaatcagaaatattaacagcaaaatagttcaaggtgaggaaagaatctcagagctcaaagactgttctttaaatcaactcagtcagatgaaaataaaaaataattagaaagattgaacaaaacccctgagaaatatgagattatgtgaagaaaccaaacttacaactcattggcatccctgaaacagaggtagaaagagcaagcaacttggaaaacatatttgaagatattgcccacgaaaaattatccaaccttgctagagaaggcaatattcaaattcaggaagtctggagtacccctgtgaaatactgtacaagatgacaaacttcaagacatacaatcatcagattctccaaggttaacaagaaataaaaaaattttaaaggcaactaaagagaaggagcaggtcacctacaaaaggaaccccatcaggataacagtggacctttcagcaggaaccctacaagccagaagagtttgggtgcctatattcagcattcttaaagaaaagaaatcccaaccaagaattttatattcagccaaacaagcttcatacgtgaaggggaaataaaatatttttcagacaagcaaatgctgaaggaatttgccaccagacctgccttaccaagaggtccttgagggagtgttaaacatagaaatgaaagactgttaccagccaccacaaaaacaaacttaagtacatagaccattgacactgtaaagcaactacacaattaaatctgtataacaacctcctaaatgcaatggcaggatcaaatcagcacataccaatattatccttgaaaatgaacgggctaaatgccccactgaaaaggcacagggtggcaagatagataaagaaataagattcaactatatgctgtcttcaagagacccatctcacatgcagtgacatccatagactcaaagtaaatggatagataaaaagctaccaagcaaatggaaaacaaaaacagtgggagttgctattctaatttaagacaaaacagactttaaaccaacaatgatcaaaaaagacaaagaaggccattacataataataaaggttcagtgcaacaaaagatttccctatcctaaacatacatgcacccaacactggagcatccagattcataaaacaagtttttagagacctacaaagagttgtagataacaacacaataatagtgagaggctttaacaccccactgacagtattagacagatcatcaaggcaggaaactaacaaagatattcaagacttaaattcaacacttggccaaatggactcaacagatatctacagaacagtccacccaacaacaacaaaatatacattcttctcatctgtaacatagcacatactctagattaaccacacacttggcaataaacaattcttagtatattcaagaaaaatgaaattataccaaccacactctcagaccacagcataataaaattttaataactaataaaagcaaagatacaacataacagaatctgtaggacacagctaaagcagtgttaagagtaaagtttatagcactaaaatcccacatcaaaaagttagaaaggtctcaaattaacaacatcacacctggaggaactaaaaaaataagagcaaaccaaccccaaagctaacagaagaaaagaaataaccaaattcagagctgaaccgaatgaagttgagatgtgaaaaaacattcaaaacatcaacgaaacctaaagttgggtctttgagagaatacataagattgatagcctgctatctagactaataaagaataaaagagagaagacggaaataaacacaaactgaaatgataaaggagacattaccaacaaccccaaagaaatacagaaatcctgagacacctctatgcacacaaactagaaaaccttaaaaatacctctgtgcacacaaactagaaaacttagaagaaatcataaattcctggaaacataacatctcccaagattgagccaggaagaaattgaatccctgaacagaccaaaaatgagttctgaaattgaatctgtaatgaaaagcctaccaaccagaaaaagcatgggaccagaaggattcacagacaaattccgccagatgtataaagaagagctggtttcattcctattgaaactattccaaaaatttgaagaggaggaactccttcctaactcattctatgaagcctgaattattcttataccaacacctggcagagatacaataaaaaaggagaaaactttaggccaatatccttgacgaacatagatgtaaaagtcctcaacaaaatgctagaaaactgaatccagcagcacatcaaaaagctaattcatcgcaatcaagtaagctttatccctaggatgcaaggtgagttcagcatatgcaaatcaataaatgtattttattagagattttatctctgatttctttcagagacaaagaaatcagagacaacacaaacaaatggaaaaacattccatgctcatagataggaagaatcgacattattaaaatgaccatagtgctcaaagcaatttacagattctagctattcctatcaaagtatcaacattatttacagaattagaaaaaaacctattttaaaattcatgtggaaccaaaaaaatggcctgaatagccaaagcaatcctaagcaaaaagaacgaagctagaggcatcacactacctgactttaaactatactacaaggcaacagctaccaaaacagtacagtactggtacaaaaacagggatatagaccaatggaacaggttagagaacctagaaataaagccacacacctacaaccatttgatctctgacaaagtcaacaaaaacaagcaacaaagaaagggctccctattcgataaatgatgctgcaatagctggctagtcatatgcagaagattcaaactgaatcccttcttttcatcatatacaaaaattaactcaagattgattaaagacttaaatataaaacctaaaactataaaaactctagacgaaaacctaggaaatgccattttggacataggctctggcaaagattttatgacaatgattccaaaagcaattgcaacaaaaacaaaaattgacaaatgagacccaattaaactaaagagcttctgcacatcaaaagaaagtatcagagtaaacaacctacagagtaggagaaaatatttgcaaactacacctctgacagtggtctaatatccagaatctataagtaacttaacaagcaaaaaaaaaatctcattaaataatgggtaaaggacatgagcagacacttctctaaagaagacatacatgcagacaaaaagcatatgaaaaaatgctcagcaccacctctcattagagaaatgtaaatgaaaaccacaatgagataccatattataccagtcaaaatggctgttattaaaaagtagatgctggtaaggttgtgaagaaaggaatgcttatccactgctggtgggggtgtaaattagctcagccactgtggaaagcagtttggagatttctcaaataatttaaaacagagctaccattcgacccagcaatactgggtatacacccaaaggaatataaaatgttctaccgtaaagacacatgtacacatattttcatcacagcactgttcacaatataaagacgtggaaacagcctaaatgcccatcagtggtggactgagtaaagaaaatgtggtacatagacaccatggaatactatgtagccataagaaaaagaatgagaccatgtgctttgcaacaacatggatggagctggaggccattgtcctaaatgaattaacacagacacagaaaaccaaataccatatgttctcatttgtaagtggtagctaaacattcagtacatgtgaacacaagggaacaagagacactagggcctacttgagagtggaaggtgggaggagggtgaggatcgaaaagctacctatcaggcactaggcttattacatgggtgatgaaataatctttacaacaaacccctgtgacatgcaattttcccatgtaataaacctgcacttgtactccctgaatgtaaaataaaagttggaaagaaaaatatatgtgtatatgtaaaacatatctttctccatgtctgagttctgagccaattgagggatagccaaagaacccatttcatatggagttctaaaaattttgagaattaaagttgtttgtactgtctaggctccctatttgtgcttgcttagttcaaagtcttaaagaagttggtcatgatcctaagatgtactccatgtttgcacatactagtcaaagctgggattaatactcccagctttgggcccatgtctgaaaaaatccaactataatttcatctagagccttggttttcccaagtagatttttggtccccaggtgccacttgaatattttctccagttttcccagcccatgtaccctgtgttgaagaatagaggcattctaagcacttatttctaaaagacaaggaggaaaatgaagctcttaaagatatgctgtaaaacagccacagagttcacaacaccttatatcataggtgttcatgactcctaaaagtctgtaagcccaagaagacaagaccatatctttttcttagttaatcatgatggaagtattgtgcagatttttaaactagctttattgtggtttaattgacatacaataagttgtatatatttgaagtatatagcttgataagttttgatatgtgtataccaataaactcatgacgacaatcagataatgaacatatccatcaccctcataaggcttacttttgtcccttgtaatctctccatcttgctcctcctttcatccatccccagcccccatcctgtccccaggcaatccctgattagtcactgtacattactttgcatcgtgtagaattttatataaatgaaatcatactgttacatatatgacttttgtctgatttcttttactcagcataattattctgtgattcttctgtgttgtggtgggaaaaatcatttatttctttttgttgtggaataatattttattgtatggatatagcacagtttatttatatattcccaagttgatgggcacttattttgtttccagtttctgtgtatcacaaataaagctcttatgaacattcatggacaagtgtttgtataagcattttagttttgagtatatacctaggcgtggagtggctggattgtgtgagaagaatatatttaattatttaagaaactgccaaaatgtgctattttacatttctagcagcagtgtatgagagtatcagttactccataaccaagccagcacttcgtatagtcaggtttttacactttagccattgtaataggtaggcagggatttctcattgtggttttaatttacatttctctaatgattcacataaaaagatgttgaccatcttttcatgagtttatttgatctgacacttctttggtaaagggtcagttcaaatcttggtccattttaaaattattttcttattgagttttgagggttctttgtttactctggatataagtccttatcaaatatatgatttacacatgttttctcctagcctgtggcttgccttttcttcttgtaacatatcttttgaagtgctgtaatttttaattccgacgaagctttatttattaaatttgttgttttatggatcacgcttttgatgttgtgtctaggaaatctttgccaaatgtaaggtcacaagggttttcttcagtttttgcttctagaagttatctagctttaggcctatgatccattttgaattcattttttttaatattgtatgaagtttattttttgtagtatattaataaccatcaccctttgttgaaaagagtgtcttctctctattgaattgcctttgcaccttgttgaaaatcatttgctcgtatatattgggtctgtttctggactctcagctctgactcacctacttaggggcttgctgcatcctgccagtgttccccctgtctgcatcgtggtctgaaaaccctcttaaagcaataagctgaaatagttatgatattcactgtgtttgttttccttctcttagggatctatattctttgttgcctgatgtcaagtttcttgaaaaccatgatttcttatactttgtccatttgtttgtgttttgaggaaggagggtaaatctgtcttggctgggaacagaagtgtcccctattttcttagtgcaaagattgtggaatgaaaaaaatgggaacaaaaacgccagctagtaaatttttatataagtctaggcaagaaattatgacaatagtgatgtaggactgcagaaaaacttaatgattcaacaagtgcttgggaggttaatcgatagaatctgatgacagattagttgtggggagtcaaagagtagaaaactacaatgatacacaagtttctggctgagcaaaactggacatatagtggtggtgttaacatgtataagaaggtgcagattgggaggaaatagttgttgagtctttcttggacatgctgagttttaggtgtctagggtatttaattatagagctctaatgctaagaggaatgtccggggtagagttacagatttaggagtcaacaacacacaggtggctcttagaaccatgaggatgaatactgtgtcccaagctgaacaacaggacaagtgaaaagataacaggaatactacagctggaatcttatggaacagacacatcgaaggcccttagtctagctcaactcagacgcacctcgttctagctcatagtgttagagagatagcaaaataatatggagaattatgttcctgaagttagggaagggcacactttcaagagaaaagtagtgttaggtgttaaatgcagtagaaaaatcaaaggcagtgaggaaaaacatctgttggatttggtaattggggggttttattaactttgaagagtggttttaggatggtaattgagtcattttgaggttattttatttattcataatattaacacacatgtgtttcattaactagcttaaccctaaataacagatttgagttcaggtcttccattaaacagtatagatgagaggccaggtatagagagagttagcatcataattttgccaaaaatgtcttaggtccactatgattataaaagaaaatgtgggccaaatatgatgttttggaaaaaacaatcattctaaactaggtacagggctacaagatcagagttattaaattaggcttagctcaaattttgtctgtacaaacctaaagggtatcattcaaagagtctatataagtggtatgccctagggttgtacactatataaccatatgcagcctacctagcttagctgataccacctggtgcttctttaagtgatagatatacctcatcatttagccctgcaaagttaaagccccagcagcaggcttgtctttctgactactgtaattcatagagacttagcttagtaatggagcacattttcagaaaatgagttttaatatttttaatcctatactctaattcaatttttgatcactttgaatttataaacaacaaattgaatttataaacaacacatcagaaaaagtgaagaggatattaattaactagtgctttaaattataagagcccaagataacactagtaactatgtcagctgcgctaatgttttgaggaataacaaactgccattgctgtttgggaacttttatgagatacctaatgaagcagtataacttgaaaggcaatagatttattaaaggatcagtgacaaagaaaatagaattgggtctattttgctattatgagaattgctcctgatgcctgaaaacagttatatttacccattatatttttctctttttcttgagaattctactctaaaattaaaatttgtaactctcctagtgtctgtataagtcaaactgctgttagcaatgtttttaattcaagtcactctattttggagtagtaaaaaataatttaaatttctattgggctacaggtaatcctcgagcccttgcaaacaaaaaacaaagccttttctaagttggcatataaagtatttttcaagggaaaatatttcttagctatatagtagtatttgagaaattaacaattttgataatcaacattctccataattttaaaatttattttaggaggttaaatcccatgaattttgcttaaaaatacccatccccccaatgaaaacatactaagaagtcaaaatgtacagaacgtagtatttaagtactttctgttcctgtaaacaagacaaaacgaacatggtctcttggaggtccaggactgtgagactcagaataaagaggagacagaagtgttcatgtagaagttggcagtggtcgtttgtgactagtctaaaactgaaaatcccagaaaacaaacgaaaaacaacaaatgggttttaaagtcatatggaattgtaaagtcactaattgcttttttggtgattgttttgaccaaaattaagtgaacgattacatcttctctgtgtactagacccttgatgagtccctgaggggctcaggagacagaagtgaattgtggttgtagtggcaaaatagctgacagagctgccatagtaacaaggagccttaggagcagactctccaggggagaaaacagtcctgcagaagtggctttcctgaaactttacctaaagagaggggagtggatgcgtggtttctcatgttcttcaaacagagctttatgttgaggctgctgtaaagataacagctacaacacatttttaattgttgcatttcaattatgtaacacaaaattgaagtgatcttcaacactgcgaactgaaggtggtatttcatattggaaagtctatttattatactttatatgcttgctaatgctctctctcttttctcattttgcttcgttcctttggctcagtagaattgatggtatcaactaaaactttaaatgtaagtgagtctttatgggctgaaggggtccttggatggatggaaaaggatttagtcctgttattctttgttgtttttattttatttgctatgaagtttatttcctttaccagaaggggcttaattgcattcagtctgagtgtttacataaatgaagttggtgggtttgatacagtacagttcctcttttaagaacatctgtgaaagtaggaatctgcttattaaaatggtaaacctgtgaactgattttattgttatgttctccaatttagctgaaatggtatatgttaatggcttctacacatatatgaaatggcaaatcattatgccctctaccaactagccaggtttttaatttgcaaggattgaaaataatatttagtgggcattgctgagagaagatgaattaaacttcttatactggcacacgtgatttctctgggatttaactagtccagactgttcagtctgtcatttggtttttcagcccctgaatcctgcaatgggtttgcatttaattaggctttaggagaccttgaatggaaagcatgactttctcactttttggtcacgactagtatttgcataaaacttcattttatgcaacaaatcactgtgccaattttaagatcctaaagaaacttgaaactgctgaaaaaaataggctttgtttaaatgttttcattttctactccctcatgtttttttacttcaaaatattatccaagctttagtgtatatatagttgtatacatagatgagttcaccaaaaaaaagttataccaaagacattccataatccatcaatctctttctttaaaactaatagcagtgacaacatgtaacataaatatatatcttcagaatcctttcattgttcttctggcactttactaagccttagagaggttattaacttgcccacattggtgtaagcaataagcattatagcctatttctcttttcagggcacatgcttttaatcattggccattattccaactgaaaaatctttaattcttgattaaagcaaattcccatggtactctctaaaaggtgatatttttgtaaatcctcaaactggcctctgagtgtatttgaagagaggaattttcattcatttataaatacttcgctatttagactattaccactgactggccttctctcaaactttagaggactaaatgtactttaaacaaacatttctacaaatggagtgaagtctataatggtttcttttgctgctcacagatgttgatgaatgcacatcaaatccctgcactaatggagattgtgttaacacacctggttcctattattgtaaatgtcatgctggattccagaggactcctaccaagcaagcatgcattggtaaggcagtttgctttcacatatgaaaatgttccatgaaatatagtgaccaaggctgttgaggttaaaagtaaatttattaaaacatggaataaaataagtgttacattattacagatttatttgtaataccctcagagattctcctttaaacataaacaatgtttgcatatataacccaggcaacatggtatctgttttcacaaaaattcagtttatcttccttccttagatcagagcttcctttctccagataacatcagtaaccttctctgattaactgagtttaagatttatagtcattttaaactactgttttctttgaatcccacacatagtccaacaccaagtcatgcctggtctttattcacagcttcagtgctacacccaccaccctggtccaaacgcgctacctcattgctgattcatctcagaattcttttagcagatgactgcctgtcttctttttcatttcctattcatccacaggtagttgcttgaatcaactttccagcagttttcattgtgttactcttaatctagaaattctgtagttactttacacttatccaacatcttgttctgacttttaaggccttcatccactatgtgaaaaacagctgcaaccagtaattccagctgtcttgcccaccctttcttaggtttactggataccctctttttttttttcctttcccacttcagctactataagagctgtaaaattgcttgcacctacctatccaaaaaaaaaaaaaaaaactgctgagagacagaaattttgctaaagaagtaacatgattttgaatatttaaaattccatttcttatcttactgtgtttatctataagtattgtaaaagaatgatgtttggccattctcaatcttcctagatattgatgagtgcatccagaatggggttctttgtaaaaacggtcgatgcgtgaacacagatggaagtttccagtgcatttgcaatgccggctttgaattaactacagatggaaaaaactgtgttggtatggaaattgcctgctcccttgcaaaagattttaaaaggatatacatttttatttagaaccatgtactatttccatgaaagctcacacaccacgtatgtgagatcttcaggtaacttaggtaaaatgcaaatgcatttaatataagactgttaaagcaaaaggacaggttttttgtttgttttttggttttttttttttggtggtggaggggaggagatgttataacagtgaataatttactgcttctaaaaatttcctgtgtgttacaagttaaattgtaagtcgcagttattcttcataagtttaaacaattactgaccgctactgtatttcaggtgttggggttacaacactgacaaaatagaaaaggtcttcccttcctccacaaactggaggaatataaaaatgtttgacatatgcagtacacaaatctctaaaactgtggcttgtgatatctagcagtgcaatggataccaacacaccacagaaatattgtttacaaagtaacacatcatattcatctactaatgaaagtccagatcatttcatttgcagtgaggtctgccattgccttattttcttataaaataaacactcattgaaattatattatctttttggtacacaaagtaacactactcatggtttatgtggttttaacaggagctaagcacaaaatttgattattttcctttatatccatatactgaaggtcctttccactctccgcactattttttctcattcagttggcgttctttttttaaaaaaaactaaaagccatgagcacatggctcatttaggtagtggaatttgactgggggttgtttatggaagaagaaggaattggttccctcaaggccagtgttcaaagtcactcaatcctcttctgcagatcatgatgaatgtacaactaccaacatgtgtttgaatggaatgtgcatcaatgaagatggcagcttcaagtgcatctgcaaaccaggatttgtcttggctccaaatgggcgttactgtactggtatgtgtggctttcagataggaaagtgaccatgattgaaaccaccttttttatttgaatgaaccatggaagaattacttcagcttccccatgtggctttcatattattcacatttcttgctaattcactaaggcaggtgtctaaagctttctagaaaaacacacattgtggtctagggaacagtcatatcttaacaaaaataataatggtataggaaaaattaaggaactgacagattggttttagcaagtcttgtggaaaacaacgtagaaataatttctctcaactgcttggctgaataaaaaagaagaagaaaaaatcttgaaaggtttttgttttttatgcattctcagaactagattttccactgtcattcattatgggtttagcattacatcttttccataaagctaatatacagaccatttgtaactgtgtcattatctaaaaaccttacattgatttagtgaagacataattttaatatttcaattaattattttgtttacaaagccattttgaagaccaagctctaatgataaccttaataagctaaagttatacctcttggaaataaatgagaccttattatgtttgtactcacaattggaatttaataaagtggaataatacattttgcagcttctacttagaagcacatttttccttttcttttttaaatttatttatttttgagataggtttttgctctgtcacctaggctggagtgtagtggcacaatctcagctcactgcacccttgactcctgggctcaagcatcctcccacatcagcctcccaagtagctgggagtacatgcatgtgcccccatgcccagctaattttgttttattttttgtggaaatgaggtctcactatgttgctcaggctggtctcaaactcatgggctcaagcaatcctcctgcctcagcctcccaaagttctgggattacaggcatgagccatcgcacctggccaaatttttgtttttctttgtttccttccttaagacaaaattaactccatcaatgatgttctgccttcaattgcacaaacttaatctaagtaccagataaggatcatgctcaattcttataatttcaatgaattacaatgaaattctagggacagtagagattaaaaaattgagactgaattcttatgtttctgagtaagaaacaaatttttgactctccaagaaggaggagtactgtagttttgctggttgaactcatgactgggatgtcatctcagggttagctgatttagatttaacacaggataggaaattgtcattatgcttcagtgtgtagaattatgttacagtatgtgactttatttcagcctttttaaagaaacttcaatatacatctaaagatgacttcgacctcaccagtttctgctttctggaaattagttcttattaattatttaattacaaatgttgtgaagattttaagtattcctgagtcggcagctctgtgtttgaagtctctttcatcttttggggaagtcatttaatgctgggttacgtttgataaattcaagtggattgaaaattagaagacatacctcaagttattttgttattatcaaatgaccaaatgaatatcagcatagcatctacttctagttaaagtgtctttgtgtgaaaaaaattacagaaatttaccttaatttttaaagaatttgttttacttaactaatttgaattatttagcgttaaatgggattgtcaaataaataatgaaaaagaagattgtgaggcttttttttcctcagtaggtaaagtaaagcattctgaaatgtgttgaaaggattgcatttgtatatgatacctgttaccacacttatttgttcttcacaaattataaagttataaacaaaaggttagtagtatagagcagtggctgcaagtaaaccctgtaataacgttaaatttacccagtaactgcttggcttctgtcacccactgcacagatgttgatgaatgccagaccccaggaatctgcatgaatgggcactgcatcaacagtgaagggtccttccgctgtgactgtcccccaggcctggctgtgggcatggatggacgtgtgtgtgttggtaagtgaaacattttataatggccccactgtgcaaaatgatctttgaaaaactgacagagatatttctatacagtggagtaatattcaccataagaagagtacatgctaaaacatggataaaccttggaaagattatgctaagtgaaagaagccagtcacaaaacaccatacagtgtatgattccatccatatgaaatctccagaatcggcaagtccgttgtgacaaagtagattcgtgttaggacagagaggatgggggtggtgggagaatggggtgggagctaaaagatatttttgaggtgattaaaatgttctaaaatcatctgtagtgatggatgaacacatctgtaaatatgctaaaaactataaaattgtacactttaaagtgatggattctatggtatgtaaattgtatattaacaaagctattttttaatggacaggaacccccagatagcccccttcagaacctacagaaggctctgatgacatgctggagaagaaaaaatatatttttaaactagcatacttgataatattagataactgaatcctaaacacagtgcatttcagttttataattaataacaaataagatatgtaatggggattatagttataggtaagtaaacttggtttcaccctaacaaaacttaaaatataaatattggacttgcatcaaaagctcaaaatgttactcctcatcaccatgcaactagctgcagaagcaagagtataaagaagtatgagcaagaatatatattttattctaagccattcagattcctctaggttatttttgtcaaattgatcccatgaaaatcaatcagaagtaccaggcccagctttgaagaggcaggcaaaacagaagcgtcactggcgtttgggaaccccagcaatatattccagtgataaggatagcagaatgagtggtaaaaatacatttaatgcagttttctctccaaaaatgttttcatgaggcttctagggtgaattagccattgtataccctctatttttcatgttgtacagtaaaacacagaaataggatttcaaagtatatttgagagataccatattcttagacatagttaatactttactcctacctatgagaatcaaaacatatggatcccaaaggtggaggagaagaagtagagaatttgcagatggaaataatctgttcactcaaatttatccactctatccagtcaaagatttatttcaccctacaaagttgtcagcactttgttcagggatatttcaaatacagcagctagaagaatataacttcttcctgcttacagagctaaaatattttcagttgctttaatatatttacttgcttttttcctttacctaaatgattctgttgaaatctaccatgagcacaaagccagttttggagggagaaattatttttctcttaagtaaccaacatgcgagttgttgctaggaattcagtaaaacataaaatttcattatcttgttcacaatccaggaaacacattggaaattttcagaaagcctccttcagtttttcatcattgtggtcatttaaactttttaaaataaaaacattatttctcatgtgtataaaattatatattactgtttctataacatgctagatgttttcttcatgtcttttgacttgatgtcactttttagacccattgattctttaagtttgagatgaggcctggcgcagtggctcatgcctgtaatcccaacactttgggattccatgttgggcggatcactggagcccaggagttcaagaccagtctggccatcatggtaaaaccctatctctgcaaaaagtacaaaaattagccaagtgtagtggtgcatgcctataatcccagcactttgggattccgagtagggcagattgcttgagctcaggagttcaaaaccagtctgggctccatggtgaaatcctgtgtctgcaaaaaatacaaaaattagccaggcatggtggcatgtgcctataattccagctacttgggaggctgaggcaggaggattgcctgagccctggaggtggaggttacagtgagctatgattgcaccactgcactccagcctaggtgacagagtgagaccctgtctcaaaaaaaatagaaaaaataaatgaatcactgttatgaaaaactattaggataagcattttaattttagatctattttttgtttgttcatttttcttctgtagatattaagatgtgtttttgttttttgttttagtctcaggtaattaagctatgattttaagtagtatattgaaatacaactcacaagcaaggttgtaaacaaaaggcaatcatatctttatctttcccattcattcaaaatttatttttaagtttattcagtgatgcagtttagtaagtaaggaagaaaagtcaggcaacatgataactactgaatattcttaagtgacaaaaaattataagatgacagcaagatacaggacctctctgttcctcctttcctcttttgttgttttgagaattaaataaagctttgaatggtgtctagcacatagcaaatgcgcaataagttaactactactgatattattgttattaaattagaatagtggtatcatatctaggtcatagtcttaagagttgctgctttaagttataaataaaagttgattttaaagaaagaagaataaaataaagttagcattttgcatacatacatattttactcatggtatgtagaatctgctaattacctgaagaaatttttaaatcttttcattttttaagaaagaaaaggggacaggcatggtggctcacacctgtaatcccaacactttgggaggccaaggcaggtggatcacctgaagtcagcagtttgagaccagcctggtcaacatggttaaaccccatctctactaaaaatacaaaattagccggttgtagtggtgtgcacctgtaatcccagctactcaggaggctgaggcaggagaatcacttgaacccaggagctggaggttgtagtgagtcaagatcatgccacgccattgcactccagcctgggcgacagagcgagactccatctcaaaaaaaaacagaaggaaggaaggaaggaaggaaggatggagggagggagggagggaagaaaggaaggaaaggaaggaaggaaggaaggagaaaaagagaaagaaaagaaagaaaaagagagagaaagaaggagagaaaaggcatgcagaagtctgctaacatatggaaaagatgcatttaggtccagtctgtcaccagatcattcatgtgagcatattctcatggtgctaccggtattgttccttttatcctatcctgtatacagtggttctgttatatttgaatagtataatatgagctaggttgccaatttggggtctttgaacaggaaaaggtcagtagggaaatagtgagttatctcaactgatagttcacagtatcagttacagatagaactccttgttctacttttcctcccttctcactgctgcactttactagtcttagaaaaaaaaatagaagagggaaataaggtggtcaccattttttttagtatttcaggtgtgtcctaggcagtgtgcttagtgcttaacaaatatactttcatttactatacaaactgtatccttatttaatgaataaggaagatgttaagtaatttatgtaagatcatcttgtggggatctgaactttgggaagtttatgtccgtaaaacctacacataagttatgctactttctttttcatgaaacttctggtgttgggtactctaaagagattggttcacctgtaatgcaaactaccatataacatgtctcactcttccagtgagctccataggccttttatctgcttgcttttaaaaattctgcatggcatatgctctaaacccaaaagcagaaataactttggctgttcatagatgccttccaagatcatcagtaatgtccaaagaactcacaaaaatcatattggaaatgatgaaccatgttatatttgtgcaaatttgccttcaagtcaaatctgtgtttgtgtaactcagaagatacactgccaaactcagccacagcagaggcagcacaagtttctctgagttgactcctcagggatggggttggtgaattccatggcctccttccatttaagcacacacgtatctcatttttaatgcagccataaatcactgttttaatcagaaatgcccccaggtcataagaaattattggatggccattttgcataacaagcagatgaaattttttccaacaagttgtgaatagttacagatatttataatagaggttatctctggaggtatactggagtataccaggtcagtatactgcttaaaaattgcatgggttctctgccctttatgatctgagttttttatagttcaccatttactgtcttataaagttgtagggtattttatgagaattaagagtgagagaactaagcagaatatgcttctttggggtatagcattacttactagaaagaggaagagttttagaagtcacataaaccttgtctgaaccccaactcaggcactggatattcaaggacttcaaactacataggtagctgtgaacctcatcttcctcatctataaaatgcacgtaatgaccactcctatagagctgttgacctgactgttcaatgagataatgtctgtaaagcaacgagcacaatgccaagagcacatatggtagttaactatttttataactggatttactgagtttctgaggttaaaacagtcacaagcagtatcctgggggttgaaaagaaaggcctcctaactcggaaagtgggagtaagaaatctcacgcccaagccagtatcacctcaaggtagtttaacttgattgcacttcattgttcatgagaacttccaaaattgaaataagaagtgtcattttgaatatagcatagccagtgattagagctccaagtattctttataactgtggaaatatcctaggtttcacaaaaggtttgtaagaatacatcggacaatggatactgtgtagctcataaaacttattaaagaaaacagagtcggtgatatgcatccattcttttcctcactcagaaaacatttgttgatttcctaacactattagatgctaaagatgcaaaataaaagtctcagatgcccttgaaaagcttccagtctagtggccacttaggttaaaagaagccttctgtttcgaaatctctttgtctctatcactgcctcaagtcattgtttttgtatctcctttagatactcacatgcgcagtacctgctatggaggaatcaagaaaggagtgtgtgtgcgtcctttccccggtgcagtgaccaagtccgaatgctgctgtgccaatccagactatggttttggagaaccctgccagccatgccctgcaaaaaattcaggtagtcacatgtgccattttcacagttgataaagaatcaagaaatacaaccttagatgtttggccaaagagaacatcagctcttaagtgtttcatcattaattttaactgaagaagagaaatccaatcctgtattgatatgtgaggcatataataaggagatttggcttgtgtttatatacgatttctaggccaacagaacacacagtgaataaaaaaatctatttgctggctgattgtggtggctcacacctgtaatcccagcactttgggaggctcaggcaggaggatcacttgaagccagggtgagaccctgtcttggtaaaaaaaaaaaaaaaatcttaattagctgggtgtggtggcacacacctgtagtcccagctactaggggggctgaggtgcaagggatcacttgagcccaagggttcgaggctgcagtgagccatcactgtgccactccactccagcctgagtaacagagcgagatgctgactctttaaaaaacaatcaaaaatctattttcttatacagttatgattattataagagggtttttttacatgaacatgatagcctcagtttccttgatctgtgctgtcatggtgaagacaaatagcataaaatttacttaccactttcaaggttataaacacaacaagaactcaatttgattatatatatatgtatatatatgtgtatatatatgtatatatatgtatatatatgtgtatatatatgtatatatgtatatatatatatatacacacacacacacatatatatgaagatctctctctatatatatatcttgacaccaagtggtctcaagtcacagtctcaggcaatagttccaaactcttaggtcaataacattgactcttgtctgttcatagtttaactaaacctgtattgaatatatattgaatatacgtaagtacagtagggattctaacataaacacaatctgtgtttttccttaaagttaacagtagttgagaatacaggcaggcaaatgtataaattacaatttagtgtgattagtgccttaaaaggttcaagtatggagagagcacagaggaaggagcaatttgtagcccagggaagctgggaaggacctcaaagaaggggcacgtttagtttggtcttgaaaaaaatgagtaagaactttccatatggaggatacaggaaagcattcctgtaaaggaaatgtcttgttattcccttaaaaatcctgaatggagtcttcaaacgtggaaataatgatttgaagcatccagaagaattactgagtgtgactttttttaaaaaaaaaagaaaaataatgaggagaacgtagttctaaaatgtaccaaactgaattatgcatattatcaaataagttcaaaaattggcataagactagacaaaaacctaagtgaactaataaaatgaatctagaaacctgaatatgaataggaattaggatataacaaagcattttggagcagcaaggaaaaagattaaataataattattgttgataactttcagaaaaaaatatgaagttaggtccctacactaaacattaaaacataattttcatatagaatataaattcttttttattttgtaatggtaaaagactttcaaagcaggcctaaatagtaaaatacacaagtaatctggaaaaatatttttatttatcatttcttaatctttatggaatttacattaatcaataaggagagttgaaatcctctatagaaaaaacagcagtgtacataaacaggatttcagaaagtagaaatgcaaatggaagaataccatgtaaaaagatgcccactctccgtataattaaaaataaggtgccatttttgtttagcagattggtataaacgattgattcttcccggtgataatgagggtattaaaaaaatgaatactgtcttataccgctgatggaggggtaatttgggggcgttttaggaggggaagaactatctaaaaccttaaaaggggcataaactttgagagttttacttgtaagagactatcctagtgatataattaaacttcatattatttatgatagttgctaaaagttggacaaacctaatttcaccagtaagagattgactgaataaatgtgatacctctatgtaactgagaaaacaatattaaatggcctattaaatgggacattgacatgacatgcctgtgatagagtacccaggagccaagtcggcttctccacttacaacctctgtgactttggtcaagttactgcacttctctgtttcccccttttcctcagttgtaaaaaggaaaatacaatagtatttagtttgtggtattgggaagattaactaaattgatagatgaaaaatgtagaacaataccaggcacttggtaagtactataacctatattttggctgttattattttattagtgaggaaaaaaagttaaatatcaagctctttaagaccatttatatttttcttaaagtttccttatgtagaaaatattagtaacatttatatgtattaataatattcaggatgatgattacaagtgatttttactcttttatgcttatttataagttcagaattttataataattgtttgctagaaaatggtaatttttttcactttaaaaactaatgcacaaataattcttcctaatggtagttttggagttatgaaatgacttgtatatggaataggtatagttaagtttttaattcttctatttctttttgtcatacagctgaattccacggcctttgtagtagtggagtaggtatcactgtggatggaagaggtaactctagttaatctcaactttataataatcacgtgacataatcgtatagctttataattctaatattaatatgagtatatttaatatgaaaatgtagtattataaaataataagattaattatctcctagagcagtggttataagctagatgatattaagtgatatgtagatacacattttcatcttggataaatatttatctgttaaatatgcattgttaaaaatgtcactaacaaactactctcctgatttcaggcagtcattgcttaagaaaagaataatgtgacatttaagttaaaaaaagaagaataagtcaattttatgataaaacattaagtaatggtgcagatagggttagaaaaataaacagtattaaagagatatttgatatggatcaagtttgggatatactggctgaaataatttgttaagactatttacacctaagaataataaaacatttctctccaagtaaagaagtaagattcactaaaatttttcttgctttcaattttgtattatggttaacaaaattccaatatagaatcttgaacatttaagtacatatgtgtttgtaattttcagattcttttatattttaatatacatatagattcatttatacataaataaaacttgggtgttattaatcttcactatatatatgaatatgtatatatgaagagtatatataaatatatatacggttatatatatatatttatgtatattcttctacccttgtgtttgagaaagctttagtcaaattatagatggtaggcagtaatgttgaatctttataataaatatccaaaccagagtgaaaagtaaacttttaaaaggatgtttttcccaagtataaaatgaaagacatttccaaaatatttaaggtctcccaaattattgaaaacaatagcatcaaaatttgagcatagtgaccaaaatttgactttgggcttactctttcattatattccctgtcagtacagcctttccagcagagccagcctctattggaaactacttgatcattcatacaagcacatcagtgcacaagttccactgcccctcggtgatatagtagtagtagtcatgttcacggctcgttataaaacgtcatgttctgaagcatccatgtttaaagtgtcctctccagtaatttcaagtatcagcaatgagaaacacttattaaatattagtaactggacctcaaaaatgtaataaaatagaaatatcctgtacctttggggaccataaaattatatgggccaccctaataaatctgtcttttagttagatgattacaatatctatcaactcgagttttcctttggatttggagccaacagcctataaattgtctttattaatttcatcataaatgctggcatatttcgtgatttaactctttgaatttctgccagcgtctttcatttttcttttgatttaccagtgaagtgtcctatatctttcagttttattttcttactccttgttttcagttctttttcctttctgaaaggcaggcaaattgtgagtttgcagagttaaacacttcatatgttgaatggtctttactagacctgcatttatcaacaaacaataacatgtttgttgatagcactaaactttcaatatttaatgcagatatcaatgaatgtgctttggatcctgatatatgtgccaatgggatttgtgaaaacttacgtggtagttaccgttgtaattgcaacagtggctatgaaccagatgcctctggaagaaactgtattggtaagttatttgttatatttatgcaagaacatttcatatagtttaatcccatggattatattagaattaaaaacacaaatgactaaaactaaaaattgtacagtttttcttgttttcttcatattacacattgacaggaaaatatcagaatcaaacaaattttgttacacagtaacagacttcttggtggtaccaattcgtttttaaaatattattttccggaattaacatcctcaattatttgcctattgttttcctgcatataccttaatcctgtaattttttacgaagaatttgatttcaaaaattaacaggtcagtatggataaaagtaagtcaagaaaataaagtgttacaggttgagagaattttaacttcataaagaaacaaccagttgccacaatatacctaaacatgacaactaagacaaaggtatttccttttttaattataagagaatgattgaaaaaactgaagtatgtaatttatgtttaacaaatgcaagaggaggaggatgaaaaggtttgacagtcttatttcctattagtgcaagattttcccataaagcacttgagtggacttttataaaataaatgttattcaatccatcattgtgcatgatagttttacaactaatcacttatggcttttacaaccaagtgttaatgattatgattagaaaaggaacagatttttctgtgtttctggtagtggcttttactattgaacatattcgtttgatttggagttgaagacatacatacagatggatgtaaaagctatatttatattacgtgctataatagattttgataactacagggaagagtaccaggcaaagattattgaacatttctaacaacatgcaaaccatgctagtttttattctccagaagtgaaatccagatttcccctttttacatggacaccggtcatgttgactcacaacctaccctaacaacctcattataacttgattacttctataaaaatcctatttccaaataaagtcacattctgagatactgggttttaagatttcaacatatcttttttaagggacacaattcaatccatagcttagaaaaatgggttaaaaaattgtgatgcaagctggatgcagtggctcactcctgtaatcctagtactttgggaggctgaggtgggtggatcacctgaggttaggagtttgagaccagcctggccaacatggtgaaacccccctctactaaaaaatacaaaaattagctgggcatggtggcacgtgcctgtaatcccagcacccaggaggctgaagcaggagaatcgctggaacccgggatgcggaggctgcagtgagcggagacctcgccactgcactccagccgtggtgacagaccgagactccatctcagaaaaaagaaaagagaaaaggaagggaagggagggaaggggagtggagaaagaaagagagaaagaaaattgtgatgcagtcacaatttgtacacatattacactattatgggaaaagctatggtagtctagtccttaaaatataatgttaatttttaaagtatcaagattaagagttggagcaaaaacaagatcaagaaaggaaagggtcagataatacacaaaagaatattatcagtgatgatggaattgcagatgtttttctgatctgttttcaaaatctccacagtatcagtatattatttaataagggaaaattgttatttgcaatactagaaatgtaactttaagtgaaagagctcttcactctaaactacagggtttatttctttttgtcactaactacacttgcaaaaatggaagaatatgaagattaaaatgtgaggccaggtgcggtagcttatgcctataatcccagcactttgggagaccaagctgcgagaatcacctgaggccagaagttccagaacagcctgggcaacatagtgagatcccatctctaaaaaaaattgttttaagttggccaggcgtggtggcacatgcctgtattcttagctacttttggaaggctgtggcaggaggattgcttgagccaagaagttcaaagcttcagtgagctgtgatcgcaccagtgcactataaccagggcaacagagtgagatcctgtctcaaaaacaaacaaaaaactcattgtgggctttttaaactggagttttagatgatattctctaggctgttctggactgctaaaagagtatgcaaaatacatcattttcattaataactgtttctgagataaaaacatagtgggaaaagattaatgaatgtcttttaactgctgtttaatgcattttttaaccatctgggacatgaagacataaggcattctttttaaaaattttaatcataaaaaatgccttctgttacttttattatacataagcaagtatacaggcaaatgaatttaaccttttgatatcttttatgaatgctttaaaaatatatctaacataatatcattacaggactaaaagcaagtgaagtagagatgtgcctttccaagctagtgcatactttccagggatttaaaagcatcttaaaattagccactagcataagaatatcccatttgaataaaactaaatatattttgcttaggatgaagagtgcgctgtgatacagagactatgtcacagagaagaaagagggaaataaaacaaataacaaaattaaacattgctgcccactgtaatagatgcttaaatatgtgtatctcctatctttcaatcgttgctttcagacattgatgaatgtttagtaaacagactgctttgtgataacggattgtgccgaaacacgccaggaagttacagctgtacgtgcccaccagggtatgtgttcaggactgagacagagacctgtgaaggtaagagctgtcttcatcgccttatttgtgcatagtgagtacctggagttgtataaacatcaattacagtgatgaagcaatgtagtgaaaagaatattgtttgaatattttattttataatctcatttagctaatctgccagtttttgaaatagtaaggacctaatacagtttacaaacaccatcaattttgttccactcagacaaaatatcaacacacatttggaacaaacattttaaagcggataaaaaagaaaccaactggaaggagccatattgttttacttgctgaaatacaatgtcaaatatttgtttactgtgttttcctcttttcagaaccactatgatccattaatgtaggaacctgaatcgtaatggaaaagttaactcttaggcattttatttatgaaatgattgatatacccaagaagtcagcccacaaaatatttgagaactaagtaaaaatgataactttaataggtttttagtccaagagaattgtcctttccatttgataatttaaaagttgtcatttgagtttatagaccataactagtgtttaaaagcttctttgttttcttctaatcacatatttttgcagtggaagttacttaaatgagttaaatggttagagaagtcctcattttcagtgagatactggctgagcagtgagtacactgaattatgtttttgtatcttgatcaaagtactgtatatttcagaataatctgtggtatgaatactagtcattgttcctgtttaaatctcactgtgtgggcctacagaagggtcccataacattctcaaatccaattactactttgtaatagaaacttttaagaaaagatttcatctttgatgactgtggaatagccctttttttttatctgttaaagtatttggtttttttttttgtgatgccacagccaagaaaactgcagtagtaatagtatgcaaaaagatgtaacattctctcttcatcttactgtttaacttcaaagcattcttgtgaacagaaaccagttaggactatagaacaagatgccaaaacatgaatgactctgctgaagtcaatgaaatgcaattacaaagtgcagtgctaactttgaattgaatcagaggggccactaaaaaacagtaattagcctaaagaaaaaaaaaagaaaacttcagcataaaatcccctttttctaaacttacttctggtgacagtttcccctattgtccaacatcttttcaggaactcctcaaagaggagtgctcattccattcccactgaaagtacttgaagatttatcttttcagtaggtgagaaggggacacacttaagagtttgaaatatctttcaataggttatgagagtcctctttttaagccagctctggcttctcaaatgtattcaactacagagtctctattttctagatcctgctcccatctctaacaccaattcttcagaaatgctctgagaaatgtactttatgaaaaagtatcctagccatatttcctccatgatttccttggacagatggaagaagggatttcaaaggtttttgtttttcctgattttctacacttccttcccgtagtcttttttcagttttgtctgttgtctgttggaggataagcttccgttaaatctcaggaaacttagaaagcaagagcagggtaggacgtcatcttgatttaactaggaaactgatgatttttagaactggtttctctgtctaggaaaatactttctggtgctattgtgagagacacgtaatgcggaactaaatggatagtgtctggttctatttgctatgtacactgaattatcaatgattatttatagacaagtaacatagagtacaaaggttctgagagttgaaataccaaagaaggtaaaatcagagactcacctgcttacatgaacagttaagagtaggagctggtggtgtttaatagtgtaacatttggtgattatgtaaatattaaggcactttcataccaaatcaggcaacagtgagggttagaaacagtgatcttcacttattacaagcatacttaatctgagagatttatttaatgtaaaaacaattttatgtctgtcattcataggaaagaagttcatgttatgtaaataaagaagaaatgatagacaactcttttggctccagccttatgacattggaggaaataaaaatgatttatcatgggaaacctaaccaaataactgttatttctacactttcttcccactgttatttgcattttattaagagttttgcaaagaatagacttgaaggctactaatctctttttcccttgggtcgctttcttatttcctctgttgcattcaaacagtaagtgtttctgtctgaagcagttctcttcattctcttctttctgaattaatttccaaagactagacagggaattattagcagattcattgcaaatcttagctttttcttgtatatttgtcttgtgcactaattttgtttgtcaatcatgttttcagagtattttaaatatataacaaatagcactaataataaagagagtaaagttcttctatatttcagattgaagttacagaaactttattttactttttttgtttgagctctgagagtctgtgaaagttaaaatttttacagcaagcactgtggtttagattgtgtttccagtgacataactagttaaatgtaaaccagatgtgctttgaagtttatttccaggaatgtacagtgaactgtttcaattcctggttccatgacatttataacataacaacatattatttaaaggaaaactaaatagttgatatttgtagttgtcagcgcatatgtttatagtttctgaattcataattgcttaatttaaaatagaaattttaaaaacacacaatattgaaattcttcttttttcaggcttcttacaaatgaaattaataggagaattatatgtggtctgtccttagatttgttatctgcttcttttatggttagctagtttcttttttacattgtgtttttatgaaaaagtttctctactcggattgatgttttcattagaaatctgtgctatatttacaaaatctcttcttgtatttttaagaggttttctcagtataaacaatctgaaaagcaaaatacattcatatttcttcaaacaatttctatttcaagaattaaattagcacctggatattccgctgcgagccttgctctttcaggattagtttagtttaaagtcctctagttatttgtttatgtgctttcctcagtatagtaaagtgctttataataaattcaaagaaatatttagagaaagaaaaagtattcttgtgaacctagaaaccccagtgttcaatataaaatgccttgaggactattgacctctttcagataatttagtagagaaggaaaactgtgtgccacttctttaaagtgtaccactttaaaagtggttgaatttatactgaaaatgtctttgattttttttatagtactttacctgaagcttgtatttctttttcattaactcatgtgttaaactatttcacattacaggcttgacattttctgtaatcaccatttgagaacataggcatagtgcagttctgcttacttctgaccatcaacaggaattgtttagattatggtatatgatttcatttaggactcaaatcaaataaatggtagagtcccatttaaagcaattatttctacttgatcaagtatttctaatttttattttaccaaaattagttgtattaaaaaaaaactaagcaaactaaacatgtaaatgtgaacagctaaagacagagaaggtggatagggactagaggagagttatgtacccaccatgaatgtttcagtccttatttcctgattcatacccaagagcttggaattaaagcagcattgtgatattttgcatctaagatagactttttaagtttttcagagcctcatgaaatcatcaaagcaatcaacctttgtttgtgcacaggatgttgcacctggaattgcatcttattatgtgggaaaaaaaaatccaatttatgtaaagttgtgatgatgtattgaaggagcatgtaactgaactctttcccaataggctgatcactgtggtcctactgagttcccagtcctatagatgtgtatccacgatgtaaaatgcatgtctccattccccattcactttatgcttcatagatccatattaaaattaccagagccaagtttaccagacattctggcattgcatggcttgttggaataatattttccagaaacacatggcagttctaacagaatcttttccttctggattgtagatataaatgaatgtgaaagcaacccatgtgtcaatggggcctgcagaaacaaccttggatctttcaattgtgaatgttcgcccggcagcaaactcagctccacaggattgatctgtattggtaagattcatacacaatactgatgcttcaatttcactgccaagataagcacagatctcaggccttactacggataaaaacagaatatgattccaaaaagcaaagaattacacattatgttagttgtttttactcaatatcaatatagaggtaaaacataatagcattaattaggcagcctattcaatttttgttagattctagaaatcttccttttatataagtagatatattatgctataacttataatcatttccataccacacacatatgtatatccgttaccctaaaaatgccttgggcagcaatataatcaaatctctactccatacttttttataaacaaacttcaatggcaaacaaaaaatgtgatgaaatttggattcagttaacaggacaagaatttgaagcttttaaacacatagagggaatttattattttttcttttttccatcaatcataaattttggggctctaaggaagagaagataactgttctcttgcttttggaaatctctaggggaaattattctaaaacatctaaactaacatctttcaatatgtctcaaaacatttaaagtcagttcttgataatgacatgggatgtatattaagggagattgatctgttactgcaaggaaaaatccagcacgtaaaagggaacaaaactgtcccagtaatttttccctacttctagcctctgtggttccattcactaggcctacacagttcacatcattagctagtatccacctttaaagtgaactaaatatatattccaaataggaagatatttcagttttacatagtgccaaattaactggcagtttttattatctagccaaaatgaatctttagtttcatatttgtcgaagacaatagctttttcagtattatgtctgacattaaccatatttagctggatgctagagtacctgtttgttacataaagacaaatgaccaagtccaaaattatcaatgaaaaccttctctttggaaacaccaactcctcgtttcccagtgaggtacagctggtgaaatctgagccttgttcagctcttcatattaggaaatagactgccatctgcctggggcattactttttttcttatagaattccgggctgggttgggggggcggtggggtgtgtgggttggagccactaaagcagaaatatttttgctaagccacaatttccaattgagatggagtcattttattatgcaaaggaaatgaattcagcattaatcaattaatgtctcagaaaactaaatctgcatgccacttgagcatcaaagatagtttttgcctcatcatgtagacttccattattttggccttttgcccttatatttattaactaaacaagaacaaagacttttttacccccaagtctttatgtcattcttccaattgccaacaactaaccaccaccatatttttctcagccagtgtattgtgtgctttcatttattgtgattaaatttgaatatcccagtgtagagcagctcaaaatgagatttccctaatatttttaaagtttagacattatttcatgtacttttttattaaaaagagaatctagttgaaaaagaaaataacaaatagtaaaatatacacaggacaagtcatgaatgtataataggactgtcagtggctctcatcagtggttagcctgcaactttctcttccacaggtccaggtcattacattttgaaatttcatgatgtgattactaatttaaaattacattagattatatatgaattagttggatactatgaatatttaaagatttagaatctatttttcaagctttctaaatataaattaatcttcaactattctgcaaactgcttaaaaagactatggtgttctggttgaatatggttaaatgtaatagaacaatgcatttgattaatatttcctgcattatactgctgtggtttgatggttctatataatccagaccagtttccctcatctttggcttgggtctgcgctctgtcttcaacttgcatggatatatggctgtgaccactctgctgtcaaatccaatggtctattctcattcctcaccttagattattagcagtatttgtcacagttcattaatcattctttctcaagaaattttgcatttttggctttccaggcacaactatcttcttcttctttcacttttatggcacattttctctttcctttactgagtcctccctatcctcctaacctttaacctgaagtgttccaccagtccgtctttggacctctgtttctctttctacactcatcctcgagagcctctgtgttgactctcacatttgtcactctagttgataatgaaattctaggcctcaaccttgccaccaattccagatttgtgtttccaactgtctgtacagtgtctccacttggatggctcatcgatatctcaaattcccatgtctaaaaccaaattcctgtgtactggcttgaacctgagtctcccaggaacatttccatctcagcaaatggcaaattcattcttctagctgccaccccttaaaaccttggcagcatccttgatgtctttttctcaagctgtatatgaaagtcatcagcaaacctattgattgcacttgaagtttatccatatttcaaccccttctcacgatcaccacaccaacccccaatccaagtcaccatcatttctcttcgtaattactactgtagcctctaccttaccttcttttcctcatactacactcagttctccacatagccactaggcagcccttttaaaacataaatcagagcatatcattctttgtccaggaactgtgtctaggaaatcctaggcttctcatttcattcagtaaaagctcaagtcctaaccgaagcctgtgctcccctcatgatcttgctcctgctgtgaccttgtttccctgtgcctcccaccccctcagcctgagccagactggcctacttcctgctcctgcgtcagacacatgcccacctgaagtccactgatctatctggcaggaatgtttttctctcgggtttgcagggttctctttatgtctgtattcaggtgccacattgtaagtcacgatttctctgaccatcctacataaaataacagtctttctcctgtttctcccctcaagctaattaccctgctttattttttgagagttcttaactaattcctgactatctacatctgtatctcagttgtgtgtgtgtctgggggccgggatgggcatacacacacaacagtgggtcagtggggagacagggagggaggatggaggaaaggaatcggagagagagaaggatgagcctgtaggggggtgcggggtgctatcaatggatttgtagcttttcaagtgttgatacagcaccagcctaaagaatcacagtgctacagagtgagggctttggagtcagactgcatgggcttgaatcttgatgctgacactgtactagctgggtgaccttgggtaaattggttgacctctgtgtgcctaaattttctcatctgcaaattgtacataattcacagggttgttttaatgagtaaataaattaatacatagaaagccttccagttcctgtcactatcttgataaatcttagcaataactgttgtttatcttacttaaaatgatgacaaggtgataaatcagaactagtccaggtcattaaaagatcatttaaatacacagtagctttacacaaacatctctgtttcctctgtgctatggaatttacagatgtaaatctataacaagcctgcagtttgagacctgacacaaatgcttctctacagttttatccaaactgaacattccagccagagtgaaaaagcaaagtgactgtccagctctttttcacacctttgccctgtaactttttattcagtacaggagagaattgttttgtttcaacctctgtcttggtgtttgggttgttggtaacttcttgtgtttcctagggaatcagaaattactatttctgccatcataggcccatggtttaattgtaattccctttctgtgtttgggggcaggggggtatttttgttgttgaatttagaagtaaaaacttttttttttttttggaagacagggtctcactgtgtcacccaggctagaatacagtgacacgatctcactgcagcctctgcctacggggctcaggcaatcctcccacctcagcttcctgagtagctgggactacaggcatgtgccatcactcccagctaatttttgtgttttttgtagagacggggtttcaccatgttgtccaggctggtcttgaactcctgggctccagcgatccgactgcctcagcctcccaaagtgctgggattatagtcatgagccactgtgtctggccagaagtaaattttatctgtacatattattaaaatgaattttcaaataaatactataggaatacacttattctttgttttcttccaagtcttaatgccacaatatgctgttgaggttttggtaaagtgttttccacatcactcacatcagaatcacctgaggagtttgtcaaaattcagattcctgggctgcataccgggaaacttatgaatcggcattttaacaagcgtcttggtaatattatgcacacttaactgagagccactgctctacaaggaaaacatgacatatgatttgttttagccaattagtatttgctatatcagctttgactggattccttatcactgcttcaaaatcagttaacagtcatttattatttgttcatttgaaaaacttttcattatgccaccaaaaatatactaaccattcgttattccctttaatccacataaaataaaaattttaaagtgcataatatttcactgggtactctaccattcaaaaggaagaacaaatttgatgtggagtcagtctaaaacgttaggaatggttatctctagagggttacaggtgatttttacatcttcctcatacttctctatttcttcaaattgtttaccataagtatgatttactttttgaactagagataaatctacacacacacatacacacattttttaagtgcctgaaagaaaatacatcagatattagccctgggaatgcattagtgagggttttataagtgatgtttattccttcttcgttttatagggctttttcttttaaattattcatcaaataattatcttcagctggagaaatattggcctttgcataacagaacatacattgtgtgtgatttatttagtagggacttaaggtagaaggaaaaggattttatacgataaaatcttaaatatcaaagcatttgtcattaaggatatatcttatgaatacttttcacacaagtgatggtcttatcatgttgttatagtatgttaaaagaaaaaaaaaaagaagggcggggcgcactggctcatgcctgtaatcctaacactttgggaggctgaagtggaaggattgcttgaggcctggagttccaaaccagaccaacctgggcaacatggcaatgcactgtgtttctgagtaccagcataaaatcttggacaactcctcttagaatatcaatagatataattatattaattaccatattatgtgagagagatacatagtataatattttatttacatatatgtaatataccatatttgaatgcaggtacatgaaagtattttcaaagtatatgctattaaaattttttcttttttttttttgagacgaagtttcactcttgttgcctaggctggagtgcaatggcacaatcttggctcactgcaacctctgcctcctgcgttcaagcgattctcctgcctcagcctcccgagtagctgggattacagacacctgccaccaagcctggctaatttttgtatatttagtagagacggggtttcaccatgttgaccaggctggtcttgaacttctgacctcaggtgatccacctgcctcggcctcccaaagtgctgggattacaggcgtgagccactgcacccagccccactattaaaacttttaaagtattcttttttttttttttcctctggtggagatggggttttgctattttcccaggctggtatcgaactcctgggctcaaatgatccttcctcctcagcctcccaaagtgctgggattacaggcgtgagccagtaatctttcttttttagaatactgtaacaaatgccttttgtgtacacagctgaattctattttcttcagaggtaagagctccccaacctttcctgttccttttcagacagcctgaaggggacctgttggctcaacatccaggacagccgctgtgaggtgaatattaatggagccactctgaaatctgaatgctgtgccaccctcggagccgcctgggggagcccctgtgagcggtgtgaactaggtaggagccttattgggagcttctgggcttctccttggaaacttctcctgccactaggacacctctttcactacgcagttccttagtgaagaaggtcagagatcatttacttttgctaaaatgttatctttcctggctaatgttttttacctcttaaaatgtgtatttgttttatcctggtacataagcaggccttctaaatattttaacatggaagggaatcagctagaatctatctgctagatgactgtatcctctggtatccttgtttgcgtggtggctgttttcctcaaatcttttgtttacttttatttttttgagacggagtctcgctctgtcaccaggctggagtgcagtggcgtgacctcagctcattgcaacctccacctcccgggttcaagcgattctcctgcctcagcttcccgagtagctgggactagaggtgcccgccaccatgcccagctaatttttgtatttttagtagagacggggtttcaccatgttggtcagatgggtctccaactcctgacttcaagtaatccaccctcccaaagtgctgggattacaggcgtgagccaccgcgcctgacctgtttacttttaactcagttgtcaatgtgacagcaaaaagaaattgtaggaaaaattatgagaatctcaatacaggtcaataccaatggagttaccacagaaagtcatgtgccctactgaatgaagaggggacaatgatgtccttggaccctaagaccctgccttgcattttttatttagttccatttagatttcattatacttcttcttgagcataccatggttgtattttattctataatgaagtaaaatttgtcctgttgttgttacagatacagcttgcccaagagggcttgccaggattaaaggtgttacgtgtgaaggtgagtgtatccttccttggaagatactatacatcttttgagcagtaagtaaaattaacattcactctcaaactttggagatatttatcattttcaaaaaccttgacatttcaataaaaatactcgatgtaatcaacaaatgctttagcataattctcttaggaaagagcttagagtttcccgtttctcctctttatggagttgtgtaaatttcatgaagacatcgctagcctttaaggcccagaacagctgggaaaggcacatgtctgggccatgttttatggacaggcaaggctgtggtaattttcacagctggtacctaggaaagcgggtggctcggttgtggaatatttctgtttaactcaagtaataatccacattgtattgaatgtggattgaaaatgctatacaggaagtaggaccacacctgctttttctatttgtaacatctttgctcctctgcttgctgcatttccctgcagatgttaatgagtgtgaggtgttccctggcatttgtccaaatggacgctgtgtcaacagtaagggatcttttcattgcgagtgccctgaaggccttacgttggatgggactggccgtgtatgtttgggtaagattcacaccctcatgtattctatgtataaaacaagccatgaatttccttgtttaagcagtggctagtccaaaaccacaagagtttgtacttgagaaaacttgctttaaatgagatatttagggggaaatcactagaggctgttttaaaagtgaatgtatttatgcgaaattgtttctgtttcatgccaaaagttgggactgctcaaaaatctatctcaaaatcttccatttctttaaccagataatttagacaggttcagtctttcacactgagttaatagagtaagaatatgttgaacacagcaggaaagttggagactaggattttaaaagtttacatttgtcagctcattgcagctacaccctgaagacagtggggaaagtcaagagcaaagatatgttgcttctgcttgaaatcattcactgatcctggtccttcctttattgctattagagtttaagttttcttaatagtttattttttaaagatctgtagtgatgaatctctttctttcaacagcatattataggaatagtgatttgacctttttctttattagtgtcatgtttgaacttgaatttcatgattgaaaaagaaatttctattaattttcattgtatgtaacaataatttttcatttacctacagagattttttttcccccaataagctatggaacagtaaatttttagtttataaaagaactttacatagatttgtatttgaaatttagacatgtagacaaagcataaataatagtggtggtgtatgcaatcacctttaaagtatttacatatcagtgatttttaaaatttactgtaagaaaaaagtttgcaataccatacagttattataattaaaacagatttcatttttaactcagtttttgatagcacatttaaatctggattggaagcatgactgtaaaatcatacaaaattatttagaaaacataatatccaaagtacaaaaataaagaaaatgtctttcagatttttaaatattttaaaaattatctttaagtgatctacaatgtttagaaataagtatcatttgaaaatgacaaaatattcccccaaaactatcgaaattttaaaaaaagaaaatgtcaaaaataataatatcagtatggccaaatgactaatgaaatcaagttaccttctataatgaaatgctataatatatgaagatatatcattgattgtaaattattactcagcaaaataaattttcaataacattattcaaaattatggctgggagtggtggcttacgcctgtaatcccagcactttgggaggctgagacaggtggatcacctgaggtcaggagttcaagaccagcctgggcaacatggggaacccccccctccccgtctctactaaaaatataaaaattagctgggcatggtgatgcatgcctgtaatcccagctactcgagggactgaagcaggagaatcgcttgaacctgggaagtggagattgcagtgagccgaggtcgcaccactataccctagccttggcaacagagtgaggctctgtctcaaaaaaaaaaagcattttttaatattctaagatgatatattggattcttcatccttgtactttgcttaaatgcttttgtcaccacttgaattatgctatattaattaattctgtctggggatgtgagaaagtttcaagaagcaactggcacatgaaaatgtaaagtattctgagaactaaagttttggtaaatgctctgatagaacctcatctgaatcagggatcccaaactcagatgcttgcaggagccaagcatgtaacatataaatgagtgacgcgacaacagggagcagtggggactgcagcaaacttcagagaacatggaccatccaaaggtttccaaattcatattttaatttccatgcaaggacaatcgcagcattgataggccttatgtggccagtgtactgacgtttaattcctgatataaatatagagttctcagtagtgtgctgacttttaattgccgatataaacatccatagaggtctcagtattaaagacaggattgctcttcctggctgttataactttttacatgcatagttcagatgcctttcccctctcaccctagtttattccaataagctatgaaatggtacatttttagtttgtcttgagcttcttgagcaggtttcttcagtaacctcacagtatgactcaggccagagttcttaggccacctgtacttatataagactttcacatcttgagaagattcttacttagctgctgacatatgggacggaaccagctataaggagactagcccctcagagccctgtgataatgagacgctggattactatcacacttcacactggcaaagcatgtggctttttggtttgtgttaatgtagatatataagacagaatcaccttctgtagatatctacattcagtctgctgaatcaaaataaacatttaccacagttattttttccttaaaaataggactttttctcaggtagctgggattacaggtacccagcaccatgcccagctaatttttgtatttttagtagagatgggttttcgccatgttggccaggctggtctcgaactcctgacctcaggtgatccagctgcctcagtctcccaaagtgctgaaattataagcatgagccaccacgccacacctggtctgggcaacagagtgagactccatctcaaaagaaagaaagaaagaaaaaaaatagaactttttaattccagtactcagaaatgtaactcattaccttttagaacttgaaagaatcaatattgacagtaactaaagtagtaaacattaatttttatgtgtacatttccatcagggatctcattccctccgttagacagttttcagcttctggaaaggatttaatgtcttaaaatgttcttatcaaagaaatcatgctatttgattaaggaaccgtttccaaactcattatccatatttgtaattaaacagccaagtgctttagtatgatttgaaaataaatctatttgctaacagatgaacatgttatttatagaccattctggtctactctatttttagatgtaggcgactgtttatagatattctaaggtcctggctagcacaggctaagcactgaaatgttggtctgttttgaagttggagggaaaatgtgacatttaaacaaataattggtcccttaaaacggaaaattcacataatccagggaaaaaccatgatgcaaaaggtaaagttggcaggagaaaaaaaaaaactttaaatgtaataatattataacactttcttttgtagtgatcttaatagttgtaacaaattggcaaatagattatagccgatcatttactgtttatgaatgggatctgacagggctgcttaaaaggcacttgaagcaattctctgaacaggaagaattatcattaaaattatcttactttttctaaagtgaacaatacaaaaaaggagtaatagacatgaagcagtcatctcatgagaggaccttttcttcctgagggtttcttgtgagaattaagactgaagaggatctcacctttgttctccttaaatgactgtcattatggagtccattccaggaggtcagggactgcatcttgcccaccagtacaccgcaagggtcctgcatgatgcctggtgctgagcagacgcttgacatgtgactgttcaatggatgtttcaactcattctcaccctgtgatttcgttctcggtgtagatattcgcatggagcagtgttacttgaagtgggatgaagatgaatgcatccaccccgttcctggaaagttccgcatggatgcctgctgctgtgctgtcggggcggcttggggcaccgagtgtgaggagtgccccaaacctggcaccaaggaatacgagacgctgtgcccccgcggggctggctttgctaaccgaggggatgttcttactgggcggccattttacaaaggtaactgcctgcggccagcgccttggtccttcttcaccaacaggaagccttccacattctctgagaattggttttgctttaaatgtttgacttcccactttattttctcagttaaacttaggttttgtgaccaatgttctgtcccaagagtataaatcccctataagatggcattgaagtaaagagataaaacagattgcttatctttctcttctactctttgttcctctacaaccggagatgtcgccctgatagctacatctgtagcaaaaagttacctattcccacttatctttataaaacaagtagtgagaaataaaggaatcagaactctttcttaagcatatagaatctttggccgggcgtggtggctcacgcctataatcctagcactttgggaggctgaggtgggtggatcacctgaggtcaggagttcaagaccagcctgaccaacatggtgaaaccccgtctctactaaaaatacaaaaattagccgggcgtggtggctcgcgcctgtaatctcagctactcgggaggctgaggcaggagaatcgcttgaacctgggaggtggaggttgcagtgagccaagattgtgccattgcactccagcctgggcaacaacagtgaaactctgtctcaaaaaaaaaaaaaaaaagaatataagatctttttcaccatattgaaacttcctgtgtgatatcagtgtgatcactgaaacatttagtagccctgttttttacttggatgcattactgttgtccatcatgatagatttttaacttaaagtgatggacctaatcgtttatatcaaccggctctacattctggcttcattctgcttttagacatcaatgaatgcaaagcatttcctgggatgtgcacttatgggaagtgcagaaatacaatcggaagcttcaaatgccgttgcaatagtggctttgctctagacatggaggaaagaaactgcacgggtaagatggttctgctgttttatttgataaactctggctgtctttcctttactctgtttgaaaggactgccctaaaaagctaatcctctcattgagaacatgaaaatttttatttatttattaatttctttttagagaaaaggtctcacttagtcgcccaggctggagtgcagagacatgatcatggctcactgtaacttcaaacttctgttctcaagtagtccctccacctcagcctcccaagtaactgggagcacaggtgtgcgccaccatgcacagctaattaaaaagttaattatttatttatttatttattttaagagatggggtctcactttgcttcccaggctggcctcaaactcctggcttcaagtggtcctcctgcattggcctccccaagtgctgggattacaggcttgagccacggcatccagctctgtaaattttttaaatttcttttctctacacttaaaccagttctccaaataaactcgttgtgagagaactgcaaaacatcatgaaaatgctgtttgttttatatttaggaacagcatacaaatatgattttcaaaatatatgactactaaagaaatacagtcattaaatccacaagaattatataaacttgagtagtgttctcttaaagattttaaggtttgtgatatagaagttattacttcttttcctcatctgtgaacaggaatcttaatattagttttcagtcaccatccatacccataacattctctttgaacaagatgtgaagttctaactttttctattagtataccatgttgttccagacccttgagctgtgtcttcaggatctcgttctcagcactctctttgttcgtattctccatgggatttccccttatcgcactccctcctgcctgctccttcttcctgacctcacggccacatctttcttggctctttcctgtgcctcctcagccaaggctatctctgagcttttcacagctgtccatctggctttctgaagtcctgctgccttgaagtctgctcaagccctgtgccagtctccagagcttcatcccctcacctgttttctccactctggctgctgcacttggctgggagagtctgaggagtgctgcctgagattactgcattcacctccaagtccttgaagctgcttgacaacactcatattcacctccattcatcactttctgaattcctctcagcactgcttctaaacctcttccctgacttacatgccctctcctctaccctccacccccatctattaccgttctccttcattgagaataaatctgattgcctgcatccttctcacacagcctcctctctagtgataacatctcctttatcccgctgggcatggtggctcatgcctgtaaccccagcactttgggaggccgagacgggcagatcacctggggtcaggagtttgagaccagcctgaccaacatggagaaaccccgtctctactaagaatacaaaattagccgggcatggtggtacatgcctgtaatcccagctactcgggaggctgaggcaggaggatcgcttaaacccaggaagcggaggttttggtgagccgagatcgtgctattgcactccagcctgggcaatgagagcaaaactccatctcaaaaaaaaaaaaaatctcctttatcccccactccctctcctccggtgacagagaatgaggtgtgatgctctacctggatttggggttaactcctcttttccctccttcccagctcctgctctgggttgtctcagcaggttcgctcctctctcctctctctagcatctcctcttccctgcttcctgttcctcaacttatacacaggttcaaaatatctcctcagcccttcttttctctcaagctaccatcccgttttcctgctggtaagtctcacccctctctttcaaccagccatttgtcctgtaattttgacttttgccctctgtcactcaggcacatacatgtatactcatctactcttgcaaaacatctttgtggtgttaaaacatctctcctggacctctgcttgccaaatctctccttgagattttcttttctcttagtttctgtggtattttccggtcttgatcatccttctatgcagatgatgtttcttctctaacctctacagattcttcttgcctttcccatttcttgggtgttgccagagtcctctactcagcgtcttgcctctcagagtttcatctaccatcatgacttcagagatggcctctgctgagctgactcccagaccctgtctctaactctctctgttcttcctgagtttcactcccacatttataacttcccatctggaaagtttgtctttgttttgatctttctttgctcttccccctaccctgtactttatcctactagggacttccctgtatgcattaggagtataattttgaacaggattgaagcctccaattgaattttgacgtctctctctcccaaagtgaaaaagttatgcgaattctttcattaaactggctatttcaattacctgtgatatttcttcagacagaggcaggttaagctcctcaggaaacagactccaaggcagagaagagcattcaggaagtttatcggggcttgctcctgggatgaacaatgaggaagggaagggaggaaagcagaagtgggcagagaaagaaatggggctatgatgcagtcccactgaagtcctcagcccatgccactgggagttctggaactgggatggcccatcagagttgccttgagtagggcatggaagccatgcagttaggtacctgcaggaccaatcttgggatacagctgcccagggaatgggggaagaggtcctcttagaatagtgggcatctgagggctttctgccagcgacactaccaatagctgacggggagggggagtaagtccttctttcctgaagagggacctgggtgacatgtcacagtatctactgtatcacagactcctccaggatctcccaacctgttaagttcccacggtcaaatccttcactgccacaacccaggttaaccatccaagcagggctggattgtgtaacttcccactgaacaacttccactggtataggcaatcctggtgctggataaagaagctcagggttcttccagttctgaccccacctcttcctttgttgtgaaattagccaaagttgcttaatgtctctaacacattgacagggctgcattgctctggatatactgtgaagttctgtggaaaattgttggctctcatcttcacagcaggaagggccggtctcctcccatgctgggggcttttagtaatcctaccggtccgtcctgtacccacactcattgtcagcctctccagtccagccaatctgtggcttactgctccctgaaatgcttcctttctcttcaccggtgcgcttcatctcttgcctctctattctgtatctttaaagctagcatttctgtacaaccttcaagaaccaattcaaaagccacaccctccaaattacccattcttagcagagaagtttgcatatatatatatagagagagagagagagggagagagagagaaagagagagcactttctatgagacaggcactgttctcagcacttaacaaatagtcatttaactctatgaggtggattctatgacaaataaggaaattgaggcacagagagactaaatgattttcccaaggccctgttctcagtagatgacagactgggatttgtagccaggtatctggttctagaatccacactgtttatactatgaaactcccaccacatcacattagccaaagattgtccctgctccaccctagaacacattcctcatatgactcttaacaccagtcctagatactgatagatagaaagaaaattaatatacatattgttagctacttaattgaatcaataaattctgttaatatgtttgtttaaaagaaagtatttacatttttttcgcatggccagtaatgagggaaataaataaagactcctgtaattggagaaataaatacagaaaaactaagtaaaagctggcagaaagcagagactgagacccccctctcaagagaacatgcacaaattatgcactaaatcctgtgattttaaaacttcaaaattaagttcatcaaaataaagagatcgtagtggggcatttttccccactgacagatttttagattaaaaacttttgatttttggactaaaacatttgtaaataggtcatgttttcttaaacatattttatatagacatgacttctctattaaaaatcttagttataagcataggagatttctcagagaaccctgtgtttgagaatatagttgctgaagattatttactgtaatatataaaaagaggaaacaaactcacccacacagtcctcaggtgttggtgacagctcatgtcaccaaagggcttactaaatcaataagctctttacatctgaatatgacacaaaaacacaaattggggcacacaccatggccctgccctatgtgtgctctctggctcagggttggtccgtcgtggctgcctgtctctctggggtttgccagtccctcctgcacagagacaggggccctgccttcacatgctgcgacctggggtggcatgggctagtgtagtagaccagcactgtcttccagtcacacatgaggtttcattccatgggggcctggctgcctcatttaccacctgcctcattcagcccataccacagttgcagggttcatccttctgttaacatttctttctttttctttttcttttcttttttgagacaggttgtccctctgtcacccaggctggagtacagtggtgccatcatacatcgtaactccgtgcagccttgacctcttgggctcaagcaatcctcccacctcagcctccccaataattttttttttgtagagatggggtctccctacattgcccaggctggttgcaaactcctggtctcaagcagtcctgcctgggcttccccaagtgctgagattacaggcatgagtcaccatgccccccttttctgttacgatttctaagccacaaaaacaaatacacaattcagaatttttaaaggtgaaaaggcaccacttgcctgttggcatggcagttttggcagttggggaaaggaatgtgcctcaggtcccaggcccttctatctgggtctactgaaaacatacccttgtactgttagccagcaatttccccaacttttcaagcatgcagcaccttcgcttggaaggccaagtctatctcattcaatttttaaatttcttttaaaccctgtgaattagacatcgacgagtgcaggatttctcctgacctctgtggcagtggaatctgcgtcaatacaccgggcagctttgagtgcgagtgcttcgaaggctatgaaagtggcttcatgatgatgaagaactgcatgggtaagcaccgtgagctcttcctcgccagcttgaaaccatactagcacagactcattcgtgcgcatgacctttgcttatctctgggctgtgaacggcatgtgtggccagcatctgtggtgagagagagaagagatttaaatgtcagacaggaaatgcgctcctggatagctctcggggagccccaacctcttggcgccttcatggcaatgagatactcagattggatcctgtttattcatagaatctaaaatcacacagactgtttatttaggtgggactactttaaaatgcatggcatcgtgtggtggccccaagatttgtattcagtcatgccaatcccatgttattgctcttatttgtgtactattacaaactcttttggtattcccaaccttttagcccactgtttaattttcagtatgatataagacctacctcataggatatagtaggttataagtctaagattctccttcaccctgattagcgttatagacaccaggataactgacaacaatatatcatgagtccgtggtgatataaagcaaatattatgtatttctaccccttgtgagcctgctgatttcatgcaattaaatttcttgaaagcttactacctttaagagtagaaattttagtttttctgttggtcgtaggaaaagtgaggaaagcgttatcccatctcctatgaagcatctctcttccactaactcacactctcacatcagataatattctttctcccacgctgtatgtgtgaatatttttccctcagagttctttaatggatctcacgtttttacctttcagacattgacgaatgtgaacgtaaccctctcctttgtaggggtggcacctgtgtgaacactgagggcagctttcagtgtgactgcccactgggacacgagctgtcaccatcccgtgaggactgtgtgggtgagtttatctcctcagcacataaacctgcccagcacaactggtaaagaccagggatcagttctgacaaacctgttgtttgaggagcacatgaaatctagcttattaaaaggtggaaattgagattccctacatctggatgcaggctgtgtctttagtggatgcttgggtgacacactcgaataagctggcattcttctggttggcctctttttttataacaagccacgtgattggtccctgtgtgaggagccctgtggaagtccttgtggtctcatcctccattaggaaaaaatgggaaagctactgtgtgcgttgtgcacctttgcccagcgtcttcccatccactcggcagactccgctctacgcccctgtgcctgctcacgatcggcttgcacatgtgtgaacatggcgctcccttaacccacttctcatggaaacactgggtttcctcatttgccctgagctctgtagggctgccagaaaggatatgagaagactaatgactggtctttgggcgttgcaacctattgcttttcacaatacatgaagatctctggacttactatgttcctagtatactggctttaaaactttgttttagccagaaagcatgttcttcataggaactctttcttaaaaccgtaagcaaataagacagcctaaaatagaacagattgcacaccaaatttcaaaacataatttgagcacacctttccaatacacatatatttatttataagccttatgtattgctttgctagtatatgaggtgaattttgtcatagataaatagatattttaaaatgataaatgaaaaggtttttatgttcttatttcattttaatagcggtacaaaaggctttttcacactaataattgcagaatatttattcatggttgaacatattgaggtataatgagtcacagatctaagtttactttgttatttagttttcgtggatcttacagcttaaaaacgtatcccccaaaggaacaatgcagaatataaaatatatatttctgtataatatacacttagtgatcataagcataaacccatgccatataatcttcttggttattttgagaatttggaataaatttcttgttatatctgattatactgtactgttttttaccttaccttatacctgacaagtagtttacataaggaagtgtatcaccctgccattttcttctgttatcttgtgattacattattggtactagtttatttttaaggcacctgcccatattataggggttagtttatttttaaacaggcagtgtgatttgtagattactatcccgacacacaaaacataacacagtgtaaacaattaaatacatgagggccctattgtcatgcctctgtcttgtggaaccatcagtcttccatcagtatacttcaaatcatgtaggcaacacttcaccatctaatatagaccaggtgagcgtgccagtgtaagttcatatattaagtagtatttagcttcagttctggcatatgtgaaatctgtgtggtctaacatgatagtcactagccatatgtggctatgtaaattcagttaaaattaaataacattaaatattccttagttatactgtccatatttccagtactcagtagcacatgcagctgtgtattagaccgcatagatttgggagcagttgcatcattgtagaaagctttactcaacagtattgttgtagatggaaatagagaatccagcattttctttcaatcccccaggagaacattttacttcctcgtgaagtacacaaacccctttggagaccactgctctggtgaagcacctttctgatggctttagtgagtggacattgtgtaaagcattacttctgtgtatcttttatagatattaatgaatgctccctgagtgacaatctctgcagaaatggaaaatgtgtgaacatgattggaacctatcagtgctcttgcaatcctggatatcaggctacgccagaccgccagggctgtacaggtaaggggagaccaagcaggcctgaaactcatatgtctcaaatcagcctaggaaaacttttggcgctgaattataatgaaggctatgcaaatcctttgtcccaaaaatgaatgtaagactaggggcagatctcagttattgtgtgatcttgcagcagactcactcatcttaatgtagaaaatgctctaatccccatagttcttctatttctgagttaatcttagggtactgcacttaaacatggaatgctgcctaaaatgaaggtgaaagaactaagaaagataatgttcaatcaacacacatagtggggagaaaaattcaaagccacattagcattatctgtttaaaaagaagaaaactccttttaaggaagcagacctgacaatgtggttgcaatgctgttttcacagatattgatgaatgtatgataatgaacggaggctgtgacacccagtgcacaaattcagagggaagctacgaatgcagctgcagtgagggttatgccctgatgccagatgggagatcgtgtgcaggtatagaaaggaaaacacacaggttttgtacatctaactaattttttcttgaaaatatggctccagatattaccaagtggaaccagatagaaaacaaaaacatttgagattgatgaacgacatttttattttcatttgatgctaattttgtatcatcagacattgatgaatgtgaaaacaatcctgatatctgtgatggcggccagtgtaccaacattcctggagagtatcgctgcctctgctatgatggcttcatggcttccatggacatgaaaacatgcattggtgggtatcataagaaaggataaacatttatacacacacatgcacacacacccacatgcacacacaagcgtgataaaaggaaggctttttctgttgttattttaaaaattcaaatcattttactagaactgtaaaatctcaggaagaattacttttaaaaatgtctaaaggcaggttgtatatttatctataacacgatgatttgcggatggattatattttagatcttgcctgtgtatttcagtattatgctattcagtgtagaagatagcttttaaattactgtgatgagcacatactaagatattgaaaataaattttctagatgtcaatgaatgtgacctaaattcaaatatctgcatgtttggggaatgtgagaacacaaagggatccttcatttgccactgtcagctgggttactcagtgaagaaggggaccacaggatgtacaggtaggtttcaagcttgtgttctctgtatttcaacttctcagatgtcaaaggccaactttcaacatcatttgttctctggcatctcttagagcggttacctgccaccagactgtgactgtgtgtgtgatgagtgtgtgacctataggatgtgtgatggatttggctggtctctgtggtagcacgctgtctgagccacccaccgtggggctggctgtgggctgtgacagagtgagtgagtaggagtacagtctggttcccatggccctgaccacttatggtcgttcatgcagcatcagtcactttctgagtatgactgctgcccgcttggaagacattcatgtacaaagagcaccaaaagacccgaggatcccggttgccatttacctctgcacttcttttaaactagtaaaaattaatcaagtttcattgagactctttccctttcttcctttctcccatcttttcctttcttgtttgctcttctgtttgcttttgtcttctcttctctgtgcccaaattgcctttctctttttcctctcttcactttccttctttgctcactttgctcactttgtcttttgttccctttctctactactactactaactagttttagccttttgcatgcaggtggggctaggatgtgccggggtcaaggttttggatcacgtattcctcagtgcacaatttaagacttatgtgtgatattttttcaaggcaggtggtggaagacttaagagtccaacccagcccttaagctgacccctccagtaaggggcagattataaaagaaggtgttctttgcatgttcaccactgacagggttgatgtgaagccagtagtgtgtgtgtgtgtgtgtgtgtgtgtgtgtgtgtgtgatttcagcatctataatatgtaatcgttgaactagatagaacacattactatttatagtcaagaaagctttggagaaccaaatctacataggttatacatacatatatagggatatgtgtgtgtgtatacagacacacaaatacacacacacacacacgcacacacacacactggcgaaagcatctggctactttccagataacattcccagtgaatatttttctataatctcaaataagtagaagaaataaaaatatacacctaaatgaatagttttttttaaattctgtaaaatatttatattgattttttaaatgacaaatgatcatgtaattttaaagagaataaactattactttttttaaaaagttagattcttatcttcatgaaaaatatgtaataaatatcaataggaaggaatagcaccatctattattggaaataagatttctcttgatctgtaatcgaatgtcctctttatggtgttgtgtctgaatctgggcagggaagaaggccccaggataatacacatacctgccagggagcaacactgctgtgtctctctctcttctactggaaagtggctgacagttgtttctagggaagaacttgttttattaggatcatgaattttccaagtcctcttggagcctacaaaaattaaaaataaaagttagttaggctactcttttctccatacggttgcatctttactttaaaatgttacctatacaaaaatatacttggaagtagaattaattagtttgtattttgattttcttcttatgaattatggtttatcagatgtggatgagtgtgaaattggtgctcataactgcgacatgcatgcctcatgtctgaatatcccaggaagcttcaagtgtagctgcagagaaggctggattggaaacggcatcaagtgtattggtgagtttgcaaatgtaaatatcctttgctaaggcacaaatttttaaaggctcttttttgcatggttgtagaatcatgctcttcacttttattaattcctttataaaaaggttatcttagttgcaagataattcctgcctaagggtgtcctttacccttaatataaattatcaaaatttcaacagtatgccttggcacctgttttttaatgtgtttttgttcagtaaaaattgatatgcagctggtgatccaaacacagctgtatgatgaaaaatgactagtatgttcttccaatcttttcaaagaagtaatcagtgagatttaaaatccagtggaataaatggagagcaatgaaaaggttttttcagataacctaattttttagtaagtcatcaataccaccatcttattagaaaatagaattcttcttacaggaaattgtaaatgctttcttgcattccaagaggtcttatttgaagaaaaaaaataggcaaattctccaagttttatggttcttgagccagagtctaagaagtcttttatatctgagagggaagggactagaatataccctgagtgtcattcacagttttgtgtaatatgcttagtgtttcacatgccttacaataaagcatttttccaactagtaagaatttctaggtcaatttaaaacagaaaagaaagcaagctaaactcacttccccctgataacttacaaaaaatatataggccctcagtaaggattaaagaatagctttaagatctcttaccaaaactataagttaatttgaatatatacttttttatccattcaaatatttcatacttatcaaaagtttatgtactgactatagaatttgaagtatcagagcttccaaataactgctaaataacatcctgcaatggcttagtgaagtgccagcctctagtccagccatctttccagggttactatcataacttttcaaccataccctcattcccattttcatagccccatgtgcctactctttttctctttttggcctcccatttttatgcttcttgtccatctgtcattttggccaactattgcaaaacagcctgcctctgatacaagacattcagctgtgtccagcctcctgtgctccaggatgtcacccaaattcatcctctcctttacatcttctttcccctactctagtcccaaccagagagagtttctgtctctctcacatgccctcgctcttcgtgtctgctgaatgctaaaagaatcccctctggtatgttggcttgttccctctctggccctcctgcaatccattctccacgtagcagcaggaggaagcttttaaaccatggattcgatctcttcatagtcttcactataacccattgaattcgggataaaattcagcttccctcccttggctgcgggtttccactgtctctctagcttcattgtccatcaccctctgtctggtgcattctgctttgccactctaacctcctttcattttttcagtcacactgagctcttttcctccttggtgtcttaccatgcactcgtccctctgcaaggaatatccttccccacctctgttcagcaagttaattgtttctcatcctcaggtctgaccttaactaaaaactacttcctcaatgggggcatctttgttcctgcagcccaaatcagatgccttttttattctctcatggcaccttgtaacttttcttcatggcacatatagcaagatttagtttttttctgtgtttaacatctgtcttttctgctcaactaagggattccatgaggtcaagaatcatatctctgtttcctcatctattaaataaacttaaaaactctttgttaattttcctgctctgaaattcagtatcaccttcagaattgattcttctactgataaggaaaccactaataaaattcaccctcagtagaagtcagaatgagatctaacactaatttgctttaagctgttaaaaaattcacgttgactagatatctcacaaattgcttgaattcataattttggcccacatttatagcctggacattggacattgggtctgagagcttagcgaattagaactgtgatcctgcaaactaaaatgcctgtcatttatccagtttatatgtaaattaagacaaacgataatctttccaggtgcttaaatgttccattttcatttctgaactttattgctgtgttctgcagatctggacgaatgttctaatggaacccaccagtgtagcatcaatgctcagtgtgtaaataccccgggctcataccgctgtgcctgctccgaaggtttcactggtgatggctttacctgctcaggtgggtgacagtcctgaggtgtgctctgacgggatggtcatagaacactctatatgcttccttatttgaagaaaattataattaaaggagacaaaagtaactacctctttttttatacttgacttgcaggtgactatgtatctttctcttacattaaacacaaaaacctgaatgactttccaaatatattgttggaagttttcaaataacggcatttgtaacaatcatgtactgttaatgactcgccattttatcttactcatttgtaacacagtggttaaaaaaacacaggctttgtctggatcagactacctggattcaaatcttgcctatgccattttttgcctgtaactgtaagtgaattacttaacttgtctgtcctgatttaaaatgcaatagtaataatacaattttcttttcttcttttttattcctaaatgaatggcatgggaaaactgttcagctttttaagataggatatatgacctatccaatcactgctatttaatgtgtttatcaaagtctcagtagtttatcacctggcattgaaaggattaaatggaataatacaaataaaggacttagaagaacacatcacaaaatttcagtaaataatagcttctgtttggcttctattcattcatactctttgaggataaagcatcctctcattatatgcatgtataagactagataatcttgctggacgtaaagttgaatactcttcagtttataaaataagggtttctcaattgattttcagtacacactttaaacccataattaacggatagcctaaatttttttcaaattgtggacatcaaaaatgcagcctcatcattttcaaatgcctgtttaaggaaacatgtttattcagttttaaagcttcataacttgtagccttagagtttgcatctttcctggcatttctccgcactgtggtgtcaaggaaagagcatggctttcatgtcagacacatctgcaatcagatcctggctcagtcaacatgcattattagctcagtgtggctgtgtcagcttacttggctgctcttagccacaggttcttcctcttctaaacctcaggagattggtgaattcagtgaaaaaatgcatgtcaggccaccagcacagcatatggcaaatgacaccctcactaaacagtgatttttccttccctcttattctgcttgatagaattaaattatctttaaggtctgtgagtaatgtctgtttgtgtaattaagataggagtatttttataagattgtaatgacatgaaagaaactttccccattcccatagtgtctttaatttgctttaaaacacttgaattagtgaaaaagccagttatttattcgaatactataattttctcaaagaatgatcaccattttaagattaattccaatgttctttttcatatctaaataatgttggcatactactgacaagagaaacaagacaaatgtgagagatgtctgcgtttctcctattaataatattacaattggatgttagggtgcaggttaaatagcttttctttaattatattacaattgaatgttagggggcaagataaatagattttctctcaggttgataccctcctttaagtgaatgtgattaactgttgtttcatgttaatgagcattaagtcaagccagtaaaactgatctatttatagagcaaggagaaaatgtgtcatgaaatttggaacttaacagagatgtaatttgcttttttgcacagatgttgatgagtgtgcagaaaacataaacctctgtgagaacggacagtgccttaatgtcccgggtgcatatcgctgcgagtgtgagatgggcttcactccagcctcagacagcagatcctgccaaggtgggtcaccaggattccaactcattttcaagttggatcaaccacagtaaatgaaaccacaacaagggctggaacaagctccacctggaagcagaatacatagcacatgctgcactataaaagtcattcgtttaagcgtggattattttgccgaatgaataatgatgatggcggctttcatctcttatgaagttttcctggccaagagccagtagttggaagtttggatcattcttttttcttttttaaccatttcttctcttctttctcttttttatcactaaatgaatgacatgtggagaaactattcagcttttaaagtatgctccattacttgtctcaactaccactatttattgtgtttatcaaaatcataaaaagctcatttttggcatttaccttcgtggttgagactgctgtctgtatgtctgggaatggaagtcctcttcagggattcagcaagggctgtacttttgcttaatactagtggttccttattctaagtgatgacatcatccacctttcctagaaatgggtctttgtgcctagtatgatatctttccaagaaaaagaatttggattttctattaaattagaaactcaattcacattatatatagtttgagccatcattgtgttatgaatagggactatatgaaaatataaatgaagaaaggagagattgaaaataatttatacaccatagggcttcagtagaatttatgattcacagaaaacctttaaaaaaactcagtttgggccaggcgtggtggctcacgcctatattcccagctctttgggaggccgaggcaggtggatcacctgaggttgggagttcaagaccagcctgaacaacatggagaaactccatctctactaaaaatacaaaattagctgggtatggtggctcatgcctgtaatcccagctactcaggaggcagaggcaggaaaattgcttgaaccctggaggcggaggttgcggtgagccaagattgcgccattgcactacagactggacaacaagagcgaaactcagtctaaaaaaaaaaacaaaaacaaaaacaaacaaaccaacaaaagaactcagttttccagtcatgcagcctcatgaaaaaaaaaaaaatacctaactgctgagcaaaaatgataaaatgaaacatattaaaaacttccccctacatcagtatctaaccagaatgaacagaattggcaagtactggcacacgtgcacacacacatatacacacacaaacacacaattcatcagcatcaaccaaacaaaaccaaattatacaacctgcggtggttcagagtggagcccaactctgctccaccatcagaagtggcactgaagaaagaaagtgtgccaaaagttcatgaaattctccagaaatagcaaccaatttggagagactcagaaaaaggggatgaacagttggccgtagggaagatgaagttggaaactgaaagcgttcgtgcttctacgttgacccacaagattgggcagaatctaatccattttatataaggcaactgtagggtgagttcctttttttcccaatcctggtttcttctaagcactgaagcttagtagtagaattagtagaaaatgtgaatcaatgtaaatgtggaatgacatgatttattatctacattagcttgacaagagttagtgggagaaggaacaggtcagcagtagccactttcaacaacataaattctttatacccagacaggatttttccttcctaattgtgtattactttatgggtggcataggccctttcagaacttccctctcccccaagatggtgctaaatagttactgtttactgtacttccttcacatctagttttctcatatgtcattaccacagagagaaactcctaactgacagggaagctgagggttggcacacctgtagttcaccctcagttggaccctctgctccattcagctgaacaccagcttttgagatccaaaaaatgtaattccatggttctggccattctccttgtttttctctcctctccacaaggtctgggtcatctggacagtttctcctgaatttactattttaatcccttgttgtctacccatcttattataaatacatgatcctccgatgaatattttccactaagcatccacttctcaccaaagtctcagaatttctatagaattcaaaaaattattgaagttggccatttcccagtaaattccaccaaaatgggggaatataaaacctggaggagcccctgcaggaacatgagagaggactccattaaatggaacagacctacatacagaccattttctataatttctgaggagagagcaaaggctaagttcatcaacatagagcccagaggagctctccccattctcaatcttctctccctccaccttacgaaactttgggcgactgaatacagctttaatgaaaccgaaaccagctatcttccacataaagctctgataaagaaggaaagatatcaagagatgttatttaaactgtactaaagtagatagaagctcttgaaagagcagacaaagtagtgtctatacaagctgaaaaacagtagcaactatgcaggcattctgtgaaaacgaaaggaagaaaaacacaaaatcagctaaagaaccaacccacgatggaagaaaacaactcaagaaataaaacaaattttccataggtactttatgccatatatgatcttaataaaatcataaatgtagttgaagaagtttgtagagattataagagctatagagtaaaagggagattgtagaatcaagggaagtaagaaatggggaccaatacagcaaaataagaggactattaaataaaaacagcaaaaaacagaggacatacagatgaaaatgtaattgctagcatagagaaagggcctgagataataacagtggaaagaggaaagagaaattaacactattagagaaaagacaaaaactataaacatcagtataattggtgttgctgaagagagcccaaaaaatcaactagaaaaaaggtactaaacaaccaaacattttcctgcaataaaacaaagaactgaatatacaaagcctaaattgtaagacaaagacttagatttgctacatttgtcaactttaatcatagaggaggattgaagacttcagatagaaaaggcaacgcatctcacgtgcaaagacacacataggcttaaaataaagggatggaggaatatttaccaagcaaatggaaagcaaaataaaaagcagagattgcaatcttagtctctgataagacagactttaagccaacagagatcaaaagagacaaagaagggcattacataatggtaaagggatcaatgcaacaagaaaagctaactgtcctaaatatatatgcacccaatacaggagtacccagattcataaagcaagttcttagagacctacaaagagacttagactcccacacaataatagtgggagactttaacaccccactgtcaatattagacagatcaacgagacagaaaataaaggatattcaggatctgaactcagctcaggaccaagtggacctaatagagatctacagaactctccaccccaaatcaacaaaatatacattcttctcagcaccacatagcacttattctaaaattgaccacatgattgaaagtaaaacactcctcagcaaatgcaaaagaatggaaataataacaaacagtctctccgaccacagtgcaaccaaattagaactcagggttaagaaactcactcatggccgagcgcagtggctcatgcctgtaatcctaacactttgggaggccaaggccggtggatcatgaggtcaggtgatcaagatcatactggctaacatggcaaaaccccatctctactaaaaatacaaaaaaagttagccgggcatgatgccgggcacctgtagtcgtagctactcaggaggctgaagcaggagaatggcgtgaacccgggaggcagagcttgcagtgagccgagatcacgccactgcactccagcctgggtcaacagagcgagactccatctcaaaaaaaaaaaaaaagaaaaagaaaacaaactcactcaaaactgcacaactatatggaaactgaacaacctgttcctgaatgactactgggtaaataacaaaattaaggcaggaatacagaagttctttgaaaccaatgagaacaaagtcacaacatgccagaatctctgggacacagctaaagcagtgtttagacagaaatttatagcagtaaatgcccacaggagaaagcaagaaagatctaaaatcaacacgctaacatcacaattaaaagaactcgagaagcaagaacaaacaaattcagtagctagcagaagacaagaaataactaagagcagaactgaaggagacagggacacaataaaccctttaaagaaaatcaatgaatccaggagctggttttctgaaaagattaacaaaacagatagactgctagtgagacaaataagaagacagagaagaatcaaatagacacaataaaaaatgataaagggggggatatcaccactgatcacacagaaatataaactaccatcagagaatactataaacacctctctgcaaataaactagaagatctagaagaaatggataaattcctggacacatacaccctaccaagactaaaccaggaagaagttgaatcccttaatagaccaataacaagttctgaaattgagccagtaattaatagcctaccaaacaaaataagtccaggaacaggtagattgacagccatattcatccagaggtacaaataggagctggtaccattccttctgaaactattccaaacaacagaaagagggactcctccctaactcattttatgaggccagcatcatcctgataccgaaacttggaagagacacaacaaaaaaataaaatttcaagccaatatccccgatgaacattgatgcaaagattctcaataaaatactggcaaaccgaatccagcagcacatcaaagagcttatccaccacgatcaagtcggctttatccctgggatgcaaggccggttcaacatatgcaaatcagtaaatgtaatccatcacataaacagaaccaatgacaaaaactgcatgattatctcaaaagatgcagtaaggccttcgataaaactaggcctttgataaaataggcccttcaataaaattcaacaccccttcatgctaaaaactctcaataaacttgatatagatggaatgtatctcaaaataataggagctatttatgacaaacccacagccaatatcatactgaatgggcaaaggctggaagcattccctttgaaaactggcacaagacaaggatgccctctctcaccactcctattcaacatagtattgaaagttctggccagggcaatcaggcaagagaaagaaataaagggtattcaaataggaaaagaggaagtcaaattgtatctgtttgcagatgacatgattgtatatttagaaaaccgcatcatctcggcccaaaatctcctaaagctgataagcaatttcagcagtctcaggatacaaaatcggtgtgcaaaaatcacaagcattcctatacaccaataatagccaaatcatgagtgaactcccattcacaattgctacaaagagaataaaatacataggaatacaacttacaagggatgtgaagggcctcttaaaggagaaccactaaccactgctcaaggaaataagagaggacgcaaacaaatggaaaaacattccatgctcatggataggaaaaatcagtatcatgaaaatggcccaactgcccaaagtaatttatagattcaatggtatccccatcaagctaccattgactttcttcacagaattaggaaaaactaccttaaattatggaaccaaaaaagagccagataatcctaagcaaaaagaacaaagctggaggcatcacaccacctgacttcaaactatcctacaaggccacagtaaccataacagcatggtactggtaccaaaacagagatacagaccaatggaacagaacagagccctcagaaataataccacacatctacaaccatctgatctttgacaaacctgaaaaaaacaagcaatggggagaggattccctatttaataaatggtgctgggaaaactggctagccatatgcagaaaactgaaactgcacccctttctttccccttatacgaaagttaactcaagtggattaaagacttaaacataagacctaaaaccataaaaaacgccagaagaaaacctaggcaataccactgaagacataggcatgggcaaagacttcatgactgaaacaccaaaagcaatggcaacaaaagccaaaattgacaagtgggatctaattaaactaaagagcttgtgcacagcaaaagaaactatcatcagagtgaacaggcaacctacagaatggaagaaaatttttgtaatctatctatcggacaaagggctaatatccagaatctgcaaggaacttaaatttacaagaaaaaaaacaaccccataaaaaagtgagcaatggatatgaacagacaattttcaaaagaaaacatttatgaggccaacaaacgtgaaaaaaagcacatcctcactggtcattagagaaatgcaaatcaaaaccacaatgagatatcatctcatgccagttagaatgacgatcattaaaaagtcaggaaacaacagatgctggagagcatgtggagaaatgggaacacttttacactattggtgggagtataaattagttcaaccattgtggaggacagtgtggcgattcctccaggatccagaaccagaaataccatttgacccagcaatcccattactgaggatatacccaaaggattataaatcattctgctataaagacacatgcacacatatgtttattgcagcactgttcataatagcaaagacctggaaccaacccaaatgaccatcaatgatagactggataaagaaaatgtggcacatatacaccatggaatactatgcaaccataaaaaaggatgagttcatgtcctttgcagggacgtggatgaagctggaaaccatcattctcagcaaactaagacaggaacagaaaaccgaacactgcatgttctcactcataggtgggagttgaacagtgagaacacgtggacagggagggaaacatcacacactggggcctgtcggagggtgaggggctaggggagggatagcattaggagaaatacctaatgtagatgacaggttgatggatgcagcaaaccaccatggcacacatacacctatgtaacaaacctgcacattctgtacatgtatcccagaacttaagtataatttttaaaaaatgcaattcatgagctaaacagaaatattcaatatcaaaagacattagatccatgcccacagaattctgaggaaatgtgaaaaatattatacttaatattaattgtaaagataataagcattttcttacacatgaaataagtcaggtagaaaacacctgtgatttcataaaagtcccacccttcttggagaaagaacaatcagcaatgaaacacagccaatcaagaaacaaatggagaagttgtcataaaaccattattgatccctttaagtaaataattagtactaaacactgtggaaattatggtaaactgccatagacattaaaaaagtgaacataattaaataaaaataaggagttggaaggatacatgagtgctaattttcttataatttattgtatagaattcattaatactgtctaaaaattacatttcaactttagcataaagccaaaaaatttttagcgttttttattcttaacattagaaaagtattttaaaactgttgagatgatggtaaatttatctgatgcatacaaattgttttagcttcactgtctaaatatgtatataaaaatgtctcatcatcttaaatgattctttctagatagaaacatttttgagtaattgttttgctgttttgttttctgtattatttgaatttttgaatatttatcacttttataaaggaaagacagtaatcttttaaaatgcgttcttttatacaacaattacattatttaggtggaagaaatttctaataaagttcatttaaaagtaaaatggatcgggcatggtggcccgcacctattaatacagtgctttggaaggccaaggagggaggatcccatgagcccaggagttcaagaccaacctaggccacatagggagaccctgtctctgcaaacctttttaaattagctaggtgtgatggtgtttgcccatagtcccagctacctggaaggctgaagggggaggattgcttgagcccaggagattgtggctgcagtgagccatgatcgtgctactactccagcctgtgtgacagagcaagaacctgtctgaaaaaaaaaaaaatgcatagtcagaaggataataatacaattccctttttgagtataaattaacacaattcaattgtaatctagcttaaagagtttttactcatttatataaagagaataactttcttacccccaacacaataaaagacacctttgcacatgttaaactttaaacatgattggaaccataccttaaatctaaaatagttgaaaccaatattttaactgggaagaatgaccaaagaagtcttgtttagacttaagatataactgtctgaggacagcagtttagaatgatttgtctagtctagcctaaaatgacgtgcctggtctgcattctcagagtgttaggcaatttatatacataaatatccatcctctttttgagagtagaaattcagattatttccacagctatacatacacattgattttcacctgagtgaggagtgataacttcatatttactaactttgagttaaagcctcatggaagactctcataaacttttcataaatgaatttttagtccaattcagtagagatattttaatgaaatttactagaatgtggggtcaatggatcatcttattaacatgaaattagggaagaaattagttctctgtttaaaactgctttataataacagataagattacaaaataaaaaggaagtaaaaactaaaaagttaatatttatttaattaactaaatttatttaattaactaaattaactaaatttatttaattaactaaattaactaaaaagttaattttaatatctccaatatttaaaatgattatgtatttgttttttcataatataaaacatttattaactataaaatgtctgctgtttgcactaattagttagaatctttgaatttgcttttatctttttttcacaatttcatttctttgacatgtttatatttaatttttgtattttgtgtgccttgagccaactcttctttaagtatatcataatccaagtcattcaaaatactagacactcattttacgaagaaaacagtattcttgtatatcttagttccataggtgaacattagttgcttgccctttacacttatctacctagccaaaaaagagaaaaaaaaagccttactgaataaaaacatctgagggggcagaaaaatgcgctaatgttagacattacattaaaattttaaaatgtcttcttaaataagagattacttttttttaaaatcttcagatattgatgaatgctccttccaaaacatttgtgtctttggaacatgtaataacctgcctggaatgtttcattgcatctgcgatgatggttatgaattggacagaacaggagggaactgtacaggtatggtcagttaccagctaagttgtgttctgattcattgaaatgagtattctgtgctaagcataaaaattcctgagatttctgcttagctaatctatgcattaggttacacatttttcagaaaaagaaaattatattcagatgcatttatttgtaactatggaattgatgcatttttatgtaaataatattaaattgttatctgtatgattgttaaatatctgacatgaaactagtaaagtgtctctttatatatatgttcatgtatatgtatatatagtacatgtatatatatatatacatgtatatatgtgatttttgttaagcaaatagtgacataattttttcgtcctcagagttgcaaattttaattaattacaatgtatttgttaaggatgttaaacgctgtcataaatactctgtccttgatgtatggaacctgttttaggtatataccaaaatttaagatatttattttattgtgttgagtctttcctagtgatctttaatctactcacttgcaaaaattccaccaaattctttggaacagcagtatgcacagaaaaagtaaaaatggtaacctgggcattttaaatgcttctcctagatattgatgagtgtgcagatcctataaactgtgtcaatggcctatgtgtcaacacgcctggtcgctatgagtgtaactgcccacccgattttcagttgaacccaactggtgtgggttgtgttggtaagtaaagctatatgaaacaaacaaatagaattatcaagttgaatattcagactctcttgataatgaaccgtgatgagtgtttgctacagttaacttaaaaacaaaacattatgtggtcgcctttattgtgtttctcttccaaatcatctgctccaccttcctcctctcacggacttgagaaccaaggcacagagaagtgcagtaatttgttcaaggtctcagagcttgaaagtggcagagctaaggcagtggcccaggttgccacctggctccttgtccagtgtttggccaggataacccagagtggtggtatagctgttagaatatctatttctcctgcctactggaagggtcatatagcaaagtaaatgaagtgatgagaagcaaggaattagagagatggatttatgagccaaaccattggagcagaagaagttggaaggtgacagggaggaggaggaggccgtaatgaaggttcagaatctgtggtcagcacctctgatcttaaaaaaacaattgtccagcttttactatctgcactgttactgtattttcctagagaaggaaatggcctggagaattttctggaagtatacaaaaaaagggaggggtggagaattccttgcttgagtagaaatctgcctactgtcctcagtgtcagtttttgggcctgcagcaaatggaaggaatatttgctgctgtgatttatacacaacttatatactgttttcaagttttggagaatacttttaattatcatttacacaaactccaagtctgtgttttccattcaaaataattcatttggtaaagtttgagtgccttctgtctaagggctggagttgcaacagtgaacagaacaagcacattctctgcttttgtgtttacattctagaggcagggagataaataaaagcaagaacaaacagaattggcactggaggtggttggaggagaagcgctatgttatattagggatgggggagtcacagcctttaaggaggggacagaccaactggaccactgagggaagcctccagttacaaggagaagccagtgcaaggggcatgtggcaggagaaggctggcgttagagacacagcacaaggctgcttgtagcaagagaggagtgagtggaggggacagggatgaggagaggaatcagaggagcagtcgcccagttcgcaaagtgattctcaacccaggctgcatagtaaactccatttagaacctggaaaagatattgatgcctgttacaccctcagaaattctgactcactggggcctcaatatttcttaaaaacctccttggaacaaaggctgtgaacaggcagctcataaaagagaatagtctaaacattaaaaaatgtaagcaaacaaatgcccaaaatcattaggaataagaaatccatttgaaacaattatatgaatgccactttacacttcatatactggcaaaaattaggaaacctggataatgtgaagtattggtggggacatgagccttgaggagcattctgttctgctggtagaagtgtagaccagggcagcactgcagataatatgtttgcacaatggtacaccgattaactgtcaatgtataatcaattttagtttatgagtttctttttgaagcaattcgatttgtatggattgacactttattgcgttcactcattcttagtgccaaaaaaacaaggacttattctatctcaaaagtgccataggaatctattggaacctttcgtaggtctgaaacattataaaatattaagagatcttgtttttcctttgtcttgaaacattttgacgttttatcatcctagctgttatttttgtcaatgttcaacattatgtccaatggatacaacagagtaaaataacgagaagtggaaaattatggcatcacctagaagtaacatgcattagtgaaataaaatgtcactgttttatcatccttcagttttcttattatattgtcctaaggattgcatcatttttcaagaaagtgcaagagaagactggagacaccttacttgaaatcttcttttagcatttattgaacacagttgagaatttagaagtttttacttactggccataatttttggcaaagagaaaaaaatgaagttgagtcaggtaactacaaagagacagagagcagctcttttgtctagattctaaaggtgatggtgaagtgaatcatctaagcacaatcccagactacgtgtcttcagagaccaatatcctaggtgaatgttttcaaacttcagaatcagcaagtgaaaggacagtgtatttccgtagacaaaggaaatacagtattctcatccacttagtcaatagaaagaacttcaacccgcaatatttggtaacaagaacctgaaccatcccaggtttgtggattctttcatattttcatgacgtttctgtaccaaaatttaattgatatgattcataagcagacagagataaaggcaggtatgtataaaaggttactggaaggaaatatgtgatgtagaaatacagtcattagattgattgttctaattggtgttgataaatctaaaaatgaaaacattttctatttgtggagactttaaagaagacggctgtcctctcatcaacaaaatcatgaactgttaatgttttcaaacattcctttgggtattgcatttttatgaagcaagaacaagaagaaccagaaataatgataagctagaacctattagagatgtgtttgaaacctggaatcggtttttacaaactggatatattccaagttcatgaatgacagttgataagcaattagttgcattcagaagatcattttgagtagaatatcttcaaaaccaagaaaatatagattaaaaaattgagttagctatcattaaattgttattaatattgctaataaagttgttttcaacttttttcttctgtatattagttttataatatacctttcttctgtaaattattttttaaaatgacttaaaaatattaaaaattaaagggttccttggatgtagttggtaaatgatgactatttttcctgactgaaggctaagtataggcaaatcctgtgaatcaacaattccttttgtggctgtatatgccaatggaattaactcacaggcccatacagagacacatatatgatgttcatcacggcattctttgtggtggcaggattttagaaaccatttttggagaggagggtttttttttaaaagcaattatacaccacggagttgacagactggaggtttacagaacaagcatgactagaaaagttataaaaatgaaatgagatgtatgacaaaagacatttgtgtacatttaaaatgaacacattaaaacaaaaatatttattttgcaagagcacatgtaaaaagtaatagcattaaatacatttggatgatctggtagggaaggagaataggaatgaagaataggaataaaagagaaagggagggggaagagagagaaagaacaggtgaataaatgaggaataaataaacctaattaggctgggcgtggtggctcacgcctgttactccagcactttgggaggctgaggtgggtggatcacaaggtcaaaagatcaagaccatcctggccaacatggtgaaaccccgtctctactaaaaatacaaaaattaactgcgcgtggtggcaggcacctgtagtcccagctactcgggaggctgaggcaggagaatcacttgaggcagaggttgcagtgggccgagatagtgccactgtactccagcttggcaacagaggaagactccgtccccaaaaaataaataaacaaataaatataaataaacctaattagaagggggaccatgagaatcttgcagcctctgagatctgagattcagcaacaaaaacaaaatgcaaaatctgagacaaaaataaagtaaaataagtttttttaaaaagcccaaatgattctaatatgcagccagggatgaaaattactttgtagactgctaagaactctagattttattctgattgagaagagaagccattggaggttgcctgacctaaggtaatgctattgaagggtcactctggcttacagaaggtaaagtagaccatagtttagtcaaggatggaagttgagaaaagagttagaaaactattacattagactaggtaaagggataatgatggtggctggaactcagttggtagtgattaaaaaaaaaagatagtaatgatagaggcagtggtaagtagacagattccagatatgttttttttttttttttttttttttgagacagagtctcgctctgttgcccaggctggagtgcagtggcgtgatctcggctcactgcaagccctgcctcccaggttcatgccattctcctgcctcagccaccctagtagctgggactacaggtgcccgccaccatgctcagctaattttctgtatttttagtagagacgggttttcaccatgttagccaggatggtcgattccagatatgttttgaaggttgagtagacagcccttattactggattgaataaggaatcatagtaaggagtcaaaaatgatgtcaaagcttagggcctgtgcaactgaaaaaaaaagtgaatttccttttattgaaaatgcagaagactgggagagaagacggcagattttgtacatggaggaaagagcattgacagtttgattttagatgtgttaactttgaaataattattagatgtttaagagaagaaatgaaataggcaattggtagaagggtctagagttcacgggagagatgagatacagaaccataaatttgagagttctcagcaaaaaagtagtatttaaacccatagactcaatggagtgatctggatgataactgtagagataaagaaaagccttagattagttgatcccttaaatatcttctctaagtttgttgcaggctatcttttccaaaacctgcaaagttagctatgcaagttgaaactaaaccattggataaactcgtgatatagattaattatacaaaaaatgtattgtattcctattattggaggtccagtatgtcccaaatgagaaatttcttactatcttgtccattccatgagtataggaaaatatggtctatgtggatttctaaatataggaaagtctgccatgattggcttcctctgactcaatctcgaaaaagctgaaaagcaggagattgcttggtacttaaggattaaaaggaacctttcatgttaacgtacaaaatttgaatttcatcctttgagtgacttttccctaaaatggagtccttactatgtaagcaagggcaactgtaagctcctttgttgctctgcagacaaccgtgtgggcaactgctacctgaagtttggacctcgaggagatgggagtctgtcttgcaacaccgagatcggggtgggcgtcagtcgctcttcatgctgctgctctctgggaaaggcctggggaaacccctgtgagacatgcccccctgtcaatagcagtaagtacaaagctgaagaagaggaagaaaaccaactggtatctaaagatttgttgccattttattcctgagctgggagtgaggagtgtttagtgaggacaaaacaaaaaaactgaatttgaactactttcagtgatcactctgaaaccagccaagaatgttaaaggatttgaattcctctcttcctatgttttatcatgatatgttaaaaaaataatttttaactgtaatcatgtatgaatagtactaatatcagttcttcatgatgtcacagataaagtgcattcctgattcttctcaaaggttatttagttcagcttcataggtgtgttgtattcttgaagtcaattatagaatgccttaaattgaaacatctgatatgaacatgaaccaaagcctgttttctctagtcttaatttactagctaaaagagctgcaagggaattttttctttaattaaaaacaaatggttcgtgttattctactgtgtatgtgattaataaagtatgatcttttatgtaaaatatgtaactttaaatgtatttgaaagggcactaagaaaaatttggatacaccccttaggatgagtatattgagcctgtcatttgctgaatgcttgctcattgtctcagccacttggacacaggtatcaaacctcttatttttctattgttttgtagctgaatattacaccctgtgtcccggaggtgaaggcttcagacctaaccccatcacaatcattttagaaggtgagctaatcccattgtcacccagattcaaacaaggtaaagagttaattatagagaaaagctggcagaaaacctagggcagagcagccccgacaagataatttagtaaaattacagatggactttaattactaaaatgttaaactactacttttatcaagcagtaatgatccattgcagtgatttgacgtctgactgttctgcagagaaactctttcccattgtcctctaccttgaataatctccaacttaactttattcattttctcagataatggtaaaagttctgtgacaaagccaagaagatatttgagcagaataaacttgccatctaagtgtgcgttcatttggatgcatagaaatctgattcttacaagatcacacttttgaaagctctaatattaactcttatccttagtgaaggtgtttgttttaagtgcactgtctccctttttgtagacattgacgaatgccaggagttaccaggtctctgccagggtggaaactgcatcaacacttttgggagcttccagtgtgagtgcccacaaggctactacctcagcgaggatacccgcatctgtgaaggtgagatgaatttgatgcctaaaatgctcagtgctgtttaaaacaaaatggctgctgaggcctgagggaaaggcccatcctcacattctacaaaaggctcaattaagattggttcatagcttttttttttttcatatcaatgtagctaagttgtatgatgatagacaaattaatttatggctcgttgccataattcactgtatttttccaggagggttgattaaatataaattgggaaaatggggtagtgtgaaaacctaaaatattaagtaagttattagtgaaaatattgataagaattacattttacataggaaaaattggtaagctaaaatgtgaccattaacttaatattgatcagtaatttttaaatgttggactatatggtatgaagaagttcaaaggttatgcagctgccattcttgcttccatccccccactttatcacatggtatttcaattcttttaggggcctgtctcaccactaaactgggggcttctggagacaaggtccacatcttactcatcattacagccataagttctagcttacagtagaatctcaatattttaattgtgaaatgagtgaatgcttctaactgaacattaaacatgtagcgtaattatttccattataacttttcttttggaacatgtttgataaatgtatctggaagaaataggatgtaatgaggagaacaaccagcagctgcactgctttaagaatctctgaatagttactaatttgaaagaagctacaaagacaaaggctttcccaacctgcattcactttaaagttggcattaaaacttagcctaagtgacataggacaaaagcaggctttaaagaaattccaattgaagaatgcgaattgcaataaaaaaaaaaaaaatatatatatatatatatatatgtgccaaggaaattattttttgccactttagaataatttcttttgatgctttatattttttaatatggggatttttttcttttgaagaaagatgtatctgtgttatataaatgcatatttgggatattttctttatttctaagttttgcataaatggggatttagagaatcacctatgctttgttcagtcatctaagtaatataaattcattgaaaaaatagatttattaattaatagatattcttgcctactctagatattgatgagtgttttgcacatcctggtgtgtgtgggcctgggacctgctataacaccctgggaaattacacctgcatttgcccacctgagtacatgcaggtcaatggaggccacaactgcatgggtaggtaaagaactctgagattaattagagcacagttgttgacttcacacataaagcacttacgtctcagaattattgtttggaagtttggaagttcagtcttcgtgaattgagatatttcagagtcttgcaagctgctggcttagtatcaagtttttgacctttgggtatacatttaaatttttaaaagcatgagtctaatgtagaaaatttcctcaaatgttatatattcttaaatttttcatctccattcatatagtgtgaacattaatttacaaataaaagaacatttaaattttaatgctttatttttttaattaaataaatgattttgagagaaaaacaaatatgtattaacattgtctcccaagaaaattataagtgaaatcctttaaggataaaggagagatgttaatctaaaaatgatttatgtttaaggagttattttaagatagcttcaaatgactaaaaagggtttccgagttgtgttcatcaggaaagcttgatgtctacagctgtgtgggcttcattataaactactcgtggatacaaatggctagtttctttgtttttctttatatagacatgagaaaaagcttttgctaccgaagctataatggaaccacttgtgagaatgagttgcctttcaatgtgacaaaaaggatgtgctgctgcacatataatgtgggcaaagcctggaacaaaccttgtgaaccatgcccaactccaggaacaggtaagcacacggctcgtgcatctgctgactgccacatcagtgatacacgcatatatctaacagtatagtcaaagtcactgcatgctaaaactagagatgctcagttccaaaaattcccaagagcatcatatggttctgtttcccaagtgatcctctttgggattcaaacactaacttctgagacattatgttggataggcttgtgaatcctgaaaataagatccattgctgaagagttagagttgatagcattagtccatttaaactcattatcttaaactgtgcttgtcaattattgatttattcatcaaacaaatatttcttgagtaactactgtatgtcactgtgctagacatggaaagtataatatttggagaaaaactaaattcaataaggatttttttttagttcagccgtggaaaatatgcaaaaagtgttttttatgagcgaattttacataaaagcaacccattgtcataatgtgccttttacatcttcttcctcagacatcagtgaaatttttaggcaaaaaatagagcttgtcttcacttggtcatgtttttttcacaagacagtttcttttgaaagaaaaaatgaaagataatagagataagagcaaaaatgcttgtcttaaaattgctgtccatcaggctctcttttatgacctggagaatggcaacttttaataactatagatactaagagttgaaccagtaggccaaataagaaacagtgattatgcatttgttaccaaatattacttagggtatatgtatttaaatgttccatttaatgtattgatgaaattaaggagagaaatgatgaaaagcaacacataggcctttttcagtggctccaattcactggtcaaatggattttcttagccttatcttgccattattatgttccataaaattaaatagaaacattcctacaattctcaactttaaaactccatagttacaaatttaagatcattgatttggggaattaaaatggcactttctttgtgagaagaagcgaaaggcttggagttgagagacgtgtctgtatttaaatcaaaactcttaagatacttattgtggaacctcctgcagagtatgtatcctttctgaaactaatttctcatgtataaaataggaataataaataattacagtgactaattcatatgggtgcaatgacaattagggagattatacatataaattataatttgcagatttccagacaattagaaaccattaagttgagcatctgtggtctttctatctgttctcaatactcggtatatattgatggatgaaatatacaatatccctgacctgatagcacttggaatatagtatgcagtttaagttttatataatactgttttcaggagttttactcacttgtatagcagtgagcgtcagaagcatttttcatcttgcaaattagaattcttttaaatttccattgatttggttaattatgtgtaagaatacctcttatagtccctattttatttcataatgcattgtttttgatgactcaaatttcacattccaatagacacagtaaaaaaaaaaaagacaaaattcgcatctcattcattatacattgtttacctatttcccctctacaacattatttttgcatgtctatacctttgtgcaatctgtaattcctttttcaatttgtacttctctttttttttaatctttatgtattggatgttttttaaagctctgcatattaaaagaaaaagtatttaaatatctaaatggacattttgaatcttataatgatttacttgccttctgatatcagagcagtaaaaagttaatgagagtaatagaaataacaatgataataatggtaaagaatgcctagatccactcctagcagaagctggcattgctatcaaataaatataattgaaatcaaaatgtctggttgtgaataatgtaaaatatatttgtttgtgaaagtaatacaaaatgttattttgaaggaatttgagaaatttaagagtgcattgctttgtttatattttaaagctgactttaaaaccatatgtggaaatattcctggattcacctttgacattcacacaggaaaagctgttggtgagtttttccagattatgtttgttttaatacatatgtgtagcattctgtaaaaatctattctatgtttttaaaattcaagagtaccacaaaatataataatctgggatccaatctaatatagttagataagagagaaataacaggcttacagactctaaccaagtattaataatgatactccatcagcgtagtctggtgattgggttatggtagttatgtgactctctcgatatttgtcacatccaccaagctaaagcttcagttgtccttgtcatgcacattgtattacatgactctaaataatctaccttattttaacctttagttgctattttcttaagtacattttttaatttttggtgtatttttgcagtatccctttttactggtctaaatatgaatgtgcagacttatttttcatattaattaattccttctaaatgtacattgtgttgctcactctagcttccttcctcaaagatttgataagcaatataatttttttttttgagatggagttttgctcttgttgcccaggctggagtgcaatggcgcgatctcagctcactgtaacctctgtctcctaggttcaagtgattctcctgcctcagcctcctgagtagctgggattacaggcacccaccaccacacccggctaattttttgtatttttagtagagatggaagtttcaccatgttggtcaggctggtctagaactcctgacctcaggtgatccaccctcctcagcctcccaaagtgctgggattacaggcgtgagccaccacacctggcctaagcaatataattttaagtctccattatgaatatatgataaaataaaatacatacaatgatgaaaacatagctttttaaacaaatgaatagcagcacttagggtaacctgaagaaggggtttgattgcctagaaagttcatttgctatattgactctgaaattacttggtatattttatcagctacttagattttttccatcactgtttctattttctggtatatatgtttttataaaccaaaaaaattagctatactagtatataatagatttttgtgacactgaatatttgtactcatcccagggtacatgtagcattattcaaagttatatggtaagtatattaaacagaacaacatatatttgaccaaatctgttccatttcagacattgatgaatgtaaagagattccaggcatttgtgcaaatggtgtgtgcattaaccagattggcagtttccgctgtgaatgccctacaggattcagttacaatgacctgctgttggtttgtgaaggtaatctgaataaagtatgtcctttatccagtataatttggtatacatatatagcatttagatggtttctgatttttactatttcttctacaatttttcaagagttgatcatcaaagtgtgacgtgaatgtaatgctaatacaatactaaaaaggactctttaaaatggaattgttgctctttcagatatagatgagtgcagcaatggtgataatctctgccagcggaatgcagactgcatcaatagtcctggtagttaccgctgtgaatgtgccgcgggtttcaaactttcacccaatggggcctgtgtaggtaagaaagaggctgactcattctttggcactgagcacaagattccttagatttcctatcaaaaaatacttcaagaataatttgggaaagattttctcacttaacctgttcatttatagtgaacctatttcaccatatcttttagatgattttgttaagaaaatagatctcttcaatggatttccccaggattggacctaaaataaaataatatccttcagataccaataaacataaaaaaatttgcatgattaaaaaaagagggttggatactttgaagtcctgctcattttgattcagctgttgttatggttcattttcagcctgcctataataattaatagcagattagagaaacacaactgtgaaaaatgaagaaatcttaataaaaatcagatacatgtaacatttatttttttttgttttagatcgcaatgaatgtttagaaattcctaacgtttgcagtcatggcttgtgtgttgatctgcaaggaagttaccagtgcatctgccacaatggctttaaggcttctcaggaccagaccatgtgcatgggtaagaagggcatgtggctccagggagtgaagtggggctggggttccagaacagatcacagttccatcaagtgccatgagtaactactatgtctctgtcagaaacaatcttgcaaaaaattaactaggtcaaactatttaagtcttgattcaatataaaatttgcaagcagggacatactgcaatatataaaatttgcaagcagggacatactgcgatatgttcgtcagttcagtgattcacagctttttctccagaagatgttcacatggcttgacaagaaaaaaccctctgagccacttgggcttgtgtggaacttaccatagcacccgctgccctttactttcatgtttctactcaagacaccattttggaatgcaagagagtagtaagagtgacagcattaaacttaataaatttatacacatatgcacatacttttttaaaacaaattgttgaatagtgggatttatgtacatattttgtgttttatcccttaaaaatagctttaggagcaaatatagccaaactctttaaaaattcccagtagctaatgtaatgggtagccaagtgataatagagcttagtgagtacttgctgagctgatgattaataggttttcaaagacagatgggctggatgccatgaagctgggactgagtataaccccttaagtctgatgtcagcagttggctctgcctctgctgaagagttttctttctgtgctttgcacttgaaaggggaaaattaaatttaaaacttggctacttgtaattagcattttctcagtgtagaaaaggctagggctgttcagctactcttgatattcaagatattatctatgtgaatattaaaatcagatttcagtactgcaggactggtttccttcatgacacatccatacaacagggaatacctggagtatgtctccaggttcatccattgcctcctaaagccctccctttggacttctcctataatggcagggaaaattctctaggtgatgtttatacaaaggaatatacaggatctggtcttatttgcatgaactccctaagaatgcttgtttatacatgcttcttcttgctgtactcccagagagagtatgatttaccaaaaaaaaatatgagatttatgattcagaatttcgtatggggaaaatctgtccactcataacaattcttccatgataaaagctagtcagattcttcagtaagacctcccttatacagagcttccttcctaaagaacaataccagcccccaccctttttttggtgtggtagagtttcagcagcctggaattcatagttggggagtctgctgtctcatatgatgaatgacctttctaaatattttcttaattcagtttttttgaaggctaatagtgaattctaataaacctcaatttggatttcattacttcatacaattaagtaaactaaagtttgtctttgtttttctgctcaaattaagggatttaaatttctgggtaagtgtttataatgccttttattatgaaagaaattgtttcagtattttagaagatcagttttatttacgattattaagcagacctgctcattaatacatctctactagggggatgctctcttaggctatgtctgagtattgtctgagtacagtcagtacctgttaaactgtactattttcttagaattttacaattttgattcttgtaattttgatttttccgtatctcttactcattttcctcaagtagatatgagtttctagtactgaatgaggaaaatctaagtaattccataagttaaacatataaaacggttaatagcccatttttttctagttaaaaattgaattttttgagcctatatttctttatagatgttgatgagtgcgagcggcatccatgtggaaatggaacttgtaaaaacaccgttggatcctataactgtctgtgctacccagggtttgaactcactcataataatgattgcctgggtaagtacttcattcagtcctttattgcttctatttcatttccacacaatgtgctgaaataaaaaacaaaactaaagaacaaaaaaaaattatattactaaaattgcaaatatgtgccaaaagatatataatttcattgactggtttctagttaactgaaaccatagtattggcctaaattgtcacaagacaatatactcttgaatccttttgtcaatcagccaatcatttcaggaaaaaaaggtcattcagatcacagtaaacatatttggactgatttatggtttagggtatttgtatttccttaatgagatcaaaaatagacccttcattgtctcaatgttattacaagtatttcatttaaatccattctggattatttacattcaagtaccagtagcctcctgcttacacctgtcatgacatttcattttccatcagcttttgaagccagaatgcctttccccacaaaaataatgaatggtgactaggtttctagataagccctcagaaatatctcctatgcgccatacaggactttagtctttggcccacagcaacacacaaatgtgaaatggaaacatagtgagtgggagagggtcctgaagtagttggaggagagaataagagaaatgacagcaaacgtttattccttgtttactgcatgccaggaactgcatgggtaatttacagcataatgtgttgtaattcgcatggccctgcaaggtatgtgaaagaacttaggttttctaccattgtgggactacatcagagctcatccccacgtcctcatttaacccaacataagttcctctctgttttctttatttttcaaaattccacaattgtgaaaaaaagtagagctaattggacattttattcaactgctgccttcttgactagtttcttagagcctttgtacagtcagggagaactaaaacttaaatgaaaacttaatacttaatgtcttttttctttcaattatgtttgatatcagcaattccagtgtttttaatatcattgattttcctgtaataaataagctcatttatttgttctctgaatatgctcagcttagctccaggtaaagtatatgcaaattaggcaatcagattaaatcccacatatcctcctgcctgtgggaaaataaatatttttcagttagaaagaatggaaagcttcaccgtaaaccttgatttttatctggttctaaattcatgagttatattaatatcaaaaatgaaaaaaatgtatctttatggttgaaaaatagtaggactctatgggatcctattaattatatgatccttatgatatgtgccatttttctctgttgatgaggagttgtaatatgggatttcttataaatgcatgccaataagtatgtttttaagtagcgtcttgtgaaacaatatacatgttaagagctctttctgaaaaacatactcctgtttgcttacagacatagatgagtgcagttccttttttggtcaggtgtgcagaaatggacgttgttttaatgaaattggttctttcaagtgtctatgtaacgaaggttatgaacttaccccagatggcaaaaactgtataggtaagtatttaaataataagcagtctttgtggtgttatgttttgtaaaatgatgatatgtgcctccctcctttcacttaagaactcattaatatttcatttaatcatcagagcacatgaccaagataagctatgatggaaaattttagtataaggtatcaacaatgggaatgtctcataggcagtgtttttactggggacagagcttgaggctgtccatgtcttaagaaaagtaagcaaagacaacaaataaagaaaattagccacttgccaaataagaaatatccaagatgtcagaagagtatctttggtaatatttgttcatggtgacccagtagatcagaggacccgagttgaattcatgttaatatcatttggcagacagataaatctatgtaacaattatctcatgcttaaattattttttctcttctttttctctaaagacactaatgagtgtgtcgcccttcccggctcttgctctcctggtacctgtcagaatttggagggatccttcagatgcatctgtcccccagggtatgaagtaaaaagcgagaactgcattggtaagagtaacatttattctgaggcccactagtagttcagtatagtaagacatggtaaagactctggaaacatactaagtgccaaccactgcaagcatgctgacctaaggaattaaacatatagctgcctacatctgttttactgaaccatcagaaatgatggtgagaataaaaaacttagggatgtaggattttttcattaccagaaatctaatgctagtcaaagaattttcagcatatgctaattaatcttttttccaaatgtcagcagcgactttcagtgaatttaaagagtgtctacaaaaattgtaatctttggcacccagttttaaaacagctattaaaggtgtctagggtcttagaaatgtgaagcagaaaaatctcgacaatgctgttgagacattctttttcttgggaaggcctcatgtcaaagcagcaaatattaatccatttgtcataacagatgtttttctgttgaaacccttccagcacacacgaacactgtaaccacatcaaaagtgtgtcccagaattgcctagtggacatgatgaagtccgaccttttttacagttcactttatttcacttttatacaaattattttttacagccttgttgaaattcagaagcaccagcattttagtgtggtttttctaacgtgaaaagatgctaaggatattttctgcctttgaattatccaattctatcgcccttggcaagattctacctaaagatatgtcattctactgttcatatttaagggagttaaatagggcagaaggaagtagtttacttcatagaatttaattattcttcagaccacataattagataccatgggtatcccctagtcattctgattttctgatttgtatagttcattataagactatctagtgtttttaatacttaaaaaataataaacaataatactagaatcatctcagtgagaagtttcttgaaaagtttaaggggggaggagccaagatggccaaataggaacagctccggtctacagctcccagcatgagtgacggagaagacgggtgatttctgcatttccatctgaggtgctgggttcatcttactagggagtgccagacagtgggcgcaggtcagtgggtgcatgcactgtgcacgagccaaagcagggcgaggcattgcctcactcgggaagcgcaaggggtcagggagttccctttcctagtcaaagaaagtggtgacagacggcacctggagaatcgggtcacttccacccgaatactgcggttttccgacgggcttaaaaaacggcgcaccaggagattatatcccgcacatggctcggagggtcctatgcccatggagtctcactgattgctagcacagcagtctgagatcaaactgcaaggcagcagcgaggctgggggaggggcgcccaccattgcccaggcttgcttaggtaaacaaagcagcccggaagctcgaactgtttggagcccaccacagctcaaggaggcctgcctgcctctgtaggctccacctctgggggcagggcacagacaaacaaaaagacagcagtaacctctgcagacttaaatgtccctgtctgacagctttgaagagagcagtggttctcccagcacgcagctggagatctgagaacgggcagactgcctcctcaagtgggtccctgacccctgacccccgagcagcctaactgggaggcaccccccagcaggggcagactgacacctcacacggcccagtactccaacagacctgcagctgagggtcctgtctgttagaaggaaaactaacagaaaggacatccacaccaaaagcccatctgtacatcaccatcatcaaagaccaaaagtagataaaaccacaaagatggggaaaaaacagagcagaaaaactagaaactctaaaaagcagagcgcctctcctcctccaaaggaacgcagttcctcaccagcaacagaacaaaactggacggagaataactttgacgagctgagagaagaaggcttcagacgatcaaattactccgagctatgggaggacactcaaaccaaaggcaaagaacttgaaaactttgaaaaaaatttagatgaatgtataactagaataaccaatacagagaagtgcttaaaggagctgatggagctgaaaaccaaggctcgagaactacgtgaagaatgcagaagcctcaggagctgacgcgatcaactggaagaaagggtatcagcgatggaagatgaaatgaatgaaatgaagtgagaagggaagtttagagaaaaaagaataaaaagaaatgagcaaagcctccaagaaatatgggactatgtgaaaagaccaaatctacgtctgattggtgtacctgaaagtgacggggagaatggaaccaagttggaaaacactctgcaggatgttatccaggagaacttccccaatctagcaaggcaggccaacattcagattcaggaaatacagagaacgccacaaagatactcctcgagaagagcaacaccaagacacataattgtcagattcaccaaagttgaaatgaaggaaaaaatgttaagggcagccagagagaaaggtcaggttaccctcaaagggaagcccatcagactaacagcggatctctcggcagaaactctacaagccagaagagagtggcggccaatattcaacattcttaaagaaaagaattttcaacccagaatttcatatccagccaaactaagcttcataagtgaaggagaaataaaatactttacagacaagcaaatgctgagagattttgtcaccaccaggcctgccctaaaagagctcctgaaggaagtgctaaacatggaaaggaacaaccggtaccagccgctgcaaaatcatgccaaaatgtaaagaccatcgagactaggaagaaactgcatcaactaacgagcaaaataaccagctaacgtcataatgacaggatcaaattcacacataacaatattaactttaaatgtaaatagactaaatgctccaattaaaagacacagactggcaaattggataaagactcaagacccatcagtgtgctgtattcaggaaacccatctcacgggcagagacacacataggctcaaaataaaaggatggaggaagatctaccgagcaaatggaaaacaaaaaaaggcaggggttgcaatcctagtctctgataaaacagcctttaaaccaacaaagatcaaaagagacaaagaaggccattacttaatggtaagggatcaattcaacaagaagagtgaactgtcctaaatatatatgcacccaatacaggagcacccagattcataaagcaagtcctgagtgacctacaaagagacttagactcccacacattaataatgggagactttaacaccccactgtcaacattagacagatcaacgagacagaaggtcaacaagcatacccaggaattgaactcagctctgcaccaagcggacctaatagacatctacagaactctccaccccaaatcaacagaatacacatttttttcagcaccacaccacacctattccaaaattgaccacatacttggaagtaaagctctcctcagaaatgtaaaagaacagaaattataacaaactatctctcagaccacagtgcaatcaaactagaactcaggattaagaatctcactcaaaaccgctcaactacatggaaactgaacaacctgctcctgaatgactactgggtacataacgaaatgaaggcagaaataaagatgttatttgaaaccagcgagaacaaagacacaacataccagaatctctgggacacattcaaagcagtgtgtagagggaaatttacagcactaaatgctcacaagagaaagcaggaaagttccaaaattgacaccctaacatcacaattaaaagaactagaaaagcaagagcaaacacattcaaaagctagcagaaggcaagaaataactaaaatcagagcagaactgaaggaaatagagacacaaaaaacccttcaaaaaattaacgaatccaggagctggtttttggaaaggatcaacaaaattgatagaccactagcaagactaataaagaataaaagagagaagaatcaaatagatgcaataaaaaatgataaaggggatatcaccatcgatcccacagaaatacaaactaccatcagagaatactacaaacacctctacacaaataaactagaaaatctagaagaaatggataaattccttgacacatacactctcccaagactaaaccaggaagaagttgaatctctgaatagaccaataacaggttctgaaattgtggcaataatcaatagcttaccaaccaaaaagagtccaggaccagatggattcacagccgaattctaccagaggtacaaggaggaactggtaccattccttctgaaactattccaatcaatagaaaaagagggaatcctccctaactcatgttatgaggccagcatcatcctgataccaaagccgggcagagacacaaccaaaaaagagaattttagaccaatatccttgatgaacattgatgcaaaaatcctcaataaaatactggcaaaccaaatccagcagcacatcaaaaagcttatccaccatgatcaagtgggcttcatccctgggatgcaaggctggttcaatatatgcaaatcaacaaatgtaatccagcatataaacagaaccaaaaacaaaaaccacatgattatctcaaaagatgcagaaaaggcctttgacaaaattcaacagtgcttcatgctaaaaactctcaataaattaggtattgatgggacgtatctcaaaatagtaagagctatctatgacaaacccacagccaatatcatactgaatgggcaaaaactggaagcattccctttgaaaactggcacaagacagggatgccctctctcaccactcctattcaacatagtgttggaagttctggccagggcaatcaggcaggagaaggaaataaagggtattcaattaggaaaagaggaagtcaaattgtccctgtttgcagacgacatgattgtatatctagaaaaccccattgtctcagcccaaaatctccttaagctgataagcaacttcagcaaagtctcaggatacaaaatcaatgtacaaaaatcacaagcattcttatacaccaacaacagacaaacagagagccaaatcatgagtgaactcccattcacaattgcttcaaagagaataaaatacctaggaatccaacttacaagggatgtgaaggacctcttcaaggagaactacaaaccactactcaaggaaataaaagaggatacaaacaagtggaagaacattccatgctcatgggtaggaagaatcaatattgtgaaaatggccatactgcccaaggtaatttacagattcaatgccatccccatgaagctaccaatgcctttcttcacagaattggaaaaaactactttaaagttcatatggaaccaaaaaagagcccgcatcaccaaggcaatcctgagccaaaagaacaaagctggaggcatcacactacctgacttcaaactatactacaaggctacagtaaccaaaacagcatggtactggtaccaaaacagagatatagatcaatggaacagaacagagccctcagaaataacgccgcatatctacaactatctgatctttgacaaacctgagaaaaacaagcaatggggaaaggattccctatttaataaatggtgctgggaaaactggctagccatatgtagaaagctgaaactagatcccttccttacaccttatacaaaaatcaatccaagatggattaaagacttaaacgttagacctaaaaccataaaaaccctagaagaaaacctaggcattaccattcaggacataggcatgggcaaggacttcatgtccaaaacaccaaaagcaatggcaacaaaagacaaaattgacaaatgggatctaattaaactaaagagcttctgcacagcaaaagaaactaccatcagagtgaacaggcaacctacaaaatgggagaaaattttcgcaacctactctgacaaagggctaatatccagaatctacaatgaactcaaacaaatttacaagaaaaaaacaaacaaccccatcaaaaagtgggcaaaggacatgaacagacacttctcaaaagaagacatttatgcagccaaaaaacacatgaaaaaatgctcaccatcactggccatcagagaaatgcaaatcaaaaccacaatgagataccatctcacaccagttagaatggcaatcattaaaaagtcaggaaacaacaggtgctggggaggatgtggagaaataggaacacttttacactgttggtgggactgtaaactagttcaaccgttgtggaagtcagtgtggcgattcctcagggatctagaactagaagtaccatttgacccagccatcccattactgggtatatacccaaaggactataaatcatgctgctgtaaagacacatgcacacgtatgtttattgcggcattattcacaatagcaaagacttggaaccaacccaaatgtccaacaatgatagactggattaagaaaatgtggcacatatacaccatggaatactctgcagccataaaaaatgatgagttcatgtcctttgtaaggacatggatgaaattggaaatcatcattctcagtaaactatcgcaagaacaaaaaaccaaacaccgcatattctcactcataggtgggaattgaacaatgagaacacatggacacaggaaggggaacatcacactctggggactgtggtggggtcgggggaggagggagggatagcattgggagatatacctaatgctagatgacgagttagtgggtgcagcgcaccagcatggcacatgtatacatatgtaactaacctgcacattgtgcacatgtaccctaaaacttaaagtataataattaattaattaattaaaaaaaagaaaagtttaagatcctgttgttcttccattttctttgctcatgctcaatcttgattcttctttgtctctgtgatccttctctttatggaatgctaataaaagtagtgtgtcagccactaggagggaaatagaaatacatatgcctccttgtattaggcagtcttggctacctttcctcttaatgaaagtatggatagcttttatttcattaagatatcatatattattatttattaagtttcagaaatatttcgttttccttcatctatcgttagcaatgacactagtttgcatctctgaaaaaatggttttaatttattactttttttttttgagacggagtctcgctctgtcactcaggctggagtgcagtggcattatcttggctcactgcaacccccacctcctgggttcaagtgattctcctgcctcagcctcccaagtagctggtattacaggtgcccaccaccacgcctggctaatttttgtacttatagtagagacggtgtttcaccatgttggccaggctggtctcgaactcctgacctcaagtgatccactggcctcggcctcccaaagtgtgaaaaaatggtttttaattaacttacttcactgtaagattttcttcagactagtatcttttctaccaacttttcccagatgacattctaacatgaccacacacacacatacacagacatagatatgtgtacacataccctgcacagatataaattcattcctacattcagtgggtatgacagtgaacatttggcacctttctaggtgctagaaatacaggaacatcatctttgctttggggtaacttactacctaaggggagagacctattttgtaaataaacctgttttgtgaagacatccttataatacaatgtgacagacattgtactggaggtctgttcaggagatgggagcaccgcaggaggttagggatcattatggtagttgtgagagggtggcagttcaagaaagcctgtcacagaggattgatgattgtctaggtcactcttaaatgttggataggattttactgatcaaccaaagaaagagaacagaagaggctatttggaaacataggcagcatgagcacgacaaggagcatagaatggctggctcagaagattgaactcaggcctgcggtcagcgtggagccattgcaggagttgttgtgtttgttttttttgttgttggtggtggtggcggtggtgttggtttctgcagttttttgttgttttatagaagggatgtgatgactcttttgttaaacttctaccaacataaattgagaacttgtgtgtgccagataccgtgctaggagctaaaggtgcaacagcgagccagacagacatgtcatgtcctcatggagcttacgttctaatgtgcctgaaaagtagtattttttcatgtgattaaaacattccattaaataagtacttcccacaaaaaaaacgacgaaaaatcactagtcaggcaggcatgcttatttattttaaggaagcgttctggggaaagggggaaatgataacactgtcaaaatatgtctcagccctccatttccataggcacagattttcaaatgtaatcagatggacgttttagaaaggcagccctggtggcaatgtgacaagaagaagacattcaggagatgtagacatcagttgagagactggtggcaaatgatgatggctgtggaagtactgaggaggtagaaatggctgccacattctgcttgcatgtggagtgaaaaaaggagagaaataggggtgacatggggatcacaatttggattactgagagagagttatcagggagaaggggaccagttcatagaacatttggccacatggagcctgcaatgcccatgagacatggagttgttcatgtcaggtaggcaggtagacatacatacacccctaaagatcaaagacaggaaggtggacatggacttgggactctctggcacatggttggttgaaattacaacttttgacttctgaagcaataatagtttatttttatgaataagttaaacatacaacgtaatatctcttgtctgaaatatcagctggctagtggacagtgatagtatggacaattgtttattttcaagtgttgaatggctaataaatactccccctgttctgcagatataaatgaatgtgatgaagatcccaacatttgtctttttggttcctgtactaatactccagggggcttccagtgcctctgcccccctggctttgtactatctgataatggacggagatgctttggtaagatttggcatgacttcactgtcacagttcacgcttagaaactttaaagctgaattgtaaaccatcatgctggtattagtcctaacaaaatacatgtctatgctaaaatacatctgcaagttaaaaatttaggtctcaaacataagcaatgaacaatttttaaggtactttgaattattgccactgtttctacatttttataaatttttttactaaaagaaaaattcttattctgatttatcagaatgactatgttaattttgttgttgtcatagcttttttgtttgttggtgtatgtgatgcttttgatgtgatgtaacttactgaaagttaccttgattgtttttcttagactatcatgcaacagtgaaaaaagagactctgtgtggaaatcactttgatactgagcatgatttctcgaattttcttagcacattataaaaatattttaagcatattaaataattaaataattttatagccaggtcagtctaaattggcaaatgaaatcagcaatcgaagatttccagacctgccttaactgctgatctagtctgcatcccgtgttctacaatgagaaatgttctgtccaaacagtgttacaaaataattccatctgtaatgtttgcttttttgattagatactcgccagagcttctgcttcacaaattttgaaaatggaaagtgttctgtacccaaagctttcaacaccacaaaagcaaaatgctgctgtagtaagatgccaggagagggctggggggacccctgtgagctgtgccccaaagacgatgaaggtaagagcaatgacatcatcagacagcactttgtgtaccagtttttgaatgtttgccagagtgggtttaaccatgtaatttaagaatattttgagagtgaaatcatctccttgcatataagttttgatggttcattgaacaacctagcctgagaaacttctttcagcttttgaataagacatgtctaagcacaggtggagttacccttttatttcattccccacctccaaggttagtattacttgctttcaaaagtacgaatttgagaggtccaaggcaggagaaagaagggaatggaaattatattccaggttgctccaggagtcccatgtgggcattgtatcacaggctgtggctctcagaatgttacattaaattctgagaagctgagtcagcacaatggccctttacaggaaaagatcaatagcctcaggtctcattggcacccataaattataggataattcccagcaaactccagctggcttggcctctgggttagggatggcttctgagtgtgatgggcagggaagttctctttagctgctcagctttaaatgagcaaacagaaagaaccaggagcactgagcaggtggcaccctagaaggtggccctcactaaatatgcttttgaaataaatcataaaaataaaagagtcttgttatagacagctttgtaatggaaacataattaagtgtaatttcatgtatattgttcatcctttcttaagttctttgataatttcaagtcttcaataatggagaatttgtatttttctttgtagttgcatttcaggatttgtgtccatatggccatggaactgtccctagtcttcatgatacacgtgaaggtacgctttgatatattttattcctatattcttatttaatacacacgtattattttacatttattttataactcatgctaactttactatgtaacatatagtatattgtatttaatggatgtatataacccttattttgtatcatatacattatacatatatcataagattatatcgtgatatatgaaatacatatttctctgacaaaagaagtatttacaagtctgtgttgaatagacatacacagtactggcatatctttttatttttattttatttatttatttatttattttgaggtggagtctcactctgttgcccgctggaatgcagtggtgcgatccagctgactgcaacctccacttcctgggttcaagtgattctcctgcctcagtctccccaagtagctgggactacaggtgtgcgccaccatgcctggctaatttttttttgtatttttagtagagatggggtttcgccatgttgcccaggctggtctcaagctcctgacctcaggtgatccacccacctcggcctcccaaagtgctgggatttataagcatgagccactgcgcctggccggcatatctttttatatgaggaaattcacatgcagttctatattttagatgtcaatgagtgtcttgagagcccaggcatttgttcaaatggtcaatgtatcaacaccgacggatcttttcgctgtgaatgtccaatgggctacaaccttgactacactggagtacgctgtgtgggtgagtgttggctccacattacagaattttaaagttctattttacttctcatattcagtaaaaggtctctcaggtaccctgggtgatggggggatttacaaatccaggataaatagctagtagtggcaccttcttcaccagtcttacattttccagtcagacctgatttatgtgaagatggagagagttaacaacctctgtcttcaaccaaacatacaaaatcttatgtgtcctagagacttacaattgccaaaatctctcattggataagaaatccattttactttatgcccttccatgcctgctcttgaagcagaggaccacattcttcttctggatttgtcatctttagggcgagtattgctgcctgggggccagagcattgcacattgatccttcagaccctctgcactacatagctgccagccagccaaggcccaagggatgccagggttacatgtgcccttctcagatcctggaaatgggtgagggccaagcatgggtcttcctgggcattctcctgttaaactaaaacatctttgtggcagtttcttattcttctttttcagatactgatgagtgttcaatcggcaatccgtgtggaaatggtacatgcaccaatgttattgggagttttgaatgcaattgcaatgaaggctttgagccagggcccatgatgaattgtgaaggcaagtgatctttgtcttaaatattatttcttcttgacatagaaagtgttttttaatgtctcaatatttatttatattgcttctgatattctgctggtgagcatacggtggggttttttgttttttgggttttttgtttggttggttggtttttagttttcctttagtacagttaaaatagctgctgtaaagcccttgtctgatcattccagcatctgggtcatctcagggttggcatctcttgattgtctattcccttgaaatggagtcacagtttcctgccttttcagtatattggttaatgttggatttatactctggatattgtgaatgatatgcttcgaaatcagttatattactctgaagaatattgatgtatttgtcttagcagacagtcaactctggtaggcacaatagcagaccctcaggcctcagaagggcggtggctcatctgtcagttctttaaaccttactcactagcattcttgattttgccccacacatgcatagtacagtcatgccacttgagctgactagatgaaaaacaaatagtatttctccttccctggcattctttcctgggttccctttctttagcagacttggttgccctaagattccctcccctccttcctctggatggaatctcagaaagtttcttctggagagttagctaccagatgacagcactgccaggccatggtcatctggagggtaatttcagaaaaatagaagccaaatcaatgtgaaattactccctactggttgtttgctctgagtttcagctcaccactaaaaacttcaggtactttttatattctttccggagtttatagctgttatttttaaagatgagtttgttaggtactaaattctgcgtaccagatgtgtaagttctactattctattgctttgtgtatgaccgccaagtaaatgacatcaacatttagttacacaaataattagaactctaggctgagcacattcctgtccattcctttggtcagatatcaacgaatgtgcccagaacccactgctgtgtgctttccgctgcatgaacacttttgggtcctatgaatgcacgtgcccgattggctatgccctcagggaagatcaaaagatgtgcaaaggtaaggcctcagactcgggagtagttcgaactttatttgtcatgctggagatacatcttaatgattttatagttctcaactaatttcttctagagctttacagaaatatatatatgacagcattttgctagtagatttccatacctagataacaagacacatgatggtatttttgtaaaatcaagtccgagataagatgggttgagaagcccactattctcacactcttggattcttattaaggcaaagattgcccttccctaaacttcttatcactatgagcagtgctgaaacttacacatctggaatatagccaacagctgacaatggctgggcttctcctttctctgtcccaccataaaattacatgttaagtgtcagaagaccacacctgtgacttaaaagtactaaactacagcttgctccagataatttttaatttttattttttgttctagatctggatgaatgtgctgaagggttacacgactgtgaatctaggggcatgatgtgtaagaatctaatcggcaccttcatgtgcatctgccctcctggaatggcccgaaggcccgatggagaaggctgtgtaggtaagcggtaagggaaggtgtctgcttatgtaatgcctccactcccagcctcattaatggcactactcccacatcatcttaactgcaagccaactctttttccagctgtgttaaggcagtgatacagctagctttcttccatctcagggtctctgctaatataataggttctggattgtggcatttatgcctgctcaagaatacatgcccttttgatttttcatattttaaagaaaattgtaaataaaactatatgtgttctgtaggtacatatgtaaccaagtaaatatatagaaaaacattgaaaaaggtaaaccctaattcatagaaggaattactgctagggaagacatcgagattagaagtaactagtctgaggtgattttagctgtatctgtcaattttaattattttacaaaagagtgagtttctgaactattctgaattacatgtgtcatataaaaaattatatatacaacaaattataattggattttttagtttcttttcatttgttagatatttcattcaaatatagtacttaataaagttaaaaatagacgtacataggaggtgtagttatgcagtgattctttcaaaaacactattcttccaagatctgttatcccagaagattaacctaaactcctaagtcatatgtgttcctccaaatctagcacagggcaaaatgctaataaccatgtatggaagaaaggaaatcagcattcttaatcatcgtgtcttcttactgtacatgaaatttcttttcattcatttctcttttaatttatttgaatgaaaacaatgtatgtatgtgctatgtttaatcagattggctaaaatacttaaaaatgtgttttaatttttatgcatggaaatttcttatttttataactagctgaattttatattatactatctttattacatttaaagatatgttgttgggaaagagggagtaagcactgtgatcagattaagaacacaggtttctggtcatggatctgccataaatgatctggatgacttgcaagtgattcaattctctgttcttcagttccttcatctgcatacagtgagaaacttagtctgcatgattgataggagtggtgggggtgggtgttgggaagggtgcatctgctctagctctaaaattctatcatcctctgaacttactttttcaaagaaaagaccaagagcagcattctacatttgtattcttttcgttgttaaacagcactacaaaagatacaggttctgaaacttttctgatcttcaagcttttcattataccatgctgatagctgaaatgtctgcaaaatttttttgatcatcacaaaactctttgtagaacactttcatgcaaacaatgtgttttcacaactagaaattccagtttaaaaacagtaaaaatattattacaaagaaaaagtatttacaaaagtcaggatgaaaaataaagccacaaaaaaaatcaataaaaatgccaatgcatgaaattggaatcaaacttacccaaaaaagtcgattgcaacggaaactaaaagtattacagttaagggaattaaagttatacaggaaatctaagacctctttaatgaaaaccataaacctaatcagagacggaaacttgactatgcaatatattatgcctcagtaattatttcttaaacaaataaatgaatcaagaaatctgataagtagaacatttttttaccaagatcattaaattttcttctttagactttggcagactgtcccaattttttaaagtttatccaacaatctttgattagaagatcagggacataagcaaatgagaaaagtatggagtgtttttgtagagacccatttctacactgcagtgtgaaaataggtagatgcaaaggagaaaatactgggatgctatttaattatcaacaaactagtcttctagacatggagactgccggaggtgaggcaggaagaggagaagcagcaactatcagagattctaaggctttaagaactttatcagagccacacgactccctaaattacctgaaagcccgagtgtagtgcctcaagggtagagagcatggcagatttggtgagaggatgttcatacaacaaacatgaattgaaactacacattaggcccactttaggacccgtgaccagctacactatttttcagccagtagctgaactggagaaaattgttcaaagatgagtaattacacaagaccagtgtagctgaagcttgtgcaggagagtggcatgaagtgggtctaaaggtaggcaaataccatggaaaagaatttggttttatgctaaaagtgttacggcagagtgactcagagtatgggccctggggatggactatgaatgttagcaatctaggttcatgtgtgctagctctgtgaccctgggcaagttggcttaaatatgtgcctcagattcctcatgtaaaaacaaataggaattttgagcacactttcataggattattgggagggttaaattaaaaaattcacatgaaacccttagtacaatgcttggcatagagtaaaatttcaattaagtattagttgttatttcctattttacacatttttaaagatatctggctgccttataggtaatggatttgaaggaggtggtagcagaaacaagggtttcatttaggtgactgtcttaaacatccagacgagagaaaaaggaggctcagattagggccaccatagtgtggaaaaggagtggacagattcagaaaatgtattggaaataatcaacagattggatttctgatggattgattgaatatgtataaaagataagtcccaggatttttgcttgagtgactaaagtaaattagcttagtataataatttacttgatgctactgttaactgatatggaaaagattggaagaaacaggtttcgttggggacacagaagaataaaagttctgttttggtcatgctcagtgtcagatatgttctagctttccaagtgggaatatcaagtcagcagacatatttatgagccatagatgtaaattgctagcaaatcgatagtgtttgaaaaattatgggattgactgagaacaccaagagagagatcctggagagtaggaggagcagggctccttcccaggacactggactctggttgttccaatatttagagagactaaaaatattaggagactaagaaagagtagccagcaagataggaagttctccatgtccgtgtgatgtcctgagaactaaagtggccgcttttgtatgatgctactaagatgtagagtaacatagagttgtaattagatttggtgacttcttcaggaggtttcagtggagcacacacattaaggaaacaatcagtgatgaggaagtggaatttatcgccatggatcattcttccagaaattttgttctgaaagtgaatcaatacatgtggcagtagccacaggggtaataggtgaataagagagttttttgtattgttttaagatgaaagttactagagaatttatgctgagggaatgattccttgaaaagggagtattgtgaaatctgggaaggcaatctagagtaccggtgcaagagctggccttggagaaaaaacaaagatagtttagctgttggaagaagacaaaaggttgaaagtgagggcatagcccagtggttcataggggagagatgtctgatgtgtctgagtgtgtaatgtcattttagaaagtgagagtgtgaagatactaagaagtatagtaggattgttgacggaggatcatgtacccatttgagatttgagtcttgagtcttgagtctcattgaaatgaagcctgttttcctctaggctgtcatgctgcactggattggacatagagtaggtagaagtaggggagcatcggacaagagtgatggacaatggaaaggtcgataattgacaatcctgctgcagcccacaaattgtcaaagggtagaaagtacaatgctggaaatcaacattatttaggtagagcaacatcactccaagatacaccctattaaagttacaaatttcaacagaaaaaagaatcaggcaactttttttcaacctcttctcagtaattctttatgccaatgtcaataaagcaaaattaatctaagaatttgaagcacaaattatgtactacagaagaaactgtattatacataatcaaacttggaagaactcaggcagtatatcctgagttcttccaagaacgcttttagttcaaaagccctttttgaaaaaaaataattcagacaaatcaaatacaattcaaaatcagggtgaatgacattaaggataggattagaccaaggcaacagaccttgcaccctcagattctagaaataataaactaaaaaaactttttaattcataactcattacttttgtatatacctttaaatttctgaagtaagtgtttttttctaaaaaaggaaaaaaataatcacaggaggcacatcatggtgaatttcaaaacactaagaagaaaatgaaaatccttaaaacttccagagagaaaaaccagatttcttacaaatgaacagtaacactggtttaaaaaataataataaaggagctgtattttgaaagcattctaagggaaaataattttgaactaaaatgctatactcaatcaagtatgaaaacaaaagaagacatggtcagaaatctgttttagaatacttatagccctcttaaataattacctgccgggcacggtggctcgcacctgtaatcccagcactttgggaggccgaggcaggcggatcacgaggtcaggagattgagactatcctggctaacatggtgaaaccctgtctctactaaaaataaaaataaaaaaattagctgggcgtggtggcgggcgcctgtagtcccagctactcaggaggctgaggcaggagaatggcgtgaacccaggaggcagagcttgcaatgagccaagattgcaccactgcactcctgcctggtcgacagagcgagactctgtctcaaataaataaataaataaataatcaccaaactacatacactaatttttttaaattaattgaagtggaagaaataatataagtggaccaatggtgagccaagaaaccagtaagcctcattaatttaaacagatgctgatggcacactaaaaatctaacaaaccaaaacttctagataacatcaacatggcaggtggttcagggagagagcagagataagtaaatttatgcaaaggtgcttactatggccgagagctttcaaaacagatacttcttggcattgatagaaaattattcattaagaatgtgtgttgaagttgttcagtggtttccactgtaagaattgaaagaagactgtgacttccaaatatgagttcatagggaaaaggagggcataggaagagggcaatcccacagtaaatataaaacaatataaaatgtcaggtgagactctaaacatatcagtaatcatgacagatataagtggtttaaactgctggttaaaagataaatgtgtttttaagaattctgctaggttctctttaatagaattgtagtaccaaaattgaaatctgagataggttgaaaataaaaatattcaaggcaaatactaataaaagcaaagtgcatgcaaatataaatgtcagtaaatttttaaaaattttaagtataaagatgaaaggagccatttatcaaaaagatgtaattgtcatgcgctctcttatgctcctaacaacacagctttgaaagaaacctcaaacaaaatttacaaaatatcaaaaaagcacaaaaagtaaggatatagagaattttagtgaaaacaattttgttgaagtaggtttatttatcaccaaccaaaagagcagtattacttaaacttcctctcccattaactaccctcacagaccatagttgttcctgtgattttactcaaaaccaatttagcagcttgtcctttattcctggcctgtgaggcttttactgtactcatcacccatacccaacacccaccatccctctccccacacctttctctaatatcacagaaactgacattcttttccccagagttcccatccttgcctggtgtctcagggcaattctattccttttggaggccaattttcaattctatatattaacactatcccttctctgcagaggataaagaaaagaaagaagaagacaacattatcttaagaaagaacccaccaagaaggatgaagtaaagctaaaaataaattaatattcacacatgaccatttttaatctcatcatattagtattttggcaaagaagtgttaaataagatataacccattagaagatagcttgtaaactataatttgacagttttctcattattcatattgtttgtttttctaaagatgaaaatgaatgcaggaccaagccaggaatctgtgaaaatggacgttgtgttaacattattggaagctatagatgtgagtgtaatgaaggattccagtcaagttcttcaggcactgaatgccttggtaagttgacatccaaatatattatacttggtagataaaacatctgttcatgatgtcatcacagaagagctccacatatatattcttgtctgctaaacaaatcccccaatctcaataatccacatgcttcttcttaaagatgcacatctattaaaatgatatatttgtacatgtgtgtgttatatgcacatctatgtgtaatgtaaataacaatcttaaatagtctttccaaaattaagattaattaagttctttggaaaatttggctttagtaaaacttacatcagaggatgatttaattccaaaagaaaatatttgcaatatgaggtaagctctgccacaattaatgcaaaataaatgccatatttcaaaaatgcagggaaggttactttttatattgtggtacagaaaaaaatgttttataaaacctttttatgggaaatatacatctcagacattatattttattttaatgttaaaatgcatacattataaatcattgtagttaattatggcagctgcaaaaagtgtgctgtagtaaaattcaaggtaaacaaagaaataagagcgctaagctgtttgactcatcacttgatttaacataaaaagagtatttcaactatatcacatttttttctgaatgacgtcatatgcttcaaattccaagaaatttttgatcaaaaaaacattttttgtttattgttatctctaatctatacctttactaactaacatcagtcttttaggaaataggaaaagtaacctacatataaagtgtaattttctgttcattttattaacagtttggctaggattgtttataaaactgtattaaagatttaattggcttttaaatctgaaaaaaataattttatttatatttttataaaatctactcagtccaagtgtttgaacagtctttcagatgtagaaaatatgagatatcagattgaataagtaccaagctcataaaatatagtctagagtttgctttccagaaactaatcctggcactcatttgtttaaaggaaaataatttaatttgattttcctttcacttgtattctacagaaatggtaggtcactatcatttagttggcaatggattggaggaaaaaatctatctatttctaaagtatagtatcactttttgtcaaatttaatagactgtagtctgtagtgaaagaatatgctatgaacttaactgccagcaaaacttaaataattaagacattaagctgtcttaattattcctaaggaggaaattcttgactgccctgcttaatttgaaagccaggataatgaaatgtcagttccgcatccttaactctttctactttgccatttcagacaatcgacagggtctctgctttgcagaggtactgcagacaatatgtcaaatggcatccagtagtcgcaatctcgtcactaagtcagaatgctgctgtgatggtgggcgaggctggggccaccagtgcgagctttgcccacttcctggaactgcccagtacaaaaagatatgtcctcatggcccaggatatacaactgatggaagaggtaaggagttgaggaaatttattcatataatcaacacattaaattttatgaattcagataaatgtgaaggaaaagtgaaaaattgatacaatcaaaagagtagctaaaatgtttataccttgatatttatatttgatgtgtgttttcatatatatgtatatagaaagaataatctttgctaatgctttagagattttaggagttaatcttcgtatcagacctaaggggtagaatgtattattcccattttaacagatgaggaaaatgaagcacaaagctaaggtaacaataagtaattttcccaagatcacacactttttaagggatggactttgagggggtagctttctagattccccccaaaatcattcatgcttagattgcaaaatgggtagtcttaaacagggctttcaccagagtctccctttatcccctcccatcacttgagattatttttccatcacatccatgttgctgttcacctgaatgatgaacaggtgctccagtgctattaggaatgtttgcagttagttatgtcatctccatttcttcatttctctttgattctaaccagttttacccttgcatatatgttaactcctgattgtttttgttgttttggtccacagatattgatgaatgtaaggtaatgccaaacctctgcaccaatggtcagtgcatcaataccatgggctcattccgatgcttctgcaaggttggctacaccacagacatcagtggaacctcttgtataggtaacgatgggcacctctatatccaggggtttgggggctaatcagctactgtttcctgcaagtcactcattatcagtagagtgtctttattatggagctttggaatatatattttattaaaatgttgccatcctctcaataatgtgcttcttaatcacacagcacttggcctttgtccagtaatgtgggatgcttaaaggagcctcagtaaagagagtttaaaagaacttgtgccacatccatgtgtcaaaaacagagaaactcttaagtttctgattctcaggttgtaaacctgagaaacaaaaatcacaaatacatactttcaacattttatattttaatttaaaatttaaagtgcacatttgtttgtcactctttgactgaaggaaaagggctttttcttatgaatatgtgtgtttgtgtatattaagagaatgttttccatgtttctctgctattattttgcataaagtataccaagtaagcattacctaaataaaatttccagctgcggagcagtctcagtacagaatccttctatcattttacaatttatttttcttattcggttttttattgtctcactcacaccaatatatgacagtcgtggggcagaaaggacttagacttttgtcgggtctttccaaagtattcaacttcatttttattaaagaaaaaattttttttctcctttatatttcattagcttacttgatattctatcaaattacctatgtcaataacaagcacacttggcattaaaaggttaagaaaacccaactgacttctttgaaacagaagagcatgagtaatagagaataggccattaatcataagcattcagcattctgtgggcatcaacgccgtatgttatatggaggaaatggagattgtctgctatctcagagtccgagtaggaaagagatggcatatttcaaggaggacaattcaaggagggtctaacaaaaagactgtctatacacgtgtgagcagtgtgcacaaaagccaggaggcgtagtgctgtgtgctggggctgtactacccctgggccaaaagaaaagagtcagaagttattggaacctagaaaaagaaagttgtgctcagaggactgccttgagaggacctctgacagctgctccagtgactcagccagcctgagcctatcttgcagggagggagttgaggaaataagggccagacagaagacagagggcaagggagagcctccggatggagtctgtagagctccatctcttgggcctgagagcagagtggaccagggtgaggactgaatctgaaggggaaagtggaaggtttccagcaccatctgtgatcccacaagatgcttaaaggagcctcagtaaagagagtttaaaagaacttgtgccacatccatgggtcaaaaacagagaaactcttattaagtttatgattctcaggttgtaaaccaaagtatattaatctaaagaatgtagtaattttggacccagacagttgtctagacatcataatatttacccaagatccatagattgatttacaaagtaaacccgcatgttactttagaaaaaatccttctgtgcatcatttctctctggctatattccactttaagttgaacaggaaaaacaaaaagaatgaagtgagaatatggaaggaggaaagagtctggttgtttcttttaaccagtaatttaatcttcacatcacttttacttagaccttgatgaatgctcccagtccccgaaaccatgcaactacatctgcaagaacactgaggggagttatcagtgttcatgtccgagggggtatgtcctgcaagaggatggaaagacatgcaaaggtgagtgaagagtctctgacaatcgtgaccctagtctgtatcttttctttcaaatttaaatattagattatcaggaattatgccatgtgcatcaccttcattaaaaggtcccatcctagtggccatgttattgctcatagaaaaactctaccaatatgctcattgcaggaagcagagaggattaaaacccaagttaaaacagtttgcttcttatagaaaactgcataaattttaaaaaataaaataaaacaaaagttttggtatgggaagagatcgaaacaaatcactgaaataagatatttgttgttgttgcttatctaagcttttatttctctaagctacctttattacaggtttactgtggaaaagtgaaaatggataggtaaatttaaattttttgcttaggtagtatcaaaagtaattatttatcaagctaaattagatcattaaaatagtttcaatactatactcatatatttgattttatagtaagcctcatcagaatgaaattaatggactgagcaaatttttaaaatgtagattattctcagtaaaatgaggttttatttccaaggcatatcaaaaaaaaaaaaaataatagcaagcaccgcttggacctgtttagtgaactgaacattgtttatgttcagttgtacattgtttatgagtatgactaaagactccatatcaaaaaaaaatgagtatgactaaagcgttttttaagctgtaaaataataaattagtcttgcctacatcttatgtggtatatttattttaaatatagtttccaaattaagttttagtatagccaaaatcaaattttgagtttttaattagtagggtccaaatatcaataccatttgtgactagaattacaggtgttgtattttgcttcctctaatattaatgcccgtgttttcatctgaatgtggagactcttagtgtttctgttcggaccttcatcagtttctagattctgtttcatttttatttaatccttcctttaataggaatcagtaatcagccatgtactatactgcattcaatgcaagaattgtaacctttggatagtagctttgagaacagttcatggaaactgctatgattctgccattcagtttcttatgttatatattgccttaattgtcctatcatcctagcccgtaatatttattctgcttaaatatgtaaaaagaaactgtttgccatatgcctatggaaatctacgaagcttccagcaaaaatctagacaaaatgcttctaatggagcatgtgcatctcctgtggcttcacaagaaaggaaacatagccagatagtctactgtgattttcactggcttctctctaatttcagaccttgatgaatgtcaaacaaagcagcataactgccagttcctctgtgtcaacaccctgggggggtttacctgtaaatgtccacctggtttcacacagcatcacactgcttgtatcggtaagacaaagttacaaatgggaaattttacaaacttctagtagatgcataaaaattatatttaaaattataaacagaagaatgtcctggtatttatgttcagtaaccaataccccataatttgtggtctaaagaagttgctaataagatagatattttcaagaacaatatccaaagggaaaaaaaaggcctttttagtccaagcacctgcacagtagccatatttcaagcagtgcctttatatcacattcttaatgcaaccatggtgttcagacaaaatatgattaaaggctcactgtaatttagaacatgttaacaaacatattgagcttttattttagaagacacatgttaaggaactttagtcagtgtgccttcaatcactccaaaatatgctcaaatctcaaacctcttaaaatacactttttcttaccacttttgtctttaatatgacagtgaattttggtataaattttcccaaaatgccattttcacatcatgaaacttaggttttcatacattgctttttacttcccatgaaacgtaagacatgttatgattggaaagtttgacgctctgcttcttgatgctttgccagacaacaacgaatgtgggtctcaaccttcgctttgtggagcaaagggaatctgtcaaaacactccaggcagtttcagctgtgaatgccaaagagggttctctcttgatgccaccggactgaactgtgaaggttagttgatttgctcaaaaattcttaatctaataacagtaaaccatatatatttttaacttccaagacaaattggtataatctgaaaaaaagaaaaaaaagtattgaacaaaataggacccagcaacttattcctggtcataaatttctatgtatcactttggggacagagggaaacctaaatgcagtgaaacaaaaattctgtgattacgaattgacttttaaagtaactgttgactaatcatggatctgagaaagaattgaattgaaaaagaattctgtgcctaatatggtttgcggtagtgtacaagcataccagaaaaaaataataattggccttttgttccatgattcttaaatgtataagaattaaatataaaaagaatctgtcatcagagagaattgaacaaatgtactgaacacgctaaggtgaaatgatggctgtttctgttttttacgagtcaagctcccgcttcactccttcactttcttacagtggaccttggtctcctctgcaataactatttcctgtaaaatccaagggaacatttaagtggaaacaaaataagaacatgcttgcagttaagaaaatttcatctagttcttcactatttatattgcaagtggcagtgtatgacaagaaaaatgtattaggattagtgtcttataaacacccatgccagagattatgagactatatttatttcccttacattcttatatcgtattgcaatttatagttttcttgattttaatcacccttttaacattaactattcttagaaatatatgatttggatttctagaaatatatgttaagtatttaatttgctctctgtaaggcttgtggggcttttatatgtatctcattttcagcaaagaaaaattcagtttttaaaatgtcaattttaatattttatctttcaaatcgttgagacgttgaaagtattcttaacctacagctgtttgccacatgcgagttcagctcgtgaccatccccataagataccatttattaattatccatgtaaatttgttacacccctcagacatgccaattttattttactctttatggatagatttcaaatattcggttgtcattccaaaaaagcatacataaataaagaaattattccacatgtataataataccacatcttgtctaaaaataacatatttaaatacttaagagggatttgcatctaattaatcttgaatggtaataaaaatttttacgtgcaatataattgtactttttaggtatctctgtaatgcttctatcctcccaaaaatgaggattgtatctcagtcactttcaaacttactggactatgcaatgcaaatatatttatatatatatatatatatatatatatgatttaccaaataaatcataccatttgcagttaattagttcaaaatgtacaacatttgtggttgctatggttgacttgctgaaattgagatgttatttagagcactgacatgccgtggtctggtggagagcagaagaatgagctggtctcttatctcagaactgttccctgcaccaccactgactaataaccatgtgacctggaaaaatgacagcctctctatgtgtcatgtcttgtttgtttgtttgttcccatgataacagttaccccaggtttcgtttggagtgcatttaaaaatagtagaagaaaggtgacataaaggttttgccgggcttgtttttgcagatgttgatgaatgtgatgggaaccacaggtgccaacacggctgccagaacatcctgggtggctacagatgtggctgcccccaaggctacatccagcactaccagtggaatcagtgtgtcggtgagtgctcttttcttccatcgcacttgcttttctcacctgaaagtgtctctgaataagatgaacaaattgtgagggttgagatttcagtatagcctttgaattttagactttaaacccagtccttaagactgatgcatggggactcattctgctagtgtgtatgtttgaaaatatctattaaaaaaaaagtttgtttttaagtaccgggaagttaacttaactagaggttacttcattttaaatatctgctaagtaattttaagtttctgaagatgatgtcaagaatcatcatctttgtttgcgaaggtcagccacttttttgtctgtaatttaatatatttagatttcccatccattcccctcatacgaatctaaaggagttcacatcaacttaatgaggacagtccatgtgtgctctcctgtcacatagatttaataaaggatgggaagtgttttaaggttgaaaaagtacctacttacagcaaatgctgttggcagctctagacagaagtgtttgtaaaataaaatacgtggctctcagctctgttccttgcattgataatagtcgctgaaattctccttttaaggagtgattgatcaaagagaacattattctctacttggatagccaggtgacttacttagcatatgcctaatttcttggctccttttgaatgcgcttcacagacactccaaccaacacattttgatgctaggtgctggcataactgagcagaaaggggcactgtggtcctgcagagaaatatcaggatgcttcctgtttctgtgtagtaattcaaattacttcacaggttattcacatattgaattattgtgatccactaaataaattagtctgattttatcctttgtggtcttctcaaaagaaatttctagtgacagctaagtgaattaagaacaaaaaatcaagataaatttcagtggagggaaaatcatgccaggtcaaagacagatgctttaccacaccacgaatatacactcataggagtgtagaaatgcagaaaccaataagtgatcaaaagttaaagacaagacagtttcaaaaaattatttaaattaccaattaggcagttattcaaaataactttataaatttaattcacttttttttcctcttcatagaaaaaaactgttgtagaactccttatgcccagatttattgattcataaacaaaggcaaagtgtatggcacactctttagaatatcagaaacagtattttttacatagctattaaaataatgtaaaacattctgtaggttgcctattcactctgatgatagtttcttttgctatgcagaagctctttagcttaattagatcccatttgtcaattttggcttttgttgcaatttcttttgacgttttcgtcatgaagtctttgcccatgcctgtgtcctgaatgatgatattgccgacgttttcttcagggattttttatttttttaggacggactctcgccctgttgcccaggctgaagtgcagtggcatgatcttggctcactacaacctccgcctcctgggttcaagtgattttcctgcctcagcctcctgagtagctgggattacaggagtctgccaccatgcccggctcattttttgtatttttagtagaaacggggtttcaccatgttggccaaggctggtcttgaactcctgacctcaggtgatccacccgcctcagcctcccaaagtgctgggattacaagcatgagccaccatgcccagcctcttctagggttttttatggtttagggttttaagtctttaatccatattgagttaatttttgtgtaaggtgtaaggaaggggtccagttttagttttctgcacatggctagccagctttcccagcaccatttactgaataggagatcctttccccattgcttgtttttgtcaggtttgtcaaagatcagatggttgtagatgtgtggttttatttctgaggtctctgttctgtgccattggtctatatgtctgctctggtaccagcaccatgttgttttggttactgtagccttgttgtatactttgaagacaggtagcatgaggcctccagctttgttccttttgcttaggattatcttggctatacacgctcttctttggttccatatgaaatttatggtagtttgatgggaatagcattgaatctataaattactttgggcagtatggccattttcacaatgttgattctttctatccatgaggatggaatgtttttccattcatttgtgtcctctcttatttccttgggcagtggtttgtagttctccttgaaaagattcttcatacctcgtttgctgtattcttacgtattttattctctttgtagcaattgtgaatgagagttcattcattgtttgactctctgcttgtctattgttggtgtataggaatgcttgtgattcttgcacattgattttgtatcctgaggcttcgctgaagttgcttatcagcttgagttttggggctgagacaatggtttgttgggtttttgttttttttttggggtggagtctcactctgtcgcccaggccggagtgcagtggcacgatctcagctcgctgcaacttccacctcctccctgcaacttccacctcctccctagtagctaggattacaggcgcctgccaccatgcctggttaattattattagtttattattattattattattattactattattattattattattattgtatttttagtagagacggggtttcaccatgttggccaggctggtttcgaactcctggcctcaagtgatccacccgccttggcctcccaaagtgctagaattacaggcatgagccactgcgcctggtcagatgatggggttttctaagtagagaatcatgatatctgcaaacagataaaatttgacatcctctcttcctatttgaataccctttatttcttctcttgcctgattgccctggccagaatttccaatactatgttgaataggagtgataagagaaggcattcttatcttataccagttttcaaagggaatgcttccagcttctgcccattcaatatgatattgactgtgggtttgtcataaatagctcttattattttgagatacattccatcaatatctagtttattaagtttttaacatgaagagatgttgagttttatcaaaggctttttctgcatctattgagataatcatgtggtttttgtctttggttctgcttatttgatggattgtgtttattgatttgcatatgttgaaccagccttgcatcaaagggatgaagccgactttatcatggtggataagttttttgatgtgctgctggattcagtttgccactattttattgaggattttcgcatcgatgttcgtcagggatattggcctgaaatttcctttttttgttgtgtttctgccaggttttggtatcaggatgatgctaccttcataaaatgagtcagggagtagtccctacttttcaattgtttggaatagtttcagaaggaatggtaccagctcctcttggtacctctggtagaattctgctgagaatccatctggtcctgggcttttttttggttggtaggctattaattactgcctcaaatttagaacttgttattggtctattcagggattcgacttcttcctggtttagtcttggtagggtgtatgtgtccaggaatttatccatttcttctagatttcttagtttatttgcatagagatgtttatagtattctctgatggtagtttgtatttctgtgtgatcagtggtgatatcacctttatcatttttttattgtgtctatttgattcttctctgttctttattagtctagctagtggtgtattttgttaattttttcaaaaagccagctcctggattcattgattttttggagggtttttcatgtctctatctctttcaattctgctctgatcttagttatttcttgtcgtctgttagcttttgaattagcttgctcttgcttctctagctcttttaactgtgatgttagagtgttgacttgagatctttctagctttctgacatgggcatttagcgctataaatttcccctaaacagtgctttagctgtgtctcagagattctggtacgttgtctgtttgttctcattggtttcaaagaactaaagagcttctgcacagcaaaagaaactatcatcagagtgaacaagcaacctacagaatggaagaaaatgtttgcaatctacccatctgacacaggtctaatatccagaatctgcaaggaacttaaacaagtttgtgggaaaaatacaaaaaccctatcaaaaagtgggaaaaggatgtgaacagacacttctcaaaaaaaaacatttatgtggccaacaaacatatgaaaaaaagctcacatcactgattattagagaaatgcaaatcaaaaccaccatgagataccatctcatgccagttagaatggctattattaaaaagtcaagaaacaatagatgctggtgagactgtggagaaataggaaaacttttacactgttggtgggaatggaaattagttcaaccattgttgaagacagtgtggtgattccacagggatctagaaccagaaataccatttgacccagcaatcccattactggatatatacccacaggaatatagatcattctactataaagacacatgcacacgtatgtttactgcagcactatttacaatagcaaagtcttggaaccaacccaaatgcccatgatagactggataaagaaaatgtggtacatatacaccatggaatactatgcagccataaaaaggaatgagagcatgtcctttgcagggacatggatgaagctggaaatcatcatccgcagcaaactaacacaggaacagaaaaccaaacaccacatgttctcatcataagtgagagctgaacaacgagaacacatagacgcagggaaaggaagggaataagcacatgctggggcctgttgggggttggggggcgaggggaggtaacctagaagatgagtcagtaggtgcagcacagcaccatggcacacttggctatgtaacaaacctgcacattctgcacatgtatcccagaacttaaagtaaaatttaaataaataaataaatataataataatataaaacaattttattatattacaatatttataaaatatgaagcccaccactttatttagtaaataccatggacttgttggttaattccatagaccttaatccaaaagaatgattctctatcaaacagaattttttttaaggagaacaaaagtagaaataggaaaatgcatggagtgccaatttaatttcaaagtgtttcagtttcctgaagtttttgtttctgaacacctagcacaaaacgagctgcacaggtttttactaaatgtggaagctctatctaaaatagtctgacttaaaatcaagatggtgtggtgtatcccagttcccctttatgagatcctggggtgagcactttgacaaggcagtcacccccaaaggagctcgcaatggagtccagccagaagccggtttgccttctaatcaggagaaactccatgagcagaggaataaatggtttaagatgagtccaaaactaaaaatacatgagcagatatccctaattgcaggtattaatttgtaagcttattctactaaaatgagtacctctaagcagcaggtgcctgggtacgacacatcagggatttatttcaaaagattctagattcttctgggcagggttgaggaatccagcttgtctctaataaaattgctgactttcttcccttgaattcatgtaacgccattagatttttaactcaaacatatggcagaaattgggtgaaataccccttcaggaaactaataaaagcaacaagttagcaaaagaattaggacaaaacgcaaattgaaaagccaccaacattttttatctgtcactacttgtgtgaatatcttcagccattcatatgattgatgggggaatacagaaggaagcatttcagacagatttcccccggaatcctcgtcagtggtcaacactgttagtcaatgcatcagacagtttaaacaggcaaaactgtaaacctacgatgttactaaacctgctaccaattgaagaagaatgaaagttctttgaaagtgttaatattgaaaaaagctttcagttcaaactaacactttaggaagttttctgccagttgtcacaaagaatttacaacgttctggtagatagagtgtacagatgtagggaacattctcaactatttgtaagcattagaattattcaaatacaattattcaaaattggaaatatgtaaatactaacatttgcatatgaagaaaaattatgtcttcatatatgaagactttgtgttttagtaacttccagttgcttctgtagcctgttcacaataattcacacatagttgagtgaggcttgaatcagttcaaagtatgtgtcagacaggaacatatttatttaagtctataaattttaatcatgatatacatttatagaatataaatatgaggtatatcatggtgcttgcaaaaatgttacatatttttaaatattcttgtaagtgatatgtttaaatataatttattcagttaattatttttgcctggtaatttttcttcctaacacaatgtctaatggtatattcatggcaggatcattttattaaattgtaatctaatttagattccctgttaggagagaaacactgcataggaatgtcagatctaattataaaagcagatgaggctttatggcagaattccaagtctcttgtatatagaaataaaatagcagttatagttacatcttatgtagccaagttactgagaatttatttatcgtatctacgttcttcccctgccataaaggctaagaattttcacatattagataatcagcatcttttatattcagtgattaagacacctacatttagtggtctcctttaattctgagactatcagaatcatgatacaaaaatgttcctaataatatctaccctttcagtaacttctgtcctgtacttaatgaagtttaattcctgtctgggaggcctcttcactgagagcccatgtgcatcttccaaatctcactgagctgctgcagatccctcgcttccccactaggtactatgtcctctgtgcacacccacttgcacatgggcctgtttccccacatgggctgaaatatatacttgtcacatattaggtaaacagacactctttgctccacatggagtcacaagaattgaaagaattccatggaacagatgtgatttgttcccagggtgaaatttggattataaaaaaagcccaaagaagtcaagccacatgctgtatatcaaccagacagttaaggcaaacttataatctccaaagttgaaagcataatcagactttgattttgtaaaaatgataatagtaactgaaagtataacctataattatcctgctaccaggtatttatagtataatgttagtcattaagcgagtaaaagctatagctggctgatggctggatgcaaacctgcctcagaaagcacagtctgcacccaatgggttctcaagcattttaaactgaactaggttgttcgttcaactgatttaactaaatagtgttgttttccatcgttttcatttagggtttataaatttttttatgctttctcctcctgtataatgaaggtttggggaattgctgggggaatggatacaaatacttatagggacttttttaattgatatatcataaacttctctcttttaaagtgtacatgtaaatgggttttgtagattctcacaaaggtatgcagtcatcaatactaccagtttccgaacattctcatcacctccaaaagaaacaccatacccaagagcggtcatttcccatttcttcctcccgacaggccccggcaactaattttctctctatctctaaggatttgcccgagatataagcttttgaagtaaccttctgttaagagaatagaagagttattcactaggcaaactgcaaatatctgttcccaagggctgcagacatatttagaaacagtacaaacagaaaagagcaaagcaagggttttttaaagccacaatttaggggaatttttttcattcacgtgctttgcaaatcagtcgtcagaataaaataaaatactgtgttagagttatttctgccataaaatcacaggcacttgagactccagacttgttcacgtttttgctcttgcctgcttccccgtgtaagagtttctttcttcgtttcactagatgagaatgaatgctccaatcccaatgcctgtggctctgcttcctgctacaacaccctggggagttacaagtgcgcctgcccctcggggttctccttcgaccagttctccagtgcctgccacgacgtgaatgagtgctcgtcctccaagaacccctgcaattacggctgctctaacacggaggggggctacctctgtggctgcccccctgggtattacagagtgggacaagggtaaggcggccttcagcctcagcacatagaggaatacatggttcctgagtgagttcaggccaccccccactgcagggaagagtacagtgtctaaaagccaaaccgcaaaagcattgattagaactcttcgggtatgcagataaataccaagaaagcacacacggactgtgctcagggtatagcattacttcctttgtgatgagcataaaacttgaacttgtatgtaaatatcactctttgctcctcttattaagggcctgaattgattcaatttgacccaaggccagagacaaacagatgcttaaaaatgcggctcacacgttgccatggatacctgggctgtgaggtagaagtggaaatggccttgccacaggttcttctacaaattctggaaggtgctagcatagtgatcactgaggaaggagtttgtccctttctttgctcatgtggctttcctatcgcacagagagaggatggtgcctagttggtgtggtgtcattcagcacgggcctgacccacaagacaggcttccctccaactaggcgcactgtctcaagttccatgggctgtggcagaggtgctggccatttgcattcttccaggaaggccgtggtgctcagtaacacagaagatgggcatttagaggtcagtccaggttgccttctttgaaaggagcagtgtgcaaggcagggactaaaaggcatggaccaagtctgtccaacaatggtgtatgataatagttaaaacaaaaggcttggtctacacaaaggtcatttagagccaattcattgactcactaaccaaaatataagttcagaaatctcagtttttaaagcagggagctttgttgcaagcagcaaatacaggcttcaggcccctgaaacaatggaacctgtcttagcattctctttggaaattcataccttacttttaccttctggagttaattatgctcagtacttcagtctaactaagattgaaaattgggaaagcatggggctcaccctcagaagaattttgctgtttcaaaataagggaaaagtttatctattgtgtgttaaagaattataggggattgtggctcatccctgcaatcccagtactttgggagtccgaggtaggagaatcgcttgaaggcagaagttggagaccagctagggcaacatagcaagaccctatctctacaaaacatgaaaattaaaaaaaattagttggatgtggtggtgtgtgccggttgtccctgctaatttggaggctgaggcatgaggagctcttgagcccagaagtttgaggctgcagtgagcaagatcgtgccactgtactccagcttgggaaacagagcaagaccctgtctctaaaagaaaaataaaagagttgcaaagaatattagggttttatgtttatgagtttagtgtttgctctgttggtttcgtgtttctgaagagtctgctctaccactggaaaactatggtcaagtcagtgataaagtctaacaatactttgctttttgcaaatagccactgtgtctcaggaatgggatttaacaaggggcagtacctgtcactggatacagaggtcgatgaggaaaatgctctgtccccagaagcatgctacgagtgcaaaatcaacggctattctaagaaagacagcaggcagaagagaagtattcatgaacctgatcccactgctgtgagtatatcccactctgtgttgccacaaaattttatccctacggagtcatgtatacagtgcagttcacgtcgttttcagcctcactgaagttaatcataccttgaatttaatggataaattaatggacccagtatggaaaagacaagtaaattaaagtgattgaattattagatcaaaacacaaagcttgggagaaaagactttaagattcacagtttcagagcattttctcttgttgtagtttttgatttatgtgggagggtatgtccatctcgggaagagctatttttacatgattcaaaaaatgaaattatttttaatttgttcagttctgttttataaatgtatagcatacaaggctgattttaattttcactagggaaaccaagtaggtctcatattctttgttttatttttaagacagttgttccttcattaagaagttttgtcttccaaatcacttgtattctttaaggaactgaagttggaaattgcgagccactgatatttcctttccctaattgcattttggcagtgtttaaaggggtgggctgcagactacctggttttgaacgtaactccctggccctccctatctgttacctctgttacatagtttgtgtttatttaacttctctcaacctcagttttttcacctgtaagatgggaataataatacctctgaaggctgatggaagggttaattgaattgaaacatgtgaactgcctggaacaatgcctgacatatatatcacatgtgttcagttcctatgaatgattaatatctcatatctagagatcttgatgattttcccaaagatctgagacagtatgaggtcgtcactcaccactctctgcagttaatatgactgagaaattaccccaccaaaaaacctaatcaacaactggctggctgtgtgaattggacaacttgcttcagttttttgggcctcagaatctttgtctatatgacctgacttgtctagccaaaaagttcatgatgctattttataataataaataagccagtgttacatttaccttaagtagactaagatacccaactgatgtttgacagttgagatattcatcaagttcccaaactacaaatccagaagttctgcttataaactttcccattggggtactaggacataattctgcctgaacactgatgggcacttctgggtcaccactgccaagtcctcacttaacagatgcccaatcaaagcattgtggtttttatcctatcttactttgatatatttgtgctcctcccaaccctctgagcaaaagtcagacttggtttatctgggccctgccccactggcttttaccaaagatgctggtttgaactggagccctgagaactctgcagatcactcactctgtgtacctctgatagctcccagtaaactcactcatcattcacttaccttacaaatcaaagcccagctttcagacagaagattcccctgggcgcattccctgctgatgcccaacagcagtacttcttattttgactccagaaaaaaaaaaatcattacctaaattttagtttttaaaaattattaattagcacaatatttcataaactcatcaaaaaaaacttgaaatgggaacactctgtaagcccagtcctgtacctttaattaccttgttaaggctgagtgagaagtcctaaagatttacagggtattctcgatggaattggccttttcttccaactgacaaaaatgtacaatagcctctttcacagccactgctggtaaggagagtgcagaaagcgggagtgggaagccacagcctgtcctcgtgaccaaagcccctgcagctgatctctttctagtcctctgcttgtgctgtagaagcttgtcccaaatcatttcctgttcttcctccaggttgaacagatcagcctagagagtgtcgacatggacagccccgtcaacatgaagttcaacctctcccacctcggctctaaggagcacatcctggaactaaggcccgccatccagcccctcaacaaccacatccgttatgtcatctctcaagggaacgatgacagcgtcttccgcatccaccaaaggaatgggctcagctacttgcacacggccaagaagaagctcatgcccggcacatacacactggaaatcactagcatccctctctacaagaagaaggagcttaagaaactggaagagagcaatgaggatgactacctcctaggggagcttggggaggctctcagaatgaggctgcagattcagctctattaacccttcacagacttgggcccaggctcaaatcctagcacagccagtctgcagaagcatttgaaaagtcaaggactaattttaaagaggaaaaataataataactcttgtttctttcctccctgtcttagactttgaatgttgaccctcacagggagggataatttagactctggtatggccaaagatttgagcacaaaggcaaccgtggttactgtattttttatataacttcattttaaaatatattaaaagaaacctaaatgttcaagatatcagcatatggcactaaatgcacaaaaataatgtgagctttttttttttttcctgttagcagtctgtaacactttgggtattttgctatagttgctaattaaaaaaatatagatgtttatttatttttaatgcagtaatatatggagaaatgaacaaactatgtaaacaaaaagggaaactcacttgtttttctttagatttataaatttgagctattttttttagaggtgctttttaaaaatccaatagatacaagagatgtttcctttggttttctgccagtcatccagctgatacacacctgatgattttaaagaaagccacacagagctgaatgggcagtgtaatcaataatttaaaagacatgaatgtcattagatcctttataacgtagatcgaagccaaagcagctcatttgtgacaacatttcatatcaccagacacaccaggcaacagaagttgaagcacaaccactgtagcaaaataccttgactgcttgtgagaccattagcattgcaggccaaaccgtactgtatttccttctcataacctcaaggaaccatatgtgctacccacaacacctcattcttacccagggtgcgctgcgtcctcatggtactgtaggcagctgaagaaccgccgttcccttgaaagggaacacctggcattctgtggtgtttcgtgctgtcttaaataatggtgcatttattatgttcaagttatttcaggattgccatatgtgcaaacaaatcatgcaatgcagccaaggaatatatgttgttgttgttgttttaaacccattttttttttagaattttcattaatactgtagttatacaccatatgcctcattttatcatagcctattgtgtatgaaagatgtttgtacaatgaattgatgtttagtttgctttagtcatttaaaaagatattgtaccaggatgtgctattaagagcacgtatccattattcttctcaacccaagaacctgtttcctggaccagtgaccaaacctcatatgtgaaatggccaaagcacatgcaggctcctggttgttcctctcaaacctgtgctgaccaaagattagtaaccagttatacccagtattttgaggttttattgtttttttaataactaaaaagaaaaaaggaacagtgtaaatttgtaatcaagagtttgtgaggaaaaacttatggtttttggttttgtttgtttttgtaggtctgtgtatcaaatatgacacttttcttgcaataaagcttattttggggtatttttctgactgaaaattttatgagaccacaacgcctgttgtatttgcgggaggggctgggggctttgtctatgggaacctgtattgaagtaataatagagagccagacacacaggaaaataaaggaatgctggcaaatctgtgaagcaaagtcaacatgtgttcaactgatgattatgatttgaagttacattcaaatagaaggacataaagtcatttacttatgcataaattctaagcttcctgggacccatctttctggaaacttcaaagaatttcttcacttcatgctaatgcccccataaagtatccatgaggaagtgaaacattcttttagagaatcttacttctctaaggtagaaatttcctgaacccaagtttttaagcaaaggtaatagcgggcataccccaggccaaaaggcattttcaaaaataatctaaaccttatctcttaaaatggtatacagtttattcactggagaagtggatagatttaacaaagtatttagcatgaactcccttttgatacactgccaaaacaggcacagaaatgtttccaagactcttagagattaatttaatacatggtttaagaatttatgcgcttaaattttttatccaaggaataagtaaacaaggaaatattgtgactgatcttagtgctgttctttgccaatcagaaattagctgcatggagtaagaaaagtatttgcctcaaggcgttctttaaaacttaacatgcatattcagtttcatctggcatctattattggtacagcatgagtattgtaatatgaaattacctggaaccaaatttgactctagccttgaaagttgagcaacaacatttaatttacctttaactggctcttaaagaagtttgagaatccacatctttaggtgctttacgtagaagataaaaaatgatgaggggtttaagagaagaatgaagtagaaggaaatgaccactgcaagacactccttccaggaggaaatgtctcaggtacctttggtagctttgttgccatttttttactgtgaacactgacaaaatcagaatgaatttgtctgtctcataacgaactgctaatgacattttctgcactattttgtcattcccatgaatgtcccatttgctccagaaactaccttggctaagttatagaaaaccttgcaggagagaaaggtgtgatgtaagcccaaacacataaaccaaatccactgggcatatgtattagttaataagtaataatttggtctttagctgacatgaattctgtttctacttgtatttaaatttggagctttaaaaaatgtagctctatttagtaccttttgctttcgctacttgtagtagataaaagttggatatttttgcacgtgaacattgaatgaaattcagggacaaaacgtttagagttacactaaattcaaacatcttcctttttgcattatctaggaatactaaacaggataattcatacagtctttctcttttaaatactttagggttttattttgcattaattgccttcctggttcagagaataaacgtgtggggttgaggatgggaaatacactaaaaattatagagcatcagtctactagagtcctacaaacctttaggggaacaaggtaattcatatattaattgaagcatatgaatttgctgttatttggccatgtttaacctacaaaatggcaattgtatgtggttcaatttaatagttcagaaatacattcctcgagaattgactggaaatctgaatacatcttttctcttcaaaagacagtaacccattcactccttgctatgccattgttggctcatttgtactcctagtttacaatagtccacaagaacataatttattcaaacaaccactttctttcaagctccaaaacactggaaagagtctaaatcacacacctttgcgacctcaatggtattatggaagctgttcaaagacaaagacaagtccattgggaaaggttggaatacagcacaatgttttgtgtttttttgtttttgtttttccttttaaaaactaaaggaaaaacttgaggaacttttacttcttgagagagacgaaaagttggagattcattgctacccaacaggaagtaagggtgtcaaccatgtctgcaatctcatcccagcctccatttttttttaaaacacgtttgctttctcaaatagatacaaagccatggttttcttgatcaataagaagtacatgtttctgatctcacctccttcaaaattatttcagtgtacagagcagtggagtcctaaaatacaatgtgacgaaagttctctgaaaaggaatttgaagaaaagagactttataccagtgaacagtttgcaaactgagaaaatatagtttcagtgtgaaacaaaggtgtgttccagaaaacaaagagaagattcagattttagagcaaaaggtcatgcccaggttcccaatcaggttcatttatgcaaatgaagtattcaaaattgcttagttctgactggttgacacagttgagtcctgatttgtcaatatagctgagccctgattggcggtggggacaggtgagctctgaatggttggtttccaacccccaaaccagaagtctctgtcagatgcttctttcaaagggttgatgggggcagggtttctggccacaggttattttggcacctacaaggtatcctgtctgtgtcagatgttttgctaagctaaattaaatgatgggtgttcattaaatgtctagatcatttccaggcaagatgtaattccctgtatgccctggctgacagaaagcatggattacccatggattccccatgactaactgaagtgagttaaaacagaaccaggcagctgtggctgggtgaaggactggtcatgtactttgtgttcttagaaagatgtaaatgtatcacaggacctccctgtctacaatcaagccaaaccagtttccgttgtaggtgccaagataaactgtggccagacacttggtccctcctggccctttgacaaaagcatctgacagagacttctggttttgagcttggaaaccaaccaatcagagctcatctaccctggccaatcagggctcagctgtattgaccaatcaggactcaattgtgttgaccagtcagaacaagtttgaatacttcatttgcaaaaatggtcctcactgggaacctgagtaggaccttttgctatatcaaatctgaagcttctctttgtgctctggaaccaccttcatgttacaccaaaagctgcatcttcccagtttgcagattgttactggaataaagtatctcctccaaattccttttcagagaatttttattcatatcattcaattcaattcaatcattcaattcacccactcaggcagtattatcttgtagttaaaagaaaaaactttcaaatcagtcagacctgaatttcaattccgtctccttggacaagttacgtaacttttctgagacctggtttctttcctaggatgatctttccttacactgtggctgagaggattgaatgagatagtacaggcaacgccattagcatagggcccaagcagatagcacacattcagtaactgtcagctgctcttcttcctccttctactcctcttactatcatcactattagaagaatgagctcacatatccacacaaagctcctttctaagcatggcctggaactactgctttctcatggaattgtaggaacaaatccagataaatggcaaccaggaaaattttctaagtgctctgaacctttagaagtcctggtgtggtcatgagcgtttatcgtctccacatcactctgcccttaacagaattgtgggcgacagcccggaaaggtcaagctacaaatgcagcgggagccctcccgtctatagacctccaggaaaccaaccaataaggagaatatgggcatctgatcatccctttgaggtgatttagtgctgttgaatgtcagcactagaaaggcctttagagagccggcacagtggctcatgcctgtaatcccagcactttgggaggccagcgcaggtggatcacttgaggccagtcattcaagaccagcctggtcaacatggtgaaacctcatcgttactaaaaatacaaaaaattagccaggaatgatggcaggtgcctgtaatcccagctactcaggaggctaaggcaagagaatcgcttcaacctgggaagcggaggttgcagtgagctgagatcacaccactacactccagcctgggcaacagagtaagactccatctcacaagcaaaaaagaaaggcctttagaagtccaatcctgtttataagtttaaaagtggggaaagtaaggcccagagttgtaacatagttcattgcaaagctagtttctatcgaggtgaggcgagaaccctggttgcctagttgcagtctggttctattcatatttctactacgtggtaggcctatttggatctcttctaaaccctaagatataggccagttcccatggttttggctcatcttgaatccaaaaatattttccaagcacgatccaagcactgctttttgttttgtctctcccactgtctgtgtaactgctcccaatcttataaaccagagatttgtgtatgcactgaaatgccaaaatattggcggctacatagtagaccccaccccaatcctgtacttctgtaaatacatattacagccctggctctcaaagggttaaatgttttatttaaaccagaccttcaaaactttaaaaacacttacacatttgttttactaagaatgcttaaggaaagtacactagttgcttgtgttgcttaattgtcattttttttccttttcctgagagccttaaaaaagatattactagattaagttggcttactttcgaaatagccaagaaccaacagctcccattagtcactcccattagggctgcagcttaaatgtcaggatgtagtatagacattttccaaaagaaaacaggaaaatgctttacatgatttttagagcaagctatggggaaagttaacattagtagcctttgccagacaactactgctacacgtgtgagttccattgatgaaataacagtagaagctgtgaatggccagttcctaaaaatgtgccaaaaaaaaaagtaggcttttggtctgtttaagctgcctgggtttccaccctaaggccacccccttccttccactctacctgacctcagcttccctacactgatggaacctgctcctgtaggagtggatttagagcctcaggcttgtgcatttgtgatcttcaggcctaaggcagggtcctaagacccatgaccatgtactagaacctgggacttcaccctgttatgaacctgtaaacttcacagagccaaggccagaaaatactccatgaatgaatgaagggagggagaggattctgactctctgcagagtggagacttatggaccagcacaggaaattggaccttgtccaaggagtgggtggtatcatagtcatgattttactggaaaccctcagaacaggtttctggagatcatcatggaggtatcttcccgtcttctaggaggactttcttgatttattctgcttttctccacttttctagagagccccttaggtctcccccagggtgagagcagattgaagaagctgttgaggcaagctggctgcaatcttgacttgtcccattaggatatccttgatccaaacctggactgaggttcatgctgcttctgtagaagtctgggtttgggaactggtacagtaatttttcttcgaagagacattacacagttcttatttctggaacaacttgattaaatgagcatctgttgggtattacacagacctaaaatgattttccctccaaaaccttacaaataattcaaagaaacaagcaagacagccacaaagaaacaagataaccacatgttataagatggtgtgtgcttaagggccatagtggatgtctcagacaaatggcccagactcttggaaaaggagtggtcagtgaaatgcagacttgtgggagatttcctggaaatgctgggacttgagctggatcttgtagaatgagacagtttgggatacgtggcaaagagtaagaaggaatttcccaaaagatagaatagcatgaacaaaatgttgtaagtcataatgtgaatggtatattggaacacaaagaagagttaaatccatgggtctgccgggtgcagtggctcacacctgtaatcccagcaatttgggacaccaaggcgggtggatcacttgagactaggagctccagactagcccagccaacatagcaaaacccatctctaataaaaacataaaaattagccaggcgtggtggcacacgcctgtaatcccagctactcaggaggctgaggcaggagaatcacttgaacctgggaggcagaggttgcagtgagccaagatggtaccaccgcactccagcctggacaacagagccagaccctatctcaaaaaacaaaacaaaacccatgggccttaactgatggtaccatgaaggaaaaagatgattaggaagggtaaggcccaggtatgaaggacactgaaggacatcctaagccatttagactttatcctgtagtccgtagctaatgacgaatcattggtgtatggctgagaattgattaagaaagacgatctagaaccaaggcctggcaacttcccacatctagaaatacaaaaggagatttgtcacaacttctgagagagagagaaagtaaagaagtagtagtaaaatcagaagacagtggtgatgtcaaggatgcctagatagaaaggtattagtctgttcttgtattgctataaagaaatacctgagactgagtaatttataaagaaaagacatttaattggtttatggttctgcaggctgtataggaagcatagtggcttctggggaggcctcaggaaactttcaatcatggctgaagggatagcaagcatgtgttacatggccggagcagagcaggaggaagagagagaggaggggaggtgccacacctattttttttcttttttttcgagacagagtctcactctgttgcccagaccagagcacagtgatgtgatctcggctcaccacaacctccgcctcccaggttcaagtgatcctcctgcctaagcctcccgagtagctgggattacaggcatgtgccactgcaaaaggccaatttttgtatttttagtagaaatggggtttcaccacgttggccaggccacacacttttaaataagcatatctactgagaactctatcacaagaacggcaggagggggatggtgctaaaccattagaaaccatccccatgatccagtcacctcccaccaggccccacctccagcattggggattacgtttcaacatgagatttgggtggggacacagatccaaaccacataagaaggcatttggggaaagcatcttgaaaattttttgctagtaaaatgaaatctcctttcccaaccatatctatttctcacgcccccccaatcttcatctcttccttcactttagtcactttgttgcgagcaatgacagaacagtgtacatgattcttgcccataaattaacatgaggggtagcatgggaaaggagggaaaaagtgtagcctttggggcaaagaaacaatagggtttctatcctggatgccactcaattgctgtgtggtattagtcaagttatgttcgattttaagtattttttttttaacaacataccaccagttttgttttgggtaattactcaccaccattacataaagtcatactaggacttaagagtttctgctctcctgggttggatttctgtatccctgaaatttgaattttgagcagaataatacaagagcagataacagatcttgcattcatccaagcagcaccctaatcaaactatgagtcagttcttgcaatctagaccccagaagctgacccattccatcttctttctaagcctgatttttcagtttttacaaaattatctgagctatcccacatccttggaatcaattacttttattgtcaaaataagttgttgcttacatccaaaaaactctaaacaatatctatcctacattaggattgttttgaggtttagaaatacaggatactctggcggggtgcagtggctcacgcctgtaatcccagcactttgggaggccaagaagggcggattacctgctgtcaggagttcgagaccagcctgggccacatggagaaaccctgtttcttctaaaaatacagaattagcctggcatggtggtgcatgcctgtaatccagctactcaggaggctaaggcaggagaattgcttgaacctaggaggcggaggttgtggtgagccgagatcacgccattgcactccagcttgggcaacaggagtgaaactccatctaaaaaaaacaaaaaaacccaaaacaaaacaaaacaaaaacaaaaacaaaacaaaaacaaaaaaacaagaaatatagaatacgcccaccctcccaacatggggcctagaatatagcgtcatacaacagactgatagcttctctattgatgtcacgaaggagccctgaattttccccagtcccgtctcctgtgtcccctattacggtgaataactaagccaggatcgttctgcagttcacaagaattttgtcacctttatttattatttcttgcatcctccccaactctagtttgggaaggatggagttaggaaaggctgcgctggacttggtcccaggagaggtaaaccatagcctggcctcttgtttctggagcacatgctggagaaaggtggtctgttctgccagggagcttgctctttacatttcacaaaggacctaggaaaacagccgagagaggaaccactcattagccccaaggattacgcccaacagtcccaagaagggtcaaaatagcccagctaagtaggagaaaaataaatcaaatgctgtagctttatgtcagccacttgaattagttggatttctttccatgctatcatcctttgctcttcctgcaataccctgctaaaccattccatgggctgattgagtacatgcatgtgaagctttatgtggaataaataattacacaagacatttttggaagaataaatgcatttggcctaggaaaaccaattcgcatcttaaagagccagcttctccaaatgccagttctgtcagctaaccttctccagcaacctggcggtttaattcttcacccttgtctccttggccacactacacacgaatggttttcagagtagggaaaaaatgctttccggtgtctgttttaaatttgtttctatctactttatgtgtctaactttgtcctcgtatttgttttacagcaaaaacaaaatagaggaaagatatcaaccatatccccaaaagtttatacaagttactttttgctgttggtaataaaagcaattctgttttatagcatagatcctgtccataaactacaaacatccacttccctcacttccttcaaatctctttcgagggctgatgaagggatagccagtgacattgtgaaggtccctcagggtccttctaatagcaggcatttctatacagtctatctgtgggaccacagaggctgtgaggaatctaatcgcccactcagtctttgaaagagggaaatgaaaacacactttgatcagagaaagccaggatgaggagatgtttcccttagcccagtcctgattccatctgttagctgctgctaccttacaagccctaaaacaagtcatgcctcctcatataacatatataccggaatatgagacaacctcaagtattttcccaattgagactattaaaaagagaaagaaagtgagtttggggccaaattaaaacgataaatattataaattgtataaaataactttttactttccatgtatcaatgtaattccatacctatttggaaattacatcatatcta

SEQ ID NO: 1141 - DNA, 5839 bp, Homo sapiens
ggcagttagggcaactggaaggctgggagctgaaatcacctgaagtctcattcactcacatgtctgatggttgatattgtctatcagattcttttttgtctccttctctgcaagaggctggcaccagatcacctcctgagtagagcagacattccaaaggatgtcctgccaacaataatggaaagctggatacaactgaatatgtaaaatgatgttaatgaagaattgaagagcactgtatctagttttctgctctccccttattttgaatcaaacccaggcatcctatcatttcatctataaagactttagttcctaaaagtggaattgctggatcaaagggtaaaggcataggcaattctagagcatttagatttaatgtgatggacaggaatgaaccatgaagccacgagtgtttgatttttaaattgtgatattccactaaatgagaaatgaccaggacttcacagagatttcatgaaaggagggccacaaaggaagaacccagagcaggccggtgagaggcactctaagagctttccaatatccgtcttcggagcgcacgggaatccgccgagctctgcgtgcaggcccttttttcttttgaggttcacattttttgaaattttacgccagggcttttgtaatttcctcccccgcccgctggcggtcctggagtcgctcggggctttaggccggttatgcaacgtgtaccgctcggggctgccggctgcacctccgccgcgcctcgccgctcactgcgctagacccggcgccccgcgtctcgcttcgcgggcagtcagggggccggcgctctgtcgaggtctccagctagagcagggagcccgagcccgagggagtccccggagccgacgaagggcttattagaccctgactcttttctgaggcgcgcagattttgtctttgatcactccctctccgcgggtctacggccgcgcgctttcggcgccggcgatggggagaagacggaggctgtgtctccagctctacttcctgtggctgggctgtgtggtgctctgggcgcagggcacggccggccagcctcagcctcctccgcccaagccgccccggccccagccgccgccgcaacaggttcggtccgctacagcaggctctgaaggcgggtttctagcgcccgagtatcgcgaggagggtgccgcagtggccagccgcgtccgccggcgaggacagcaggacgtgctccgagggcccaacgtgtgcggctccagattccactcctactgctgccctggatggaagacgctccctggaggaaaccagtgcattgtcccgatttgtagaaatagttgtggagatggattttgttcccgtcctaacatgtgtacttgttccagtgggcaaatatcatcaacctgtggatcaaaatcaattcagcagtgcagtgtgagatgcatgaatggtgggacctgtgcagatgaccactgccagtgccagaaaggatatattggaacttattgtggacaacctgtctgtgaaaatggatgtcagaatggtggacgttgcatcggacccaaccgctgtgcttgtgtttatgggttcactggtccacagtgtgaaagagattacaggacaggcccgtgtttcactcaggtcaacaaccagatgtgccaagggcagctgacaggcattgtctgcacgaagactctgtgctgtgccaccattggacgggcgtggggccatccctgtgagatgtgtccagcccagcctcagccctgccgacggggtttcatccccaacatccgcactggagcttgccaagatgttgatgaatgccaggctatcccagggatatgccaaggaggaaactgtatcaatacagtgggctcttttgaatgcagatgccctgctggtcacaaacagagtgaaactactcagaaatgtgaagacattgatgagtgcagcatcattcctgggatatgtgaaactggtgaatgttccaacaccgtgggaagctatttttgtgtttgtccacgtggatatgtaacctcaacagatggctctcgatgcatcgatcagagaacaggcatgtgtttctcgggcctggtgaatggccgctgtgcacaagagctcccggggagaatgacgaaaatgcagtgctgctgtgagcctggccgctgctggggcatcggaaccattcctgaagcctgtcctgtcagaggttctgaggaatatcgcagactttgcatggatggacttccaatgggaggaattccagggagtgctggttccagacctggaggcactgggggaaatggctttgccccaagtggcaatggcaatggctatggcccaggagggacaggcttcatccccatccctggaggcaatggcttttctcctggcgttgggggagccggtgtgggggccgggggacagggacctatcatcactggactaacaattctgaaccagacaatagatatctgtaagcatcatgctaacctttgtttaaatggacgctgtataccaactgtctcaagctaccgatgtgaatgcaacatgggttataagcaggatgcaaatggagattgtatagatgttgatgaatgcacatcaaatccctgcactaatggagattgtgttaacacacctggttcctattattgtaaatgtcatgctggattccagaggactcctaccaagcaagcatgcattgatattgatgagtgcatccagaatggggttctttgtaaaaacggtcgatgcgtgaacacagatggaagtttccagtgcatttgcaatgccggctttgaattaactacagatggaaaaaactgtgttgatcatgatgaatgtacaactaccaacatgtgtttgaatggaatgtgcatcaatgaagatggcagcttcaagtgcatctgcaaaccaggatttgtcttggctccaaatgggcgttactgtactgatgttgatgaatgccagaccccaggaatctgcatgaatgggcactgcatcaacagtgaagggtccttccgctgtgactgtcccccaggcctggctgtgggcatggatggacgtgtgtgtgttgatactcacatgcgcagtacctgctatggaggaatcaagaaaggagtgtgtgtgcgtcctttccccggtgcagtgaccaagtccgaatgctgctgtgccaatccagactatggttttggagaaccctgccagccatgccctgcaaaaaattcagctgaattccacggcctttgtagtagtggagtaggtatcactgtggatggaagagatatcaatgaatgtgctttggatcctgatatatgtgccaatgggatttgtgaaaacttacgtggtagttaccgttgtaattgcaacagtggctatgaaccagatgcctctggaagaaactgtattgacattgatgaatgtttagtaaacagactgctttgtgataacggattgtgccgaaacacgccaggaagttacagctgtacgtgcccaccagggtatgtgttcaggactgagacagagacctgtgaagatataaatgaatgtgaaagcaacccatgtgtcaatggggcctgcagaaacaaccttggatctttcaattgtgaatgttcgcccggcagcaaactcagctccacaggattgatctgtattgacagcctgaaggggacctgttggctcaacatccaggacagccgctgtgaggtgaatattaatggagccactctgaaatctgaatgctgtgccaccctcggagccgcctgggggagcccctgtgagcggtgtgaactagatacagcttgcccaagagggcttgccaggattaaaggtgttacgtgtgaagatgttaatgagtgtgaggtgttccctggcatttgtccaaatggacgctgtgtcaacagtaagggatcttttcattgcgagtgccctgaaggccttacgttggatgggactggccgtgtatgtttggatattcgcatggagcagtgttacttgaagtgggatgaagatgaatgcatccaccccgttcctggaaagttccgcatggatgcctgctgctgtgctgtcggggcggcttggggcaccgagtgtgaggagtgccccaaacctggcaccaaggaatacgagacgctgtgcccccgcggggctggctttgctaaccgaggggatgttcttactgggcggccattttacaaagacatcaatgaatgcaaagcatttcctgggatgtgcacttatgggaagtgcagaaatacaatcggaagcttcaaatgccgttgcaatagtggctttgctctagacatggaggaaagaaactgcacggacatcgacgagtgcaggatttctcctgacctctgtggcagtggaatctgcgtcaatacaccgggcagctttgagtgcgagtgcttcgaaggctatgaaagtggcttcatgatgatgaagaactgcatggacattgacgaatgtgaacgtaaccctctcctttgtaggggtggcacctgtgtgaacactgagggcagctttcagtgtgactgcccactgggacacgagctgtcaccatcccgtgaggactgtgtggatattaatgaatgctccctgagtgacaatctctgcagaaatggaaaatgtgtgaacatgattggaacctatcagtgctcttgcaatcctggatatcaggctacgccagaccgccagggctgtacagatattgatgaatgtatgataatgaacggaggctgtgacacccagtgcacaaattcagagggaagctacgaatgcagctgcagtgagggttatgccctgatgccagatgggagatcgtgtgcagacattgatgaatgtgaaaacaatcctgatatctgtgatggcggccagtgtaccaacattcctggagagtatcgctgcctctgctatgatggcttcatggcttccatggacatgaaaacatgcattgatgtcaatgaatgtgacctaaattcaaatatctgcatgtttggggaatgtgagaacacaaagggatccttcatttgccactgtcagctgggttactcagtgaagaaggggaccacaggatgtacagatgtggatgagtgtgaaattggtgctcataactgcgacatgcatgcctcatgtctgaatatcccaggaagcttcaagtgtagctgcagagaaggctggattggaaacggcatcaagtgtattgatctggacgaatgttctaatggaacccaccagtgtagcatcaatgctcagtgtgtaaataccccgggctcataccgctgtgcctgctccgaaggtttcactggtgatggctttacctgctcagatgttgatgagtgtgcagaaaacataaacctctgtgagaacggacagtgccttaatgtcccgggtgcatatcgctgcgagtgtgagatgggcttcactccagcctcagacagcagatcctgccaaggtgggtcaccaggattccaactcattttcaagttggatcaaccacagtaaatgaaaccacaacaagggctggaacaagctccacctggaagcagaatacatagcacatgctgcactataaaagtcattcgtttaagcgtggattattttgccgaatgaataatgatgatggcggctttcatctcttatgaagttttcctggccaagagccagtagttggaagtttggatcattcttttttcttttttaaccatttcttctcttctttctcttttttatcactaaatgaatgacatgtggagaaactattcagcttttaaagtatgctccattacttgtctcaactaccactatttattgtgtttatcaaaatcataaaaagctcatttttggc

SEQ ID NO: 1142 - protein, 1506 aa, Homo sapiens [sequence omitted]

SEQ ID NO: 1143 - DNA, 8828 bp, Homo sapiens
ggcagttagggcaactggaaggctgggagctgaaatcacctgaagtctcattcactcacatgtctgatggttgatattgtctatcagattcttttttgtctccttctctgcaagaggctggcaccagatcacctcctgagtagagcagacattccaaaggatgtcctgccaacaataatggaaagctggatacaactgaatatgtaaaatgatgttaatgaagaattgaagagcactgtatctagttttctgctctccccttattttgaatcaaacccaggcatcctatcatttcatctataaagactttagttcctaaaagtggaattgctggatcaaagggtaaaggcataggcaattctagagcatttagatttaatgtgatggacaggaatgaaccatgaagccacgagtgtttgatttttaaattgtgatattccactaaatgagaaatgaccaggacttcacagagatttcatgaaaggagggccacaaaggaagaacccagagcaggccggtgagaggcactctaagagctttccaatatccgtcttcggagcgcacgggaatccgccgagctctgcgtgcaggcccttttttcttttgaggttcacattttttgaaattttacgccagggcttttgtaatttcctcccccgcccgctggcggtcctggagtcgctcggggctttaggccggttatgcaacgtgtaccgctcggggctgccggctgcacctccgccgcgcctcgccgctcactgcgctagacccggcgccccgcgtctcgcttcgcgggcagtcagggggccggcgctctgtcgaggtctccagctagagcagggagcccgagcccgagggagtccccggagccgacgaagggcttattagaccctgactcttttctgaggcgcgcagattttgtctttgatcactccctctccgcgggtctacggccgcgcgctttcggcgccggcgatggggagaagacggaggctgtgtctccagctctacttcctgtggctgggctgtgtggtgctctgggcgcagggcacggccggccagcctcagcctcctccgcccaagccgccccggccccagccgccgccgcaacaggttcggtccgctacagcaggctctgaaggcgggtttctagcgcccgagtatcgcgaggagggtgccgcagtggccagccgcgtccgccggcgaggacagcaggacgtgctccgagggcccaacgtgtgcggctccagattccactcctactgctgccctggatggaagacgctccctggaggaaaccagtgcattgtcccgatttgtagaaatagttgtggagatggattttgttcccgtcctaacatgtgtacttgttccagtgggcaaatatcatcaacctgtggatcaaaatcaattcagcagtgcagtgtgagatgcatgaatggtgggacctgtgcagatgaccactgccagtgccagaaaggatatattggaacttattgtggacaacctgtctgtgaaaatggatgtcagaatggtggacgttgcatcggacccaaccgctgtgcttgtgtttatgggttcactggtccacagtgtgaaagagattacaggacaggcccgtgtttcactcaggtcaacaaccagatgtgccaagggcagctgacaggcattgtctgcacgaagactctgtgctgtgccaccattggacgggcgtggggccatccctgtgagatgtgtccagcccagcctcagccctgccgacggggtttcatccccaacatccgcactggagcttgccaagatgttgatgaatgccaggctatcccagggatatgccaaggaggaaactgtatcaatacagtgggctcttttgaatgcagatgccctgctggtcacaaacagagtgaaactactcagaaatgtgaagacattgatgagtgcagcatcattcctgggatatgtgaaactggtgaatgttccaacaccgtgggaagctatttttgtgtttgtccacgtggatatgtaacctcaacagatggctctcgatgcatcgatcagagaacaggcatgtgtttctcgggcctggtgaatggccgctgtgcacaagagctcccggggagaatgacgaaaatgcagtgctgctgtgagcctggccgctgctggggcatcggaaccattcctgaagcctgtcctgtcagaggttctgaggaatatcgcagactttgcatggatggacttccaatgggaggaattccagggagtgctggttccagacctggaggcactgggggaaatggctttgccccaagtggcaatggcaatggctatggcccaggagggacaggcttcatccccatccctggaggcaatggcttttctcctggcgttgggggagccggtgtgggggccgggggacagggacctatcatcactggactaacaattctgaaccagacaatagatatctgtaagcatcatgctaacctttgtttaaatggacgctgtataccaactgtctcaagctaccgatgtgaatgcaacatgggttataagcaggatgcaaatggagattgtatagatgttgatgaatgcacatcaaatccctgcactaatggagattgtgttaacacacctggttcctattattgtaaatgtcatgctggattccagaggactcctaccaagcaagcatgcattgatattgatgagtgcatccagaatggggttctttgtaaaaacggtcgatgcgtgaacacagatggaagtttccagtgcatttgcaatgccggctttgaattaactacagatggaaaaaactgtgttgatcatgatgaatgtacaactaccaacatgtgtttgaatggaatgtgcatcaatgaagatggcagcttcaagtgcatctgcaaaccaggatttgtcttggctccaaatgggcgttactgtactgatgttgatgaatgccagaccccaggaatctgcatgaatgggcactgcatcaacagtgaagggtccttccgctgtgactgtcccccaggcctggctgtgggcatggatggacgtgtgtgtgttgatactcacatgcgcagtacctgctatggaggaatcaagaaaggagtgtgtgtgcgtcctttccccggtgcagtgaccaagtccgaatgctgctgtgccaatccagactatggttttggagaaccctgccagccatgccctgcaaaaaattcagctgaattccacggcctttgtagtagtggagtaggtatcactgtggatggaagagatatcaatgaatgtgctttggatcctgatatatgtgccaatgggatttgtgaaaacttacgtggtagttaccgttgtaattgcaacagtggctatgaaccagatgcctctggaagaaactgtattgacattgatgaatgtttagtaaacagactgctttgtgataacggattgtgccgaaacacgccaggaagttacagctgtacgtgcccaccagggtatgtgttcaggactgagacagagacctgtgaagatataaatgaatgtgaaagcaacccatgtgtcaatggggcctgcagaaacaaccttggatctttcaattgtgaatgttcgcccggcagcaaactcagctccacaggattgatctgtattgacagcctgaaggggacctgttggctcaacatccaggacagccgctgtgaggtgaatattaatggagccactctgaaatctgaatgctgtgccaccctcggagccgcctgggggagcccctgtgagcggtgtgaactagatacagcttgcccaagagggcttgccaggattaaaggtgttacgtgtgaagatgttaatgagtgtgaggtgttccctggcatttgtccaaatggacgctgtgtcaacagtaagggatcttttcattgcgagtgccctgaaggccttacgttggatgggactggccgtgtatgtttggatattcgcatggagcagtgttacttgaagtgggatgaagatgaatgcatccaccccgttcctggaaagttccgcatggatgcctgctgctgtgctgtcggggcggcttggggcaccgagtgtgaggagtgccccaaacctggcaccaaggaatacgagacgctgtgcccccgcggggctggctttgctaaccgaggggatgttcttactgggcggccattttacaaagacatcaatgaatgcaaagcatttcctgggatgtgcacttatgggaagtgcagaaatacaatcggaagcttcaaatgccgttgcaatagtggctttgctctagacatggaggaaagaaactgcacggacatcgacgagtgcaggatttctcctgacctctgtggcagtggaatctgcgtcaatacaccgggcagctttgagtgcgagtgcttcgaaggctatgaaagtggcttcatgatgatgaagaactgcatggacattgacgaatgtgaacgtaaccctctcctttgtaggggtggcacctgtgtgaacactgagggcagctttcagtgtgactgcccactgggacacgagctgtcaccatcccgtgaggactgtgtggatattaatgaatgctccctgagtgacaatctctgcagaaatggaaaatgtgtgaacatgattggaacctatcagtgctcttgcaatcctggatatcaggctacgccagaccgccagggctgtacagatattgatgaatgtatgataatgaacggaggctgtgacacccagtgcacaaattcagagggaagctacgaatgcagctgcagtgagggttatgccctgatgccagatgggagatcgtgtgcagacattgatgaatgtgaaaacaatcctgatatctgtgatggcggccagtgtaccaacattcctggagagtatcgctgcctctgctatgatggcttcatggcttccatggacatgaaaacatgcattgatgtcaatgaatgtgacctaaattcaaatatctgcatgtttggggaatgtgagaacacaaagggatccttcatttgccactgtcagctgggttactcagtgaagaaggggaccacaggatgtacagatgtggatgagtgtgaaattggtgctcataactgcgacatgcatgcctcatgtctgaatatcccaggaagcttcaagtgtagctgcagagaaggctggattggaaacggcatcaagtgtattgatctggacgaatgttctaatggaacccaccagtgtagcatcaatgctcagtgtgtaaataccccgggctcataccgctgtgcctgctccgaaggtttcactggtgatggctttacctgctcagatgttgatgagtgtgcagaaaacataaacctctgtgagaacggacagtgccttaatgtcccgggtgcatatcgctgcgagtgtgagatgggcttcactccagcctcagacagcagatcctgccaagatattgatgaatgctccttccaaaacatttgtgtctttggaacatgtaataacctgcctggaatgtttcattgcatctgcgatgatggttatgaattggacagaacaggagggaactgtacagatattgatgagtgtgcagatcctataaactgtgtcaatggcctatgtgtcaacacgcctggtcgctatgagtgtaactgcccacccgattttcagttgaacccaactggtgtgggttgtgttgacaaccgtgtgggcaactgctacctgaagtttggacctcgaggagatgggagtctgtcttgcaacaccgagatcggggtgggcgtcagtcgctcttcatgctgctgctctctgggaaaggcctggggaaacccctgtgagacatgcccccctgtcaatagcactgaatattacaccctgtgtcccggaggtgaaggcttcagacctaaccccatcacaatcattttagaagacattgacgaatgccaggagttaccaggtctctgccagggtggaaactgcatcaacacttttgggagcttccagtgtgagtgcccacaaggctactacctcagcgaggatacccgcatctgtgaagatattgatgagtgttttgcacatcctggtgtgtgtgggcctgggacctgctataacaccctgggaaattacacctgcatttgcccacctgagtacatgcaggtcaatggaggccacaactgcatggacatgagaaaaagcttttgctaccgaagctataatggaaccacttgtgagaatgagttgcctttcaatgtgacaaaaaggatgtgctgctgcacatataatgtgggcaaagcctggaacaaaccttgtgaaccatgcccaactccaggaacagctgactttaaaaccatatgtggaaatattcctggattcacctttgacattcacacaggaaaagctgttgacattgatgaatgtaaagagattccaggcatttgtgcaaatggtgtgtgcattaaccagattggcagtttccgctgtgaatgccctacaggattcagttacaatgacctgctgttggtttgtgaagatatagatgagtgcagcaatggtgataatctctgccagcggaatgcagactgcatcaatagtcctggtagttaccgctgtgaatgtgccgcgggtttcaaactttcacccaatggggcctgtgtagatcgcaatgaatgtttagaaattcctaacgtttgcagtcatggcttgtgtgttgatctgcaaggaagttaccagtgcatctgccacaatggctttaaggcttctcaggaccagaccatgtgcatggatgttgatgagtgcgagcggcatccatgtggaaatggaacttgtaaaaacaccgttggatcctataactgtctgtgctacccagggtttgaactcactcataataatgattgcctggacatagatgagtgcagttccttttttggtcaggtgtgcagaaatggacgttgttttaatgaaattggttctttcaagtgtctatgtaacgaaggttatgaacttaccccagatggcaaaaactgtatagacactaatgagtgtgtcgcccttcccggctcttgctctcctggtacctgtcagaatttggagggatccttcagatgcatctgtcccccagggtatgaagtaaaaagcgagaactgcattgatataaatgaatgtgatgaagatcccaacatttgtctttttggttcctgtactaatactccagggggcttccagtgcctctgcccccctggctttgtactatctgataatggacggagatgctttgatactcgccagagcttctgcttcacaaattttgaaaatggaaagtgttctgtacccaaagctttcaacaccacaaaagcaaaatgctgctgtagtaagatgccaggagagggctggggggacccctgtgagctgtgccccaaagacgatgaagttgcatttcaggatttgtgtccatatggccatggaactgtccctagtcttcatgatacacgtgaagatgtcaatgagtgtcttgagagcccaggcatttgttcaaatggtcaatgtatcaacaccgacggatcttttcgctgtgaatgtccaatgggctacaaccttgactacactggagtacgctgtgtggatactgatgagtgttcaatcggcaatccgtgtggaaatggtacatgcaccaatgttattgggagttttgaatgcaattgcaatgaaggctttgagccagggcccatgatgaattgtgaagatatcaacgaatgtgcccagaacccactgctgtgtgctttccgctgcatgaacacttttgggtcctatgaatgcacgtgcccgattggctatgccctcagggaagatcaaaagatgtgcaaagatctggatgaatgtgctgaagggttacacgactgtgaatctaggggcatgatgtgtaagaatctaatcggcaccttcatgtgcatctgccctcctggaatggcccgaaggcccgatggagaaggctgtgtagatgaaaatgaatgcaggaccaagccaggaatctgtgaaaatggacgttgtgttaacattattggaagctatagatgtgagtgtaatgaaggattccagtcaagttcttcaggcactgaatgccttgacaatcgacagggtctctgctttgcagaggtactgcagacaatatgtcaaatggcatccagtagtcgcaatctcgtcactaagtcagaatgctgctgtgatggtgggcgaggctggggccaccagtgcgagctttgcccacttcctggaactgcccagtacaaaaagatatgtcctcatggcccaggatatacaactgatggaagagatattgatgaatgtaaggtaatgccaaacctctgcaccaatggtcagtgcatcaataccatgggctcattccgatgcttctgcaaggttggctacaccacagacatcagtggaacctcttgtatagaccttgatgaatgctcccagtccccgaaaccatgcaactacatctgcaagaacactgaggggagttatcagtgttcatgtccgagggggtatgtcctgcaagaggatggaaagacatgcaaagaccttgatgaatgtcaaacaaagcagcataactgccagttcctctgtgtcaacaccctgggggggtttacctgtaaatgtccacctggtttcacacagcatcacactgcttgtatcgacaacaacgaatgtgggtctcaaccttcgctttgtggagcaaagggaatctgtcaaaacactccaggcagtttcagctgtgaatgccaaagagggttctctcttgatgccaccggactgaactgtgaaggttagttgatttg

SEQ ID NO: 1144 - protein, 2608 aa, Homo sapiens
MGRRRRLCLQLYFLWLGCVVLWAQGTAGQPQPPPPKPPRPQPPPQQVRSATAGSEGGFLAPEYREEGAAVASRVRRRGQQDVLRGPNVCGSRFHSYCCPGWKTLPGGNQCIVPICRNSCGDGFCSRPNMCTCSSGQISSTCGSKSIQQCSVRCMNGGTCADDHCQCQKGYIGTYCGQPVCENGCQNGGRCIGPNRCACVYGFTGPQCERDYRTGPCFTQVNNQMCQGQLTGIVCTKTLCCATIGRAWGHPCEMCPAQPQPCRRGFIPNIRTGACQDVDECQAIPGICQGGNCINTVGSFECRCPAGHKQSETTQKCEDIDECSIIPGICETGECSNTVGSYFCVCPRGYVTSTDGSRCIDQRTGMCFSGLVNGRCAQELPGRMTKMQCCCEPGRCWGIGTIPEACPVRGSEEYRRLCMDGLPMGGIPGSAGSRPGGTGGNGFAPSGNGNGYGPGGTGFIPIPGGNGFSPGVGGAGVGAGGQGPIITGLTILNQTIDICKHHANLCLNGRCIPTVSSYRCECNMGYKQDANGDCIDVDECTSNPCTNGDCVNTPGSYYCKCHAGFQRTPTKQACIDIDECIQNGVLCKNGRCVNTDGSFQCICNAGFELTTDGKNCVDHDECTTTNMCLNGMCINEDGSFKCICKPGFVLAPNGRYCTDVDECQTPGICMNGHCINSEGSFRCDCPPGLAVGMDGRVCVDTHMRSTCYGGIKKGVCVRPFPGAVTKSECCCANPDYGFGEPCQPCPAKNSAEFHGLCSSGVGITVDGRDINECALDPDICANGICENLRGSYRCNCNSGYEPDASGRNCIDIDECLVNRLLCDNGLCRNTPGSYSCTCPPGYVFRTETETCEDINECESNPCVNGACRNNLGSFNCECSPGSKLSSTGLICIDSLKGTCWLNIQDSRCEVNINGATLKSECCATLGAAWGSPCERCELDTACPRGLARIKGVTCEDVNECEVFPGICPNGRCVNSKGSFHCECPEGLTLDGTGRVCLDIRMEQCYLKWDEDECIHPVPGKFRMDACCCAVGAAWGTECEECPKPGTKEYETLCPRGAGFANRGDVLTGRPFYKDINECKAFPGMCTYGKCRNTIGSFKCRCNSGFALDMEERNCTDIDECRISPDLCGSGICVNTPGSFECECFEGYESGFMMMKNCMDIDECERNPLLCRGGTCVNTEGSFQCDCPLGHELSPSREDCVDINECSLSDNLCRNGKCVNMIGTYQCSCNPGYQATPDRQGCTDIDECMIMNGGCDTQCTNSEGSYECSCSEGYALMPDGRSCADIDECENNPDICDGGQCTNIPGEYRCLCYDGFMASMDMKTCIDVNECDLNSNICMFGECENTKGSFICHCQLGYSVKKGTTGCTDVDECEIGAHNCDMHASCLNIPGSFKCSCREGWIGNGIKCIDLDECSNGTHQCSINAQCVNTPGSYRCACSEGFTGDGFTCSDVDECAENINLCENGQCLNVPGAYRCECEMGFTPASDSRSCQDIDECSFQNICVFGTCNNLPGMFHCICDDGYELDRTGGNCTDIDECADPINCVNGLCVNTPGRYECNCPPDFQLNPTGVGCVDNRVGNCYLKFGPRGDGSLSCNTEIGVGVSRSSCCCSLGKAWGNPCETCPPVNSTEYYTLCPGGEGFRPNPITIIDIDECQELPGLCQGGNCINTFGSFQCECPQGYYLSEDTRICEDIDECFAHPGVCGPGTCYNTLGNYTCICPPEYMQVNGGHNCMDMRKSFCYRSYNGTTCENELPFNVTKRMCCCTYNVGKAWNKPCEPCPTPGTADFKTICGNIPGFTFDIHTGKAVDIDECKEIPGICANGVCINQIGSFRCECPTGFSYNDLLLVCEDIDECSNGDNLCQRNADCINSPGSYRCECAAGFKLSPNGACVDRNECLEIPNVCSHGLCVDLQGSYQCICHNGFKASQDQTMCMDVDECERHPCGNGTCKNTVGSYNCLCYPGFELTHNNDCLDIDECSSFFGQVCRNGRCFNEIGSFKCLCNEGYELTPDGKNCIDTNECVPGSCSPGTCQNLEGSFRCICPPGYEVKSENCIDINECDEDPNICLFGSCTNTPGGFQCLCPPGFVLSDNGRRCFDTRQSFCFTNFENGKCSVPKAFNTTKAKCCCSKMPGEGWGDPCELCPKDDEVAFQDLCPYGHGTVPSLHDTREDVNECLESPGICSNGQCINTDGSFRCECPMGYNLDYTGVRCVDTDECSIGNPCGNGTCTNVIGSFECNCNEGFEPGPMMNCEDINECAQNPLLCAFRCMNTFGSYECTCPIGYALREDQKMCKDLDECAEGLHDCESRGMMCKNLIGTFMCICPPGMARRPDGEGCVDENECRTKPGICENGRCVNIIGSYRCECNEGFQSSSSGTECLDNRQGLCFAEVLQTICQMASSSRNLVTKSECCCDGGRGWGHQCELCPLPGTAQYKKICPHGPGYTTDGRDIDECKVMPNLCTNGQCINTMGSFRCFCKVGYTTDISGTSCIDLDECSQSPKPCNYICKNTEGSYQCSCPRGYVLQEDGKTCKDLDECQTKQHNCQFLCVNTLGGFTCKCPPGFTQHHTACIDNNECGSQPSLCGAKGICQNTPGSFSCECQRGFSLDATQCEG

SEQ ID NO: 1145 - DNA, 11260 bp, Homo sapiens
ggcagttagggcaactggaaggctgggagctgaaatcacctgaagtctcattcactcacatgtctgatggttgatattgtctatcagattcttttttgtctccttctctgcaagaggctggcaccagatcacctcctgagtagagcagacattccaaaggatgtcctgccaacaataatggaaagctggatacaactgaatatgtaaaatgatgttaatgaagaattgaagagcactgtatctagttttctgctctccccttattttgaatcaaacccaggcatcctatcatttcatctataaagactttagttcctaaaagtggaattgctggatcaaagggtaaaggcataggcaattctagagcatttagatttaatgtgatggacaggaatgaaccatgaagccacgagtgtttgatttttaaattgtgatattccactaaatgagaaatgaccaggacttcacagagatttcatgaaaggagggccacaaaggaagaacccagagcaggccggtgagaggcactctaagagctttccaatatccgtcttcggagcgcacgggaatccgccgagctctgcgtgcaggcccttttttcttttgaggttcacattttttgaaattttacgccagggcttttgtaatttcctcccccgcccgctggcggtcctggagtcgctcggggctttaggccggttatgcaacgtgtaccgctcggggctgccggctgcacctccgccgcgcctcgccgctcactgcgctagacccggcgccccgcgtctcgcttcgcgggcagtcagggggccggcgctctgtcgaggtctccagctagagcagggagcccgagcccgagggagtccccggagccgacgaagggcttattagaccctgactcttttctgaggcgcgcagattttgtctttgatcactccctctccgcgggtctacggccgcgcgctttcggcgccggcgatggggagaagacggaggctgtgtctccagctctacttcctgtggctgggctgtgtggtgctctgggcgcagggcacggccggccagcctcagcctcctccgcccaagccgccccggccccagccgccgccgcaacaggttcggtccgctacagcaggctctgaaggcgggtttctagcgcccgagtatcgcgaggagggtgccgcagtggccagccgcgtccgccggcgaggacagcaggacgtgctccgagggcccaacgtgtgcggctccagattccactcctactgctgccctggatggaagacgctccctggaggaaaccagtgcattgtcccgatttgtagaaatagttgtggagatggattttgttcccgtcctaacatgtgtacttgttccagtgggcaaatatcatcaacctgtggatcaaaatcaattcagcagtgcagtgtgagatgcatgaatggtgggacctgtgcagatgaccactgccagtgccagaaaggatatattggaacttattgtggacaacctgtctgtgaaaatggatgtcagaatggtggacgttgcatcggacccaaccgctgtgcttgtgtttatgggttcactggtccacagtgtgaaagagattacaggacaggcccgtgtttcactcaggtcaacaaccagatgtgccaagggcagctgacaggcattgtctgcacgaagactctgtgctgtgccaccattggacgggcgtggggccatccctgtgagatgtgtccagcccagcctcagccctgccgacggggtttcatccccaacatccgcactggagcttgccaagatgttgatgaatgccaggctatcccagggatatgccaaggaggaaactgtatcaatacagtgggctcttttgaatgcagatgccctgctggtcacaaacagagtgaaactactcagaaatgtgaagacattgatgagtgcagcatcattcctgggatatgtgaaactggtgaatgttccaacaccgtgggaagctatttttgtgtttgtccacgtggatatgtaacctcaacagatggctctcgatgcatcgatcagagaacaggcatgtgtttctcgggcctggtgaatggccgctgtgcacaagagctcccggggagaatgacgaaaatgcagtgctgctgtgagcctggccgctgctggggcatcggaaccattcctgaagcctgtcctgtcagaggttctgaggaatatcgcagactttgcatggatggacttccaatgggaggaattccagggagtgctggttccagacctggaggcactgggggaaatggctttgccccaagtggcaatggcaatggctatggcccaggagggacaggcttcatccccatccctggaggcaatggcttttctcctggcgttgggggagccggtgtgggggccgggggacagggacctatcatcactggactaacaattctgaaccagacaatagatatctgtaagcatcatgctaacctttgtttaaatggacgctgtataccaactgtctcaagctaccgatgtgaatgcaacatgggttataagcaggatgcaaatggagattgtatagatgttgatgaatgcacatcaaatccctgcactaatggagattgtgttaacacacctggttcctattattgtaaatgtcatgctggattccagaggactcctaccaagcaagcatgcattgatattgatgagtgcatccagaatggggttctttgtaaaaacggtcgatgcgtgaacacagatggaagtttccagtgcatttgcaatgccggctttgaattaactacagatggaaaaaactgtgttgatcatgatgaatgtacaactaccaacatgtgtttgaatggaatgtgcatcaatgaagatggcagcttcaagtgcatctgcaaaccaggatttgtcttggctccaaatgggcgttactgtactgatgttgatgaatgccagaccccaggaatctgcatgaatgggcactgcatcaacagtgaagggtccttccgctgtgactgtcccccaggcctggctgtgggcatggatggacgtgtgtgtgttgatactcacatgcgcagtacctgctatggaggaatcaagaaaggagtgtgtgtgcgtcctttccccggtgcagtgaccaagtccgaatgctgctgtgccaatccagactatggttttggagaaccctgccagccatgccctgcaaaaaattcagctgaattccacggcctttgtagtagtggagtaggtatcactgtggatggaagagatatcaatgaatgtgctttggatcctgatatatgtgccaatgggatttgtgaaaacttacgtggtagttaccgttgtaattgcaacagtggctatgaaccagatgcctctggaagaaactgtattgacattgatgaatgtttagtaaacagactgctttgtgataacggattgtgccgaaacacgccaggaagttacagctgtacgtgcccaccagggtatgtgttcaggactgagacagagacctgtgaagatataaatgaatgtgaaagcaacccatgtgtcaatggggcctgcagaaacaaccttggatctttcaattgtgaatgttcgcccggcagcaaactcagctccacaggattgatctgtattgacagcctgaaggggacctgttggctcaacatccaggacagccgctgtgaggtgaatattaatggagccactctgaaatctgaatgctgtgccaccctcggagccgcctgggggagcccctgtgagcggtgtgaactagatacagcttgcccaagagggcttgccaggattaaaggtgttacgtgtgaagatgttaatgagtgtgaggtgttccctggcatttgtccaaatggacgctgtgtcaacagtaagggatcttttcattgcgagtgccctgaaggccttacgttggatgggactggccgtgtatgtttggatattcgcatggagcagtgttacttgaagtgggatgaagatgaatgcatccaccccgttcctggaaagttccgcatggatgcctgctgctgtgctgtcggggcggcttggggcaccgagtgtgaggagtgccccaaacctggcaccaaggaatacgagacgctgtgcccccgcggggctggctttgctaaccgaggggatgttcttactgggcggccattttacaaagacatcaatgaatgcaaagcatttcctgggatgtgcacttatgggaagtgcagaaatacaatcggaagcttcaaatgccgttgcaatagtggctttgctctagacatggaggaaagaaactgcacggacatcgacgagtgcaggatttctcctgacctctgtggcagtggaatctgcgtcaatacaccgggcagctttgagtgcgagtgcttcgaaggctatgaaagtggcttcatgatgatgaagaactgcatggacattgacgaatgtgaacgtaaccctctcctttgtaggggtggcacctgtgtgaacactgagggcagctttcagtgtgactgcccactgggacacgagctgtcaccatcccgtgaggactgtgtggatattaatgaatgctccctgagtgacaatctctgcagaaatggaaaatgtgtgaacatgattggaacctatcagtgctcttgcaatcctggatatcaggctacgccagaccgccagggctgtacagatattgatgaatgtatgataatgaacggaggctgtgacacccagtgcacaaattcagagggaagctacgaatgcagctgcagtgagggttatgccctgatgccagatgggagatcgtgtgcagacattgatgaatgtgaaaacaatcctgatatctgtgatggcggccagtgtaccaacattcctggagagtatcgctgcctctgctatgatggcttcatggcttccatggacatgaaaacatgcattgatgtcaatgaatgtgacctaaattcaaatatctgcatgtttggggaatgtgagaacacaaagggatccttcatttgccactgtcagctgggttactcagtgaagaaggggaccacaggatgtacagatgtggatgagtgtgaaattggtgctcataactgcgacatgcatgcctcatgtctgaatatcccaggaagcttcaagtgtagctgcagagaaggctggattggaaacggcatcaagtgtattgatctggacgaatgttctaatggaacccaccagtgtagcatcaatgctcagtgtgtaaataccccgggctcataccgctgtgcctgctccgaaggtttcactggtgatggctttacctgctcagatgttgatgagtgtgcagaaaacataaacctctgtgagaacggacagtgccttaatgtcccgggtgcatatcgctgcgagtgtgagatgggcttcactccagcctcagacagcagatcctgccaagatattgatgaatgctccttccaaaacatttgtgtctttggaacatgtaataacctgcctggaatgtttcattgcatctgcgatgatggttatgaattggacagaacaggagggaactgtacagatattgatgagtgtgcagatcctataaactgtgtcaatggcctatgtgtcaacacgcctggtcgctatgagtgtaactgcccacccgattttcagttgaacccaactggtgtgggttgtgttgacaaccgtgtgggcaactgctacctgaagtttggacctcgaggagatgggagtctgtcttgcaacaccgagatcggggtgggcgtcagtcgctcttcatgctgctgctctctgggaaaggcctggggaaacccctgtgagacatgcccccctgtcaatagcactgaatattacaccctgtgtcccggaggtgaaggcttcagacctaaccccatcacaatcattttagaagacattgacgaatgccaggagttaccaggtctctgccagggtggaaactgcatcaacacttttgggagcttccagtgtgagtgcccacaaggctactacctcagcgaggatacccgcatctgtgaagatattgatgagtgttttgcacatcctggtgtgtgtgggcctgggacctgctataacaccctgggaaattacacctgcatttgcccacctgagtacatgcaggtcaatggaggccacaactgcatggacatgagaaaaagcttttgctaccgaagctataatggaaccacttgtgagaatgagttgcctttcaatgtgacaaaaaggatgtgctgctgcacatataatgtgggcaaagcctggaacaaaccttgtgaaccatgcccaactccaggaacagctgactttaaaaccatatgtggaaatattcctggattcacctttgacattcacacaggaaaagctgttgacattgatgaatgtaaagagattccaggcatttgtgcaaatggtgtgtgcattaaccagattggcagtttccgctgtgaatgccctacaggattcagttacaatgacctgctgttggtttgtgaagatatagatgagtgcagcaatggtgataatctctgccagcggaatgcagactgcatcaatagtcctggtagttaccgctgtgaatgtgccgcgggtttcaaactttcacccaatggggcctgtgtagatcgcaatgaatgtttagaaattcctaacgtttgcagtcatggcttgtgtgttgatctgcaaggaagttaccagtgcatctgccacaatggctttaaggcttctcaggaccagaccatgtgcatggatgttgatgagtgcgagcggcatccatgtggaaatggaacttgtaaaaacaccgttggatcctataactgtctgtgctacccagggtttgaactcactcataataatgattgcctggacatagatgagtgcagttccttttttggtcaggtgtgcagaaatggacgttgttttaatgaaattggttctttcaagtgtctatgtaacgaaggttatgaacttaccccagatggcaaaaactgtatagacactaatgagtgtgtcgcccttcccggctcttgctctcctggtacctgtcagaatttggagggatccttcagatgcatctgtcccccagggtatgaagtaaaaagcgagaactgcattgatataaatgaatgtgatgaagatcccaacatttgtctttttggttcctgtactaatactccagggggcttccagtgcctctgcccccctggctttgtactatctgataatggacggagatgctttgatactcgccagagcttctgcttcacaaattttgaaaatggaaagtgttctgtacccaaagctttcaacaccacaaaagcaaaatgctgctgtagtaagatgccaggagagggctggggggacccctgtgagctgtgccccaaagacgatgaagttgcatttcaggatttgtgtccatatggccatggaactgtccctagtcttcatgatacacgtgaagatgtcaatgagtgtcttgagagcccaggcatttgttcaaatggtcaatgtatcaacaccgacggatcttttcgctgtgaatgtccaatgggctacaaccttgactacactggagtacgctgtgtggatactgatgagtgttcaatcggcaatccgtgtggaaatggtacatgcaccaatgttattgggagttttgaatgcaattgcaatgaaggctttgagccagggcccatgatgaattgtgaagatatcaacgaatgtgcccagaacccactgctgtgtgctttccgctgcatgaacacttttgggtcctatgaatgcacgtgcccgattggctatgccctcagggaagatcaaaagatgtgcaaagatctggatgaatgtgctgaagggttacacgactgtgaatctaggggcatgatgtgtaagaatctaatcggcaccttcatgtgcatctgccctcctggaatggcccgaaggcccgatggagaaggctgtgtagatgaaaatgaatgcaggaccaagccaggaatctgtgaaaatggacgttgtgttaacattattggaagctatagatgtgagtgtaatgaaggattccagtcaagttcttcaggcactgaatgccttgacaatcgacagggtctctgctttgcagaggtactgcagacaatatgtcaaatggcatccagtagtcgcaatctcgtcactaagtcagaatgctgctgtgatggtgggcgaggctggggccaccagtgcgagctttgcccacttcctggaactgcccagtacaaaaagatatgtcctcatggcccaggatatacaactgatggaagagatattgatgaatgtaaggtaatgccaaacctctgcaccaatggtcagtgcatcaataccatgggctcattccgatgcttctgcaaggttggctacaccacagacatcagtggaacctcttgtatagaccttgatgaatgctcccagtccccgaaaccatgcaactacatctgcaagaacactgaggggagttatcagtgttcatgtccgagggggtatgtcctgcaagaggatggaaagacatgcaaagaccttgatgaatgtcaaacaaagcagcataactgccagttcctctgtgtcaacaccctgggggggtttacctgtaaatgtccacctggtttcacacagcatcacactgcttgtatcgacaacaacgaatgtgggtctcaaccttcgctttgtggagcaaagggaatctgtcaaaacactccaggcagtttcagctgtgaatgccaaagagggttctctcttgatgccaccggactgaactgtgaagatgttgatgaatgtgatgggaaccacaggtgccaacacggctgccagaacatcctgggtggctacagatgtggctgcccccaaggctacatccagcactaccagtggaatcagtgtgtcgatgagaatgaatgctccaatcccaatgcctgtggctctgcttcctgctacaacaccctggggagttacaagtgcgcctgcccctcggggttctccttcgaccagttctccagtgcctgccacgacgtgaatgagtgctcgtcctccaagaacccctgcaattacggctgctctaacacggaggggggctacctctgtggctgcccccctgggtattacagagtgggacaaggccactgtgtctcaggaatgggatttaacaaggggcagtacctgtcactggatacagaggtcgatgaggaaaatgctctgtccccagaagcatgctacgagtgcaaaatcaacggctattctaagaaagacagcaggcagaagagaagtattcatgaacctgatcccactgctgttgaacagatcagcctagagagtgtcgacatggacagccccgtcaacatgaagttcaacctctcccacctcggctctaaggagcacatcctggaactaaggcccgccatccagcccctcaacaaccacatccgttatgtcatctctcaagggaacgatgacagcgtcttccgcatccaccaaaggaatgggctcagctacttgcacacggccaagaagaagctcatgcccggcacatacacactggaaatcactagcatccctctctacaagaagaaggagcttaagaaactggaagagagcaatgaggatgactacctcctaggggagcttggggaggctctcagaatgaggctgcagattcagctctattaacccttcacagacttgggcccaggctcaaatcctagcacagccagtctgcagaagcatttgaaaagtcaaggactaattttaaagaggaaaaataataataactcttgtttctttcctccctgtcttagactttgaatgttgaccctcacagggagggataatttagactctggtatggccaaagatttgagcacaaaggcaaccgtggttactgtattttttatataacttcattttaaaatatattaaaagaaacctaaatgttcaagatatcagcatatggcactaaatgcacaaaaataatgtgagctttttttttttttcctgttagcagtctgtaacactttgggtattttgctatagttgctaattaaaaaaatatagatgtttatttatttttaatgcagtaatatatggagaaatgaacaaactatgtaaacaaaaagggaaactcacttgtttttctttagatttataaatttgagctattttttttagaggtgctttttaaaaatccaatagatacaagagatgtttcctttggttttctgccagtcatccagctgatacacacctgatgattttaaagaaagccacacagagctgaatgggcagtgtaatcaataatttaaaagacatgaatgtcattagatcctttataacgtagatcgaagccaaagcagctcatttgtgacaacatttcatatcaccagacacaccaggcaacagaagttgaagcacaaccactgtagcaaaataccttgactgcttgtgagaccattagcattgcaggccaaaccgtactgtatttccttctcataacctcaaggaaccatatgtgctacccacaacacctcattcttacccagggtgcgctgcgtcctcatggtactgtaggcagctgaagaaccgccgttcccttgaaagggaacacctggcattctgtggtgtttcgtgctgtcttaaataatggtgcatttattatgttcaagttatttcaggattgccatatgtgcaaacaaatcatgcaatgcagccaaggaatatatgttgttgttgttgttttaaacccattttttttttagaattttcattaatactgtagttatacaccatatgcctcattttatcatagcctattgtgtatgaaagatgtttgtacaatgaattgatgtttagtttgctttagtcatttaaaaagatattgtaccaggatgtgctattaagagcacgtatccattattcttctcaacccaagaacctgtttcctggaccagtgaccaaacctcatatgtgaaatggccaaagcacatgcaggctcctggttgttcctctcaaacctgtgctgaccaaagattagtaaccagttatacccagtattttgaggttttattgtttttttaataactaaaaagaaaaaaggaacagtgtaaatttgtaatcaagagtttgtgaggaaaaacttatggtttttggttttgtttgtttttgtaggtctgtgtatcaaatatgacacttttcttgcaataaagcttattttggggta

SEQ ID NO: 1146 - protein, 2904 aa, Homo sapiens
MGRRRRLCLQLYFLWLGCVVLWAQGTAGQPQPPPPKPPRPQPPPQQVRSATAGSEGGFLAPEYREEGAAVASRVRRRGQQDVLRGPNVCGSRFHSYCCPGWKTLPGGNQCIVPICRNSCGDGFCSRPNMCTCSSGQISSTCGSKSIQQCSVRCMNGGTCADDHCQCQKGYIGTYCGQPVCENGCQNGGRCIGPNRCACVYGFTGPQCERDYRTGPCFTQVNNQMCQGQLTGIVCTKTLCCATIGRAWGHPCEMCPAQPQPCRRGFIPNIRTGACQDVDECQAIPGICQGGNCINTVGSFECRCPAGHKQSETTQKCEDIDECSIIPGICETGECSNTVGSYFCVCPRGYVTSTDGSRCIDQRTGMCFSGLVNGRCAQELPGRMTKMQCCCEPGRCWGIGTIPEACPVRGSEEYRRLCMDGLPMGGIPGSAGSRPGGTGGNGFAPSGNGNGYGPGGTGFIPIPGGNGFSPGVGGAGVGAGGQGPIITGLTILNQTIDICKHHANLCLNGRCIPTVSSYRCECNMGYKQDANGDCIDVDECTSNPCTNGDCVNTPGSYYCKCHAGFQRTPTKQACIDIDECIQNGVLCKNGRCVNTDGSFQCICNAGFELTTDGKNCVDHDECTTTNMCLNGMCINEDGSFKCICKPGFVLAPNGRYCTDVDECQTPGICMNGHCINSEGSFRCDCPPGLAVGMDGRVCVDTHMRSTCYGGIKKGVCVRPFPGAVTKSECCCANPDYGFGEPCQPCPAKNSAEFHGLCSSGVGITVDGRDINECALDPDICANGICENLRGSYRCNCNSGYEPDASGRNCIDIDECLVNRLLCDNGLCRNTPGSYSCTCPPGYVFRTETETCEDINECESNPCVNGACRNNLGSFNCECSPGSKLSSTGLICIDSLKGTCWLNIQDSRCEVNINGATLKSECCATLGAAWGSPCERCELDTACPRGLARIKGVTCEDVNECEVFPGICPNGRCVNSKGSFHCECPEGLTLDGTGRVCLDIRMEQCYLKWDEDECIHPVPGKFRMDACCCAVGAAWGTECEECPKPGTKEYETLCPRGAGFANRGDVLTGRPFYKDINECKAFPGMCTYGKCRNTIGSFKCRCNSGFALDMEERNCTDIDECRISPDLCGSGICVNTPGSFECECFEGYESGFMMMKNCMDIDECERNPLLCRGGTCVNTEGSFQCDCPLGHELSPSREDCVDINECSLSDNLCRNGKCVNMIGTYQCSCNPGYQATPDRQGCTDIDECMIMNGGCDTQCTNSEGSYECSCSEGYALMPDGRSCADIDECENNPDICDGGQCTNIPGEYRCLCYDGFMASMDMKTCIDVNECDLNSNICMFGECENTKGSFICHCQLGYSVKKGTTGCTDVDECEIGAHNCDMHASCLNIPGSFKCSCREGWIGNGIKCIDLDECSNGTHQCSINAQCVNTPGSYRCACSEGFTGDGFTCSDVDECAENINLCENGQCLNVPGAYRCECEMGFTPASDSRSCQDIDECSFQNICVFGTCNNLPGMFHCICDDGYELDRTGGNCTDIDECADPINCVNGLCVNTPGRYECNCPPDFQLNPTGVGCVDNRVGNCYLKFGPRGDGSLSCNTEIGVGVSRSSCCCSLGKAWGNPCETCPPVNSTEYYTLCPGGEGFRPNPITIIDIDECQELPGLCQGGNCINTFGSFQCECPQGYYLSEDTRICEDIDECFAHPGVCGPGTCYNTLGNYTCICPPEYMQVNGGHNCMDMRKSFCYRSYNGTTCENELPFNVTKRMCCCTYNVGKAWNKPCEPCPTPGTADFKTICGNIPGFTFDIHTGKAVDIDECKEIPGICANGVCINQIGSFRCECPTGFSYNDLLLVCEDIDECSNGDNLCQRNADCINSPGSYRCECAAGFKLSPNGACVDRNECLEIPNVCSHGLCVDLQGSYQCICHNGFKASQDQTMCMDVDECERHPCGNGTCKNTVGSYNCLCYPGFELTHNNDCLDIDECSSFFGQVCRNGRCFNEIGSFKCLCNEGYELTPDGKNCIDTNECVPGSCSPGTCQNLEGSFRCICPPGYEVKSENCIDINECDEDPNICLFGSCTNTPGGFQCLCPPGFVLSDNGRRCFDTRQSFCFTNFENGKCSVPKAFNTTKAKCCCSKMPGEGWGDPCELCPKDDEVAFQDLCPYGHGTVPSLHDTREDVNECLESPGICSNGQCINTDGSFRCECPMGYNLDYTGVRCVDTDECSIGNPCGNGTCTNVIGSFECNCNEGFEPGPMMNCEDINECAQNPLLCAFRCMNTFGSYECTCPIGYALREDQKMCKDLDECAEGLHDCESRGMMCKNLIGTFMCICPPGMARRPDGEGCVDENECRTKPGICENGRCVNIIGSYRCECNEGFQSSSSGTECLDNRQGLCFAEVLQTICQMASSSRNLVTKSECCCDGGRGWGHQCELCPLPGTAQYKKICPHGPGYTTDGRDIDECKVMPNLCTNGQCINTMGSFRCFCKVGYTTDISGTSCIDLDECSQSPKPCNYICKNTEGSYQCSCPRGYVLQEDGKTCKDLDECQTKQHNCQFLCVNTLGGFTCKCPPGFTQHHTACIDNNECGSQPSLCGAKGICQNTPGSFSCECQRGFSLDATQCEDVDECDGNHRCQHGCQNILGGYRCGCPQGYIQHYQWNQCVDENECSNPNACGSASCYNTLGSYKCACPSGFSFDQFSSACHDVNECSSSKNPCNYGCSNTEGGYLCGCPPGYYRVGQGHCVSGMGFNKGQYLSLDTEVDEENALSPEACYECKINGYSKKDSRQKRSIHEPDPTAVEQISLESVDMDSPVNMKFNLSHLGSKEHILRPAIQPLNNHIRYVISQGNDDSVFRIHQRNGLSYLHTAKKKLMPGTYTLEITSIPLYKKKELKKLEESNEDDYLLGELGEALRMRLQIQLY

SEQ ID NO: 1147 - DNA, 10724 bp, Homo sapiens
ctttccaatatccgtcttcggagcgcacgggaatccgccgagctctgcgtgcaggcccttttttcttttgaggttcacattttttgaaattttacgccagggcttttgtaatttcctcccccgcccgctggcggtcctggagtcgctcggggctttaggccggttatgcaacgtgtaccgctcggggctgccggctgcacctccgccgcgcctcgccgctcactgcgctagacccggcgccccgcgtctcgcttcgcgggcagtcagggggccggcgctctgtcgaggtctccagctagagcagggagcccgagcccgagggagtccccggagccgacgaagggcttattagaccctgactcttttctgaggcgcgcagattttgtctttgatcactccctctccgcgggtctacggccgcgcgctttcggcgccggcgatggggagaagacggaggctgtgtctccagctctacttcctgtggctgggctgtgtggtgctctgggcgcagggcacggccggccagcctcagcctcctccgcccaagccgccccggccccagccgccgccgcaacaggttcggtccgctacagcaggctctgaaggcgggtttctagcgcccgagtatcgcgaggagggtgccgcagtggccagccgcgtccgccggcgaggacagcaggacgtgctccgagggcccaacgtgtgcggctccagattccactcctactgctgccctggatggaagacgctccctggaggaaaccagtgcattgtcccgatttgtagaaatagttgtggagatggattttgttcccgtcctaacatgtgtacttgttccagtgggcaaatatcatcaacctgtggatcaaaatcaattcagcagtgcagtgtgagatgcatgaatggtgggacctgtgcagatgaccactgccagtgccagaaaggatatattggaacttattgtggacaacctgtctgtgaaaatggatgtcagaatggtggacgttgcatcggacccaaccgctgtgcttgtgtttatgggttcactggtccacagtgtgaaagagattacaggacaggcccgtgtttcactcaggtcaacaaccagatgtgccaagggcagctgacaggcattgtctgcacgaagactctgtgctgtgccaccattggacgggcgtggggccatccctgtgagatgtgtccagcccagcctcagccctgccgacggggtttcatccccaacatccgcactggagcttgccaagatgttgatgaatgccaggctatcccagggatatgccaaggaggaaactgtatcaatacagtgggctcttttgaatgcagatgccctgctggtcacaaacagagtgaaactactcagaaatgtgaagacattgatgagtgcagcatcattcctgggatatgtgaaactggtgaatgttccaacaccgtgggaagctatttttgtgtttgtccacgtggatatgtaacctcaacagatggctctcgatgcatcgatcagagaacaggcatgtgtttctcgggcctggtgaatggccgctgtgcacaagagctcccggggagaatgacgaaaatgcagtgctgctgtgagcctggccgctgctggggcatcggaaccattcctgaagcctgtcctgtcagaggttctgaggaatatcgcagactttgcatggatggacttccaatgggaggaattccagggagtgctggttccagacctggaggcactgggggaaatggctttgccccaagtggcaatggcaatggctatggcccaggagggacaggcttcatccccatccctggaggcaatggcttttctcctggcgttgggggagccggtgtgggggccgggggacagggacctatcatcactggactaacaattctgaaccagacaatagatatctgtaagcatcatgctaacctttgtttaaatggacgctgtataccaactgtctcaagctaccgatgtgaatgcaacatgggttataagcaggatgcaaatggagattgtatagatgttgatgaatgcacatcaaatccctgcactaatggagattgtgttaacacacctggttcctattattgtaaatgtcatgctggattccagaggactcctaccaagcaagcatgcattgatattgatgagtgcatccagaatggggttctttgtaaaaacggtcgatgcgtgaacacagatggaagtttccagtgcatttgcaatgccggctttgaattaactacagatggaaaaaactgtgttgatcatgatgaatgtacaactaccaacatgtgtttgaatggaatgtgcatcaatgaagatggcagcttcaagtgcatctgcaaaccaggatttgtcttggctccaaatgggcgttactgtactgatgttgatgaatgccagaccccaggaatctgcatgaatgggcactgcatcaacagtgaagggtccttccgctgtgactgtcccccaggcctggctgtgggcatggatggacgtgtgtgtgttgatactcacatgcgcagtacctgctatggaggaatcaagaaaggagtgtgtgtgcgtcctttccccggtgcagtgaccaagtccgaatgctgctgtgccaatccagactatggttttggagaaccctgccagccatgccctgcaaaaaattcagctgaattccacggcctttgtagtagtggagtaggtatcactgtggatggaagagatatcaatgaatgtgctttggatcctgatatatgtgccaatgggatttgtgaaaacttacgtggtagttaccgttgtaattgcaacagtggctatgaaccagatgcctctggaagaaactgtattgacattgatgaatgtttagtaaacagactgctttgtgataacggattgtgccgaaacacgccaggaagttacagctgtacgtgcccaccagggtatgtgttcaggactgagacagagacctgtgaagatataaatgaatgtgaaagcaacccatgtgtcaatggggcctgcagaaacaaccttggatctttcaattgtgaatgttcgcccggcagcaaactcagctccacaggattgatctgtattgacagcctgaaggggacctgttggctcaacatccaggacagccgctgtgaggtgaatattaatggagccactctgaaatctgaatgctgtgccaccctcggagccgcctgggggagcccctgtgagcggtgtgaactagatacagcttgcccaagagggcttgccaggattaaaggtgttacgtgtgaagatgttaatgagtgtgaggtgttccctggcatttgtccaaatggacgctgtgtcaacagtaagggatcttttcattgcgagtgccctgaaggccttacgttggatgggactggccgtgtatgtttggatattcgcatggagcagtgttacttgaagtgggatgaagatgaatgcatccaccccgttcctggaaagttccgcatggatgcctgctgctgtgctgtcggggcggcttggggcaccgagtgtgaggagtgccccaaacctggcaccaaggaatacgagacgctgtgcccccgcggggctggctttgctaaccgaggggatgttcttactgggcggccattttacaaagacatcaatgaatgcaaagcatttcctgggatgtgcacttatgggaagtgcagaaatacaatcggaagcttcaaatgccgttgcaatagtggctttgctctagacatggaggaaagaaactgcacggacatcgacgagtgcaggatttctcctgacctctgtggcagtggaatctgcgtcaatacaccgggcagctttgagtgcgagtgcttcgaaggctatgaaagtggcttcatgatgatgaagaactgcatggacattgacgaatgtgaacgtaaccctctcctttgtaggggtggcacctgtgtgaacactgagggcagctttcagtgtgactgcccactgggacacgagctgtcaccatcccgtgaggactgtgtggatattaatgaatgctccctgagtgacaatctctgcagaaatggaaaatgtgtgaacatgattggaacctatcagtgctcttgcaatcctggatatcaggctacgccagaccgccagggctgtacagatattgatgaatgtatgataatgaacggaggctgtgacacccagtgcacaaattcagagggaagctacgaatgcagctgcagtgagggttatgccctgatgccagatgggagatcgtgtgcagacattgatgaatgtgaaaacaatcctgatatctgtgatggcggccagtgtaccaacattcctggagagtatcgctgcctctgctatgatggcttcatggcttccatggacatgaaaacatgcattgatgtcaatgaatgtgacctaaattcaaatatctgcatgtttggggaatgtgagaacacaaagggatccttcatttgccactgtcagctgggttactcagtgaagaaggggaccacaggatgtacagatgtggatgagtgtgaaattggtgctcataactgcgacatgcatgcctcatgtctgaatatcccaggaagcttcaagtgtagctgcagagaaggctggattggaaacggcatcaagtgtattgatctggacgaatgttctaatggaacccaccagtgtagcatcaatgctcagtgtgtaaataccccgggctcataccgctgtgcctgctccgaaggtttcactggtgatggctttacctgctcagatgttgatgagtgtgcagaaaacataaacctctgtgagaacggacagtgccttaatgtcccgggtgcatatcgctgcgagtgtgagatgggcttcactccagcctcagacagcagatcctgccaagatattgatgaatgctccttccaaaacatttgtgtctttggaacatgtaataacctgcctggaatgtttcattgcatctgcgatgatggttatgaattggacagaacaggagggaactgtacagatattgatgagtgtgcagatcctataaactgtgtcaatggcctatgtgtcaacacgcctggtcgctatgagtgtaactgcccacccgattttcagttgaacccaactggtgtgggttgtgttgacaaccgtgtgggcaactgctacctgaagtttggacctcgaggagatgggagtctgtcttgcaacaccgagatcggggtgggcgtcagtcgctcttcatgctgctgctctctgggaaaggcctggggaaacccctgtgagacatgcccccctgtcaatagcactgaatattacaccctgtgtcccggaggtgaaggcttcagacctaaccccatcacaatcattttagaagacattgacgaatgccaggagttaccaggtctctgccagggtggaaactgcatcaacacttttgggagcttccagtgtgagtgcccacaaggctactacctcagcgaggatacccgcatctgtgaagatattgatgagtgttttgcacatcctggtgtgtgtgggcctgggacctgctataacaccctgggaaattacacctgcatttgcccacctgagtacatgcaggtcaatggaggccacaactgcatggacatgagaaaaagcttttgctaccgaagctataatggaaccacttgtgagaatgagttgcctttcaatgtgacaaaaaggatgtgctgctgcacatataatgtgggcaaagcctggaacaaaccttgtgaaccatgcccaactccaggaacagctgactttaaaaccatatgtggaaatattcctggattcacctttgacattcacacaggaaaagctgttgacattgatgaatgtaaagagattccaggcatttgtgcaaatggtgtgtgcattaaccagattggcagtttccgctgtgaatgccctacaggattcagttacaatgacctgctgttggtttgtgaagatatagatgagtgcagcaatggtgataatctctgccagcggaatgcagactgcatcaatagtcctggtagttaccgctgtgaatgtgccgcgggtttcaaactttcacccaatggggcctgtgtagatcgcaatgaatgtttagaaattcctaacgtttgcagtcatggcttgtgtgttgatctgcaaggaagttaccagtgcatctgccacaatggctttaaggcttctcaggaccagaccatgtgcatggatgttgatgagtgcgagcggcatccatgtggaaatggaacttgtaaaaacaccgttggatcctataactgtctgtgctacccagggtttgaactcactcataataatgattgcctggacatagatgagtgcagttccttttttggtcaggtgtgcagaaatggacgttgttttaatgaaattggttctttcaagtgtctatgtaacgaaggttatgaacttaccccagatggcaaaaactgtatagacactaatgagtgtgtcgcccttcccggctcttgctctcctggtacctgtcagaatttggagggatccttcagatgcatctgtcccccagggtatgaagtaaaaagcgagaactgcattgatataaatgaatgtgatgaagatcccaacatttgtctttttggttcctgtactaatactccagggggcttccagtgcctctgcccccctggctttgtactatctgataatggacggagatgctttgatactcgccagagcttctgcttcacaaattttgaaaatggaaagtgttctgtacccaaagctttcaacaccacaaaagcaaaatgctgctgtagtaagatgccaggagagggctggggggacccctgtgagctgtgccccaaagacgatgaagttgcatttcaggatttgtgtccatatggccatggaactgtccctagtcttcatgatacacgtgaagatgtcaatgagtgtcttgagagcccaggcatttgttcaaatggtcaatgtatcaacaccgacggatcttttcgctgtgaatgtccaatgggctacaaccttgactacactggagtacgctgtgtggatactgatgagtgttcaatcggcaatccgtgtggaaatggtacatgcaccaatgttattgggagttttgaatgcaattgcaatgaaggctttgagccagggcccatgatgaattgtgaagatatcaacgaatgtgcccagaacccactgctgtgtgctttccgctgcatgaacacttttgggtcctatgaatgcacgtgcccgattggctatgccctcagggaagatcaaaagatgtgcaaagatctggatgaatgtgctgaagggttacacgactgtgaatctaggggcatgatgtgtaagaatctaatcggcaccttcatgtgcatctgccctcctggaatggcccgaaggcccgatggagaaggctgtgtagatgaaaatgaatgcaggaccaagccaggaatctgtgaaaatggacgttgtgttaacattattggaagctatagatgtgagtgtaatgaaggattccagtcaagttcttcaggcactgaatgccttgacaatcgacagggtctctgctttgcagaggtactgcagacaatatgtcaaatggcatccagtagtcgcaatctcgtcactaagtcagaatgctgctgtgatggtgggcgaggctggggccaccagtgcgagctttgcccacttcctggaactgcccagtacaaaaagatatgtcctcatggcccaggatatacaactgatggaagagatattgatgaatgtaaggtaatgccaaacctctgcaccaatggtcagtgcatcaataccatgggctcattccgatgcttctgcaaggttggctacaccacagacatcagtggaacctcttgtatagaccttgatgaatgctcccagtccccgaaaccatgcaactacatctgcaagaacactgaggggagttatcagtgttcatgtccgagggggtatgtcctgcaagaggatggaaagacatgcaaagaccttgatgaatgtcaaacaaagcagcataactgccagttcctctgtgtcaacaccctgggggggtttacctgtaaatgtccacctggtttcacacagcatcacactgcttgtatcgacaacaacgaatgtgggtctcaaccttcgctttgtggagcaaagggaatctgtcaaaacactccaggcagtttcagctgtgaatgccaaagagggttctctcttgatgccaccggactgaactgtgaagatgttgatgaatgtgatgggaaccacaggtgccaacacggctgccagaacatcctgggtggctacagatgtggctgcccccaaggctacatccagcactaccagtggaatcagtgtgtcgatgagaatgaatgctccaatcccaatgcctgtggctctgcttcctgctacaacaccctggggagttacaagtgcgcctgcccctcggggttctccttcgaccagttctccagtgcctgccacgacgtgaatgagtgctcgtcctccaagaacccctgcaattacggctgctctaacacggaggggggctacctctgtggctgcccccctgggtattacagagtgggacaaggccactgtgtctcaggaatgggatttaacaaggggcagtacctgtcactggatacagaggtcgatgaggaaaatgctctgtccccagaagcatgctacgagtgcaaaatcaacggctattctaagaaagacagcaggcagaagagaagtattcatgaacctgatcccactgctgttgaacagatcagcctagagagtgtcgacatggacagccccgtcaacatgaagttcaacctctcccacctcggctctaaggagcacatcctggaactaaggcccgccatccagcccctcaacaaccacatccgttatgtcatctctcaagggaacgatgacagcgtcttccgcatccaccaaaggaatgggctcagctacttgcacacggccaagaagaagctcatgcccggcacatacacactggaaatcactagcatccctctctacaagaagaaggagcttaagaaactggaagagagcaatgaggatgactacctcctaggggagcttggggaggctctcagaatgaggctgcagattcagctctattaacccttcacagacttgggcccaggctcaaatcctagcacagccagtctgcagaagcatttgaaaagtcaaggactaattttaaagaggaaaaataataataactcttgtttctttcctccctgtcttagactttgaatgttgaccctcacagggagggataatttagactctggtatggccaaagatttgagcacaaaggcaaccgtggttactgtattttttatataacttcattttaaaatatattaaaagaaacctaaatgttcaagatatcagcatatggcactaaatgcacaaaaataatgtgagctttttttttttttcctgttagcagtctgtaacactttgggtattttgctatagttgctaattaaaaaaatatagatgtttatttatttttaatgcagtaatatatggagaaatgaacaaactatgtaaacaaaaagggaaactcacttgtttttctttagatttataaatttgagctattttttttagaggtgctttttaaaaatccaatagatacaagagatgtttcctttggttttctgccagtcatccagctgatacacacctgatgattttaaagaaagccacacagagctgaatgggcagtgtaatcaataatttaaaagacatgaatgtcattagatcctttataacgtagatcgaagccaaagcagctcatttgtgacaacatttcatatcaccagacacaccaggcaacagaagttgaagcacaaccactgtagcaaaataccttgactgcttgtgagaccattagcattgcaggccaaaccgtactgtatttccttctcataacctcaaggaaccatatgtgctacccacaacacctcattcttacccagggtgcgctgcgtcctcatggtactgtaggcagctgaagaaccgccgttcccttgaaagggaacacctggcattctgtggtgtttcgtgctgtcttaaataatggtgcatttattatgttcaagttatttcaggattgccatatgtgcaaacaaatcatgcaatgcagccaaggaatatatgttgttgttgttgttttaaacccattttttttttagaattttcattaatactgtagttatacaccatatgcctcattttatcatagcctattgtgtatgaaagatgtttgtacaatgaattgatgtttagtttgctttagtcatttaaaaagatattgtaccaggatgtgctattaagagcacgtatccattattcttctcaacccaagaacctgtttcctggaccagtgaccaaacctcatatgtgaaatggccaaagcacatgcaggctcctggttgttcctctcaaacctgtgctgaccaaagattagtaaccagttatacccagtattttgaggttttattgtttttttaataactaaaaagaaaaaaggaacagtgtaaatttgtaatcaagagtttgtgaggaaaaacttatggtttttggttttgtttgtttttgtaggtctgtgtatcaaatatgacacttttcttgcaataaagcttattttggggta

SEQ ID NO: 1148 - protein, 2904 aa, Homo sapiens; identical to SEQ ID NO: 1146

SEQ ID NO: 1149 - DNA, 11200 bp, Homo sapiens
ggcagttagggcaactggaaggctgggagctgaaatcacctgaagtctcattcactcacatgtctgatggttgatattgtctatcagattcttttttgtctccttctctgcaagaggctggcaccagatcacctcctgagtagagcagacattccaaaggatgtcctgccaacaataatggaaagctggatacaactgaatatgtaaaatgatgttaatgaagaattgaagagcactgtatctagttttctgctctccccttattttgaatcaaacccaggcatcctatcatttcatctataaagactttagttcctaaaagtggaattgctggatcaaagggtaaaggcataggcaattctagagcatttagatttaatgtgatggacaggaatgaaccatgaagccacgagtgtttgatttttaaattgtgatattccactaaatgagaaatgaccaggacttcacagagatttcatgaaaggagggccacaaaggaagaacccagagcaggccggtgagaggcactctaagagctttccaatatccgtcttcggagcgcacgggaatccgccgagctctgcgtgcaggcccttttttcttttgaggttcacattttttgaaattttacgccagggcttttgtaatttcctcccccgcccgctggcggtcctggagtcgctcggggctttaggccggttatgcaacgtgtaccgctcggggctgccggctgcacctccgccgcgcctcgccgctcactgcgctagacccggcgccccgcgtctcgcttcgcgggcagtcagggggccggcgctctgtcgaggtctccagctagagcagggagcccgagcccgagggagtccccggagccgacgaagggcttattagaccctgactcttttctgaggcgcgcagattttgtctttgatcactccctctccgcgggtctacggccgcgcgctttcggcgccggcgatggggagaagacggaggctgtgtctccagctctacttcctgtggctgggctgtgtggtgctctgggcgcagggcacggccggccagcctcagcctcctccgcccaagccgccccggccccagccgccgccgcaacaggttcggtccgctacagcaggctctgaaggcgggtttctagcgcccgagtatcgcgaggagggtgccgcagtggccagccgcgtccgccggcgaggacagcaggacgtgctccgagggcccaacgtgtgcggctccagattccactcctactgctgccctggatggaagacgctccctggaggaaaccagtgcattgtcccgatttgtagaaatagttgtggagatggattttgttcccgtcctaacatgtgtacttgttccagtgggcaaatatcatcaacctgtggatcaaaatcaattcagcagtgcagtgtgagatgcatgaatggtgggacctgtgcagatgaccactgccagtgccagaaaggatatattggaacttattgtggacaacctgtctgtgaaaatggatgtcagaatggtggacgttgcatcggacccaaccgctgtgcttgtgtttatgggttcactggtccacagtgtgaaagagattacaggacaggcccgtgtttcactcaggtcaacaaccagatgtgccaagggcagctgacaggcattgtctgcacgaagactctgtgctgtgccaccattggacgggcgtggggccatccctgtgagatgtgtccagcccagcctcagccctgccgacggggtttcatccccaacatccgcactggagcttgccaagatgttgatgaatgccaggctatcccagggatatgccaaggaggaaactgtatcaatacagtgggctcttttgaatgcagatgccctgctggtcacaaacagagtgaaactactcagaaatgtgaagacattgatgagtgcagcatcattcctgggatatgtgaaactggtgaatgttccaacaccgtgggaagctatttttgtgtttgtccacgtggatatgtaacctcaacagatggctctcgatgcatcgatcagagaacaggcatgtgtttctcgggcctggtgaatggccgctgtgcacaagagctcccggggagaatgacgaaaatgcagtgctgctgtgagcctggccgctgctggggcatcggaaccattcctgaagcctgtcctgtcagaggttctgaggaatatcgcagactttgcatggatggacttccaatgggaggaattccagggagtgctggttccagacctggaggcactgggggaaatggctttgccccaagtggcaatggcaatggctatggcccaggagggacaggcttcatccccatccctggaggcaatggcttttctcctggcgttgggggagccggtgtgggggccgggggacagggacctatcatcactggactaacaattctgaaccagacaatagatatctgtaagcatcatgctaacctttgtttaaatggacgctgtataccaactgtctcaagctaccgatgtgaatgcaacatgggttataagcaggatgcaaatggagattgtatagatgttgatgaatgcacatcaaatccctgcactaatggagattgtgttaacacacctggttcctattattgtaaatgtcatgctggattccagaggactcctaccaagcaagcatgcattgatattgatgagtgcatccagaatggggttctttgtaaaaacggtcgatgcgtgaacacagatggaagtttccagtgcatttgcaatgccggctttgaattaactacagatggaaaaaactgtgttgatcatgatgaatgtacaactaccaacatgtgtttgaatggaatgtgcatcaatgaagatggcagcttcaagtgcatctgcaaaccaggatttgtcttggctccaaatgggcgttactgtactgatgttgatgaatgccagaccccaggaatctgcatgaatgggcactgcatcaacagtgaagggtccttccgctgtgactgtcccccaggcctggctgtgggcatggatggacgtgtgtgtgttgatactcacatgcgcagtacctgctatggaggaatcaagaaaggagtgtgtgtgcgtcctttccccggtgcagtgaccaagtccgaatgctgctgtgccaatccagactatggttttggagaaccctgccagccatgccctgcaaaaaattcagctgaattccacggcctttgtagtagtggagtaggtatcactgtggatggaagagatatcaatgaatgtgctttggatcctgatatatgtgccaatgggatttgtgaaaacttacgtggtagttaccgttgtaattgcaacagtggctatgaaccagatgcctctggaagaaactgtattgacattgatgaatgtttagtaaacagactgctttgtgataacggattgtgccgaaacacgccaggaagttacagctgtacgtgcccaccagggtatgtgttcaggactgagacagagacctgtgaagatataaatgaatgtgaaagcaacccatgtgtcaatggggcctgcagaaacaaccttggatctttcaattgtgaatgttcgcccggcagcaaactcagctccacaggattgatctgtattgacagcctgaaggggacctgttggctcaacatccaggacagccgctgtgaggtgaatattaatggagccactctgaaatctgaatgctgtgccaccctcggagccgcctgggggagcccctgtgagcggtgtgaactagatacagcttgcccaagagggcttgccaggattaaaggtgttacgtgtgaagatgttaatgagtgtgaggtgttccctggcatttgtccaaatggacgctgtgtcaacagtaagggatcttttcattgcgagtgccctgaaggccttacgttggatgggactggccgtgtatgtttggatattcgcatggagcagtgttacttgaagtgggatgaagatgaatgcatccaccccgttcctggaaagttccgcatggatgcctgctgctgtgctgtcggggcggcttggggcaccgagtgtgaggagtgccccaaacctggcaccaaggaatacgagacgctgtgcccccgcggggctggctttgctaaccgaggggatgttcttactgggcggccattttacaaagacatcaatgaatgcaaagcatttcctgggatgtgcacttatgggaagtgcagaaatacaatcggaagcttcaaatgccgttgcaatagtggctttgctctagacatggaggaaagaaactgcacggacatcgacgagtgcaggatttctcctgacctctgtggcagtggaatctgcgtcaatacaccgggcagctttgagtgcgagtgcttcgaaggctatgaaagtggcttcatgatgatgaagaactgcatggacattgacgaatgtgaacgtaaccctctcctttgtaggggtggcacctgtgtgaacactgagggcagctttcagtgtgactgcccactgggacacgagctgtcaccatcccgtgaggactgtgtggatattaatgaatgctccctgagtgacaatctctgcagaaatggaaaatgtgtgaacatgattggaacctatcagtgctcttgcaatcctggatatcaggctacgccagaccgccagggctgtacagatattgatgaatgtatgataatgaacggaggctgtgacacccagtgcacaaattcagagggaagctacgaatgcagctgcagtgagggttatgccctgatgccagatgggagatcgtgtgcagacattgatgaatgtgaaaacaatcctgatatctgtgatggcggccagtgtaccaacattcctggagagtatcgctgcctctgctatgatggcttcatggcttccatggacatgaaaacatgcattgatgtcaatgaatgtgacctaaattcaaatatctgcatgtttggggaatgtgagaacacaaagggatccttcatttgccactgtcagctgggttactcagtgaagaaggggaccacaggatgtacagatgtggatgagtgtgaaattggtgctcataactgcgacatgcatgcctcatgtctgaatatcccaggaagcttcaagtgtagctgcagagaaggctggattggaaacggcatcaagtgtattgatctggacgaatgttctaatggaacccaccagtgtagcatcaatgctcagtgtgtaaataccccgggctcataccgctgtgcctgctccgaaggtttcactggtgatggctttacctgctcagatgttgatgagtgtgcagaaaacataaacctctgtgagaacggacagtgccttaatgtcccgggtgcatatcgctgcgagtgtgagatgggcttcactccagcctcagacagcagatcctgccaagatattgatgaatgctccttccaaaacatttgtgtctttggaacatgtaataacctgcctggaatgtttcattgcatctgcgatgatggttatgaattggacagaacaggagggaactgtacagatattgatgagtgtgcagatcctataaactgtgtcaatggcctatgtgtcaacacgcctggtcgctatgagtgtaactgcccacccgattttcagttgaacccaactggtgtgggttgtgttgacaaccgtgtgggcaactgctacctgaagtttggacctcgaggagatgggagtctgtcttgcaacaccgagatcggggtgggcgtcagtcgctcttcatgctgctgctctctgggaaaggcctggggaaacccctgtgagacatgcccccctgtcaatagcactgaatattacaccctgtgtcccggaggtgaaggcttcagacctaaccccatcacaatcattttagaagacattgacgaatgccaggagttaccaggtctctgccagggtggaaactgcatcaacacttttgggagcttccagtgtgagtgcccacaaggctactacctcagcgaggatacccgcatctgtgaagatattgatgagtgttttgcacatcctggtgtgtgtgggcctgggacctgctataacaccctgggaaattacacctgcatttgcccacctgagtacatgcaggtcaatggaggccacaactgcatggacatgagaaaaagcttttgctaccgaagctataatggaaccacttgtgagaatgagttgcctttcaatgtgacaaaaaggatgtgctgctgcacatataatgtgggcaaagcctggaacaaaccttgtgaaccatgcccaactccaggaacagctgactttaaaaccatatgtggaaatattcctggattcacctttgacattcacacaggaaaagctgttgacattgatgaatgtaaagagattccaggcatttgtgcaaatggtgtgtgcattaaccagattggcagtttccgctgtgaatgccctacaggattcagttacaatgacctgctgttggtttgtgaagatatagatgagtgcagcaatggtgataatctctgccagcggaatgcagactgcatcaatagtcctggtagttaccgctgtgaatgtgccgcgggtttcaaactttcacccaatggggcctgtgtagatcgcaatgaatgtttagaaattcctaacgtttgcagtcatggcttgtgtgttgatctgcaaggaagttaccagtgcatctgccacaatggctttaaggcttctcaggaccagaccatgtgcatggatgttgatgagtgcgagcggcatccatgtggaaatggaacttgtaaaaacaccgttggatcctataactgtctgtgctacccagggtttgaactcactcataataatgattgcctggacatagatgagtgcagttccttttttggtcaggtgtgcagaaatggacgttgttttaatgaaattggttctttcaagtgtctatgtaacgaaggttatgaacttaccccagatggcaaaaactgtatagacactaatgagtgtgtcgcccttcccggctcttgctctcctggtacctgtcagaatttggagggatccttcagatgcatctgtcccccagggtatgaagtaaaaagcgagaactgcattgatataaatgaatgtgatgaagatcccaacatttgtctttttggttcctgtactaatactccagggggcttccagtgcctctgcccccctggctttgtactatctgataatggacggagatgctttgatactcgccagagcttctgcttcacaaattttgaaaatggaaagtgttctgtacccaaagctttcaacaccacaaaagcaaaatgctgctgtagtaagatgccaggagagggctggggggacccctgtgagctgtgccccaaagacgatgaagttgcatttcaggatttgtgtccatatggccatggaactgtccctagtcttcatgatacacgtgaagatgtcaatgagtgtcttgagagcccaggcatttgttcaaatggtcaatgtatcaacaccgacggatcttttcgctgtgaatgtccaatgggctacaaccttgactacactggagtacgctgtgtggatactgatgagtgttcaatcggcaatccgtgtggaaatggtacatgcaccaatgttattgggagttttgaatgcaattgcaatgaaggctttgagccagggcccatgatgaattatatcaacgaatgtgcccagaacccactgctgtgtgctttccgctgcatgaacacttttgggtcctatgaatgcacgtgcccgattggctatgccctcagggaagatcaaaagatgtgcaaagatctggatgaatgtgctgaagggttacacgactgtgaatctaggggcatgatgtgtaagaatctaatcggcaccttcatgtgcatctgccctcctggaatggcccgaaggcccgatggagaaggctgtgtagatgaaaatgaatgcaggaccaagccaggaatctgtgaaaatggacgttgtgttaacattattggaagctatagatgtgagtgtaatgaaggattccagtcaagttcttcaggcactgaatgccttgacaatcgacagggtctctgctttgcagaggtactgcagacaatatgtcaaatggcatccagtagtcgcaatctcgtcactaagtcagaatgctgctgtgatggtgggcgaggctggggccaccagtgcgagctttgcccacttcctggaactgcccagtacaaaaagatatgtcctcatggcccaggatatacaactgatggaagagatattgatgaatgtaaggtaatgccaaacctctgcaccaatggtcagtgcatcaataccatgggctcattccgatgcttctgcaaggttggctacaccacagacatcagtggaacctcttgtatagaccttgatgaatgctcccagtccccgaaaccatgcaactacatctgcaagaacactgaggggagttatcagtgttcatgtccgagggggtatgtcctgcaagaggatggaaagacatgcaaagaccttgatgaatgtcaaacaaagcagcataactgccagttcctctgtgtcaacaccctgggggggtttacctgtaaatgtccacctggtttcacacagcatcacactgcttgtatcgacaacaacgaatgtgggtctcaaccttcgctttgtggagcaaagggaatctgtcaaaacactccaggcagtttcagctgtgaatgccaaagagggttctctcttgatgccaccggactgaactgtgaagatgttgatgaatgtgatgggaaccacaggtgccaacacggctgccagaacatcctgggtggctacagatgtggctgcccccaaggctacatccagcactaccagtggaatcagtgtgtcgatgagaatgaatgctccaatcccaatgcctgtggctctgcttcctgctacaacaccctggggagttacaagtgcgcctgcccctcggggttctccttcgaccagttctccagtgcctgccacgacgtgaatgagtgctcgtcctccaagaacccctgcaattacggctgctctaacacggaggggggctacctctgtggctgcccccctgggtattacagagtgggacaaggccactgtgtctcaggaatgggatttaacaaggggcagtacctgtcactggatacagaggtcgatgaggaaaatgctctgtccccagaagcatgctacgagtgcaaaatcaacggctattctaagaaagacagcaggcagaagagaagtattcatgaacctgatcccactgctgttgaacagatcagcctagagagtgtcgacatggacagccccgtcaacatgaagttcaacctctcccacctcggctctaaggagcacatcctggaactaaggcccgccatccagcccctcaacaaccacatccgttatgtcatctctcaagggaacgatgacagcgtcttccgcatccaccaaaggaatgggctcagctacttgcacacggccaagaagaagctcatgcccggcacatacacactggaaatcactagcatccctctctacaagaagaaggagcttaagaaactggaagagagcaatgaggatgactacctcctaggggagcttggggaggctctcagaatgaggctgcagattcagctctattaacccttcacagacttgggcccaggctcaaatcctagcacagccagtctgcagaagcatttgaaaagtcaaggactaattttaaagaggaaaaataataataactcttgtttctttcctccctgtcttagactttgaatgttgaccctcacagggagggataatttagactctggtatggccaaagatttgagcacaaaggcaaccgtggttactgtattttttatataacttcattttaaaatatattaaaagaaacctaaatgttcaagatatcagcatatggcactaaatgcacaaaaataatgtgagctttttttttttttcctgttagcagtctgtaacactttgggtattaatatatggagaaatgaacaaactatgtaaacaaaaagggaaactcacttgtttttctttagatttataaatttgagctattttttttagaggtgctttttaaaaatccaatagatacaagagatgtttcctttggttttctgccagtcatccagctgatacacacctgatgattttaaagaaagccacacagagctgaatgggcagtgtaatcaataatttaaaagacatgaatgtcattagatcctttataacgtagatcgaagccaaagcagctcatttgtgacaacatttcatatcaccagacacaccaggcaacagaagttgaagcacaaccactgtagcaaaataccttgactgcttgtgagaccattagcattgcaggccaaaccgtactgtatttccttctcataacctcaaggaaccatatgtgctacccacaacacctcattcttacccagggtgcgctgcgtcctcatggtactgtaggcagctgaagaaccgccgttcccttgaaagggaacacctggcattctgtggtgtttcgtgctgtcttaaataatggtgcatttattatgttcaagttatttcaggattgccatatgtgcaaacaaatcatgcaatgcagccaaggaatatatgttgttgttgttgttttaaacccattttttttttagaattttcattaatactgtagttatacaccatatgcctcattttatcatagcctattgtgtatgaaagatgtttgtacaatgaattgatgtttagtttgctttagtcatttaaaaagatattgtaccaggatgtgctattaagagcacgtatccattattcttctcaacccaagaacctgtttcctggaccagtgaccaaacctcatatgtgaaatggccaaagcacatgcaggctcctggttgttcctctcaaacctgtgctgaccaaagattagtaaccagttatacccagtattttgaggttttattgtttttttaataactaaaaagaaaaaaggaacagtgtaaatttgtaatcaagagtttgtgaggaaaaacttatggtttttggttttgtttgtttttgtaggtctgtgtatcaaatatgacacttttcttgcaataaagcttattttggggta

SEQ ID NO: 1150 - protein, 2902 aa, Homo sapiens
MGRRRRLCLQLYFLWLGCVVLWAQGTAGQPQPPPPKPPRPQPPPQQVRSATAGSEGGFLAPEYREEGAAVASRVRRRGQQDVLRGPNVCGSRFHSYCCPGWKTLPGGNQCIVPICRNSCGDGFCSRPNMCTCSSGQISSTCGSKSIQQCSVRCMNGGTCADDHCQCQKGYIGTYCGQPVCENGCQNGGRCIGPNRCACVYGFTGPQCERDYRTGPCFTQVNNQMCQGQLTGIVCTKTLCCATIGRAWGHPCEMCPAQPQPCRRGFIPNIRTGACQDVDECQAIPGICQGGNCINTVGSFECRCPAGHKQSETTQKCEDIDECSIIPGICETGECSNTVGSYFCVCPRGYVTSTDGSRCIDQRTGMCFSGLVNGRCAQELPGRMTKMQCCCEPGRCWGIGTIPEACPVRGSEEYRRLCMDGLPMGGIPGSAGSRPGGTGGNGFAPSGNGNGYGPGGTGFIPIPGGNGFSPGVGGAGVGAGGQGPIITGLTILNQTIDICKHHANLCLNGRCIPTVSSYRCECNMGYKQDANGDCIDVDECTSNPCTNGDCVNTPGSYYCKCHAGFQRTPTKQACIDIDECIQNGVLCKNGRCVNTDGSFQCICNAGFELTTDGKNCVDHDECTTTNMCLNGMCINEDGSFKCICKPGFVLAPNGRYCTDVDECQTPGICMNGHCINSEGSFRCDCPPGLAVGMDGRVCVDTHMRSTCYGGIKKGVCVRPFPGAVTKSECCCANPDYGFGEPCQPCPAKNSAEFHGLCSSGVGITVDGRDINECALDPDICANGICENLRGSYRCNCNSGYEPDASGRNCIDIDECLVNRLLCDNGLCRNTPGSYSCTCPPGYVFRTETETCEDINECESNPCVNGACRNNLGSFNCECSPGSKLSSTGLICIDSLKGTCWLNIQDSRCEVNINGATLKSECCATLGAAWGSPCERCELDTACPRGLARIKGVTCEDVNECEVFPGICPNGRCVNSKGSFHCECPEGLTLDGTGRVCLDIRMEQCYLKWDEDECIHPVPGKFRMDACCCAVGAAWGTECEECPKPGTKEYETLCPRGAGFANRGDVLTGRPFYKDINECKAFPGMCTYGKCRNTIGSFKCRCNSGFALDMEERNCTDIDECRISPDLCGSGICVNTPGSFECECFEGYESGFMMMKNCMDIDECERNPLLCRGGTCVNTEGSFQCDCPLGHELSPSREDCVDINECSLSDNLCRNGKCVNMIGTYQCSCNPGYQATPDRQGCTDIDECMIMNGGCDTQCTNSEGSYECSCSEGYALMPDGRSCADIDECENNPDICDGGQCTNIPGEYRCLCYDGFMASMDMKTCIDVNECDLNSNICMFGECENTKGSFICHCQLGYSVKKGTTGCTDVDECEIGAHNCDMHASCLNIPGSFKCSCREGWIGNGIKCIDLDECSNGTHQCSINAQCVNTPGSYRCACSEGFTGDGFTCSDVDECAENINLCENGQCLNVPGAYRCECEMGFTPASDSRSCQDIDECSFQNICVFGTCNNLPGMFHCICDDGYELDRTGGNCTDIDECADPINCVNGLCVNTPGRYECNCPPDFQLNPTGVGCVDNRVGNCYLKFGPRGDGSLSCNTEIGVGVSRSSCCCSLGKAWGNPCETCPPVNSTEYYTLCPGGEGFRPNPITIIDIDECQELPGLCQGGNCINTFGSFQCECPQGYYLSEDTRICEDIDECFAHPGVCGPGTCYNTLGNYTCICPPEYMQVNGGHNCMDMRKSFCYRSYNGTTCENELPFNVTKRMCCCTYNVGKAWNKPCEPCPTPGTADFKTICGNIPGFTFDIHTGKAVDIDECKEIPGICANGVCINQIGSFRCECPTGFSYNDLLLVCEDIDECSNGDNLCQRNADCINSPGSYRCECAAGFKLSPNGACVDRNECLEIPNVCSHGLCVDLQGSYQCICHNGFKASQDQTMCMDVDECERHPCGNGTCKNTVGSYNCLCYPGFELTHNNDCLDIDECSSFFGQVCRNGRCFNEIGSFKCLCNEGYELTPDGKNCIDTNECVPGSCSPGTCQNLEGSFRCICPPGYEVKSENCIDINECDEDPNICLFGSCTNTPGGFQCLCPPGFVLSDNGRRCFDTRQSFCFTNFENGKCSVPKAFNTTKAKCCCSKMPGEGWGDPCELCPKDDEVAFQDLCPYGHGTVPSLHDTREDVNECLESPGICSNGQCINTDGSFRCECPMGYNLDYTGVRCVDTDECSIGNPCGNGTCTNVIGSFECNCNEGFEPGPMMNYINECAQNPLLCAFRCMNTFGSYECTCPIGYALREDQKMCKDLDECAEGLHDCESRGMMCKNLIGTFMCICPPGMARRPDGEGCVDENECRTKPGICENGRCVNIIGSYRCECNEGFQSSSSGTECLDNRQGLCFAEVLQTICQMASSSRNLVTKSECCCDGGRGWGHQCELCPLPGTAQYKKICPHGPGYTTDGRDIDECKVMPNLCTNGQCINTMGSFRCFCKVGYTTDISGTSCIDLDECSQSPKPCNYICKNTEGSYQCSCPRGYVLQEDGKTCKDLDECQTKQHNCQFLCVNTLGGFTCKCPPGFTQHHTACIDNNECGSQPSLCGAKGICQNTPGSFSCECQRGFSLDATQCEDVDECDGNHRCQHGCQNILGGYRCGCPQGYIQHYQWNQCVDENECSNPNACGSASCYNTLGSYKCACPSGFSFDQFSSACHDVNECSSSKNPCNYGCSNTEGGYLCGCPPGYYRVGQGHCVSGMGFNKGQYLSLDTEVDEENALSPEACYECKINGYSKKDSRQKRSIHEPDPTAVEQISLESVDMDSPVNMKFNLSHLGSKEHILRPAIQPLNNHIRYVISQGNDDSVFRIHQRNGLSYLHTAKKKLMPGTYTLEITSIPLYKKKELKKLEESNEDDYLLGELGEALRMRLQIQLY

SEQ ID NO: 1151 - DNA, 420555 bp, Homo sapiens; identical to SEQ ID NO: 1140
  misc_feature (1)...(420555): n = A,T,C or G

SEQ ID NO: 1152 - DNA, 5839 bp, Homo sapiens; identical to SEQ ID NO: 1141

SEQ ID NO: 1153 - protein, 1506 aa, Homo sapiens [sequence omitted]

SEQ ID NO: 1154 - DNA, 8828 bp, Homo sapiens; identical to SEQ ID NO: 1143

SEQ ID NO: 1155 - protein, 2608 aa, Homo sapiens; identical to SEQ ID NO: 1144

SEQ ID NO: 1156 - DNA, 11260 bp, Homo sapiens; identical to SEQ ID NO: 1145

SEQ ID NO: 1157 - protein, 2904 aa, Homo sapiens; identical to SEQ ID NO: 1146

SEQ ID NO: 1158 - DNA, 10724 bp, Homo sapiens; identical to SEQ ID NO: 1147

SEQ ID NO: 1159 - protein, 2904 aa, Homo sapiens; identical to SEQ ID NO: 1146

SEQ ID NO: 1160 - DNA, 11200 bp, Homo sapiens; identical to SEQ ID NO: 1149

SEQ ID NO: 1161 - protein, 2902 aa, Homo sapiens; identical to SEQ ID NO: 1150

SEQ ID NO: 1162 - DNA, 34998 bp, Mus musculus
  misc_feature (1)...(34998): n = A,T,C or G
ttttcttagcacttacctttgatagcccatgacttctgggagctcatcagaacagcaatgaagaaaaatcttaacaccagggctccaattgtggccattttcttcttgggtgtttggtgggttcagaagcgatcgcagactgaggcagaattaacaagaactaaaagggattaaaatccaaagcactcaacttttaaccaatcagaaaaatgtttcagactgacacatctgttgctaggaaagggttccttgcaaccaggtcctatttagtatccgagtttccacttaacatttcaagaaataattttcctcaagaagaaatttttccacttattaacaaaaaaataataaaggctgtagacaaacaggacaaaaatttcaagagattgggaatgttggttgtaaaatacacaatcttctgtcccaatctaagttctatctgaaacacatcagtgaggctagaataaattaaaaatcgctaatatgaaaaatggggatttgtacctctgagtgtgaaggctgggaagactgctttcaagggacattgaattatctaaagagaaacggaacaagcaggtgatggagaatgcccggattctggtaacagaatgtcattcagggatctccttattgctggatgcatctccttttgcagtgggctagacaccaacatggtcagttcagcccaaggttccagggccactggaaaatattgttttctgatggcattggaaaataaactgagtcccaaagctccaaagaccagagagagttggggcacctctggaagatgggtagcgatcactagaaaccatgggctgtatggggtcctcctatatttgtcatggcctagagaggatctctagccagattgtgacctgaaggtgaatctgggcttggatgtggaggccactactaaagaatagcttgggcacacccttagcctaggtcaatgggcagtggaagctctcctcctgtcttataaggattaaaggcttgaaccaaaagtgtattttgagattctccatagatgttcctgaaaattaggaggttttacatgtcttgtttctggaaacactgtataatactccgaaaaatatttgcttacagacagaaagggctaaaagccaaagagaagccgccaagcagctaggtttcccacctggggctgaattagtgccttggtgaatcttcaacatagtaacacaacaaagacgctgatggaccaggagggccgccatcctcctgactgctgatggtccgatcatgccaggggctaagtaaggcatctgatatcaacccccagatcactaacaggatcatcccggggtcaagaggctgatgcaacaattctgtggtgcatgctggcctcctttttcagagccaaatcaagccaacacaatttttgcacctatcttttgctagcttcttaatgccatgctcttggcaagtgtatggtaagtttaaggtacctctaaatacacagtgctacttagcaacttatgatgctgccgagttcctgtctgctgattggttctgctcctgaaattattaaactagacttcagagaatgactttcagttccccttctctgtgatggggagaagtctctggcacactgttcgtggtttcctgttctcccaaagtatagcttcctgtgtgtctgaggggatttctgaagccacctgaataatgtatccttggtgacattaaaccgtggtgagctactgtcatgggtcctccagaaaacagaattgaatatgttacaagaagtatagcttaaggctggcagagcactggtcagggtcgacttttaatctaaagtggtcagtggcctctgggaagtcccgctgatgtcatagtttcatcaaagcccacaggacacaagggaacatcatctgctgaggacgtcaccaatgcctgcttgccaatgttcaagcctgtgacagcttgctcaccacatgacacaggtccattttctctctgccacccaaaccacacagcttgtatccacactcaaaactgtgtgttcagggtgggagaactgagcctcagaggcaaatgggagtattctaaagattactgaattatacgaacatgactatcatctatatccatattctttaccggtcatctgacttcattctcccacagctccgtgaccatgagtgcatccacactggacccagatcagttctggggcttcagtgcattttacgtttgtttgatccaagttcttccattttagcttcccttctccctctcccccgaatgctgagctgctcagtatcatatccccatctgttcttttgctctagattgccatgactgtggaggtctttcatttttctgtgtaaattttaggattgatttctatagctctgtgaagaatgccattgttattctaacagagacgacactgagccactaaattccctataatagaacaacattttgacaatattagttcttccaaacaatgaatgtggaaagtgttttcctttctgtctcttcttcagtttctttttcttttcatttaattaatttatttgaatattaggaattaaatttagggcctcatctcacaccagggaaatgccccactattgaatgataagcccaatataaaactgtataatcctgagacagggatctcatctaggctggcttaggactttctccgaagcccttgtcaactttgaacttgtgatttccatctggctgaggcacaattacagggcaccagcaaacctggtttcctcttctttttaatcggtacatttgtgtgtgtgtgtgtgtttgtgtgtgtgtgtgtatttaagtttgcagagaattgtggctattgagctcctttcacaatttcctccttaggaaatctgttgatggtgtgtgggaaagctattggtttcagctgttggttggttttgtgtcctacctcgttacgaattacttggttaattcagtaactcctccactgaagccgttagacagctggaatattcacacctgagttatctatctactggtaacatttcagctaactctgagagaagagctgaccactttttgaggtgtgctttaatagagccgggaaaggaaacatgacagcagctttaaggttaacaaagagcctctccctgtcgctctatgttcccaaccacaaacaaagctttggccttaggattcctctggggtccttaggagagttgacataattggtgacagcagctaatttttttcttcttcccccatacccaggcgctgaattgagtatgctattaaaaaaaagttaatttgattgaatgatggattgagcaatattaggctttggagagcagctcttcagaccttatccaaattgtgcctccttgaaacactagcatcttgtcttgacaattccgccatctactggtcattggtggaacttcaccattggcttgcatttcgcagagatggagccacaaggggaagggacccaataggtgggacccaataggtgggtttcaaggatacaaaggctgggactagtagtacccagtaagctttatttattttttttctcaacactaggatgctcctcttattcccagagtgacatgaacctaaacatctgaaatgttgaaggtcgcacctccctgctttcttcctctgggagagcatcttcttcacacagggctgcagcaatcagctttgaaaaaggggattggctgattcccgttagacgatattcaacctgaagctcctggtttaggctggaagtttcagcgtcagtggaagaggacaaatagcctgactgaccctgactggacaagtcaaacgcccagggctcctgaaggctcttatctcacaggatggtgtgtctgaaaattacaagcagctgggcatgagttcatatttgtaggaacagaaattaagcattggtttggagtctagttctctgtgatcctagagagtttaaagaattggcgcaaaccctgtgttccccttgattccccatatgtagctccttgtttgtatctgcggcaaaatcaactttatcactttcagaaaacaataactggtgagtgattcagacttgtaagttctcttaaagtcaacttgaaagtaaattaagattttaagtgaaaaattaaacattcagaggatctggtttgtcagaacctttttggattttaggaccatggtggaacagaccgtagtccctgagcaagaccgtagtccccgaacagagcaccatgaaaaccctcaaagtggcagcaggcctctccttccctgccccagtctaggaccaccgcggtaaaatgatgcacaggagccatgggctcctgttaaattggtggctccacaacatctcagcctgcagccctcacgggagctgtccatggcggtgcatctcctttcctgcctcagtgggggctgatcctcaggagctgtccacagtggcggcacctttcctgcctcagcctacagcctcggtgaaacacggaaggagctgatccgcaggatctgtccacagtggtagctcccttccagtcccataccctccccaacagacccacaaagatggcgcctcagcaaacgccagctgcagccgggaagaatttttcaccttaacccatgaatctgatgcaggggaaagggagtggggtgaaaaaaaaccccactaatccctgacattctccccccccccaagctcaggacttgaaatcccaccaatcttctctctggagatttctgtcctgaaaagcaccgccccctcagaaaccctatataagcactgcccttttgctcagttctctgaccagttcactcccagagcagcgggcagtcatccctggattcatccctccataccctggatcctccaataaatctcattcatgagattgtttacctggtgtgactcccatcggaaaaagccaagaagaaaagaagcaatgaagagaaaaagcgaagagaatttgatggcctgaggctcctgagctcctcagctcagctggggagaccctcccctgggagctgcaatgcctctgctgaggagacttcctctcagagctgtgtggttcctgtggtctcctgtctcaggatgcccttccactgggacaccttcttccctcagagctgtgtggaccctgggctcctgaagtccaggataccccccatccccatccaagcagaagcacttacactgaccatgcaaagagttctgtgggtgacagactgatgccagggctaagaactgcccagtctgaaacttaaacatctggaagtgttgagtatcactgacctcacattcacacacacactgctgcttcctctccaccttttcctattttcccttcctctctctctctcctccctctctatatcccttctcttcccttcctcttcccctctccctgccccaactactgatttctttagacttttagctctccttaactttaagggacttcaagtggtaaatctctgctgaaaggtctttctatgaaagccagattggccaagaattcctgggctgtcacaggtgctctgctcctgtgatgtcatgacttctctgttcatgtgatgtcatggatgctctgcttcttgtgagtgcctgttcatctcaccctaccttttcacttcttgtgcagctcatgacccatgaatgaggactctcaaattcagaacttagtgttcccacctctgctaacctgactaaggtattcccccacagatcaaccccacctatgcaatccttcctggggaattgaagtggaaacttaaggattatttggaaagtgttggatggtgttttgctagagcaaacatgtgaaggaacatttcgctgaattgacataagtgaaaggatgttctgttaaagcaagcatgtgaaaggatacgtgatgaaggagtcttcgctaatgacatattggtctgccttacattgcgtagttgagctgcatttgtcaggacttcatagagagaaatgcaccaaaaaacttctggtgacgtgctgtagtttcttgtcacttcttcggacttggactgattggcagagtgatgccagctgagacagatgcatgtgctgaggtcaagacccatggaagaaacgtggtttggagggtataaatagaacttggcagacagtggtggaggcagagcttggcttgcttatagagttagctatgtaatgcttttggggtctctcatcttcactttgctgagagagatgaagccaaggacttttcctggcatccctctgggtccctcctgctgacttgtgctgaagttgaggcccgctgtctctgctaggcagtgcaactggtgctgattcatgtttgctatccagactctaccaaactgactactggtgtatccaagaagtgtttgtaagtggatcgagctgccactgctaacctgtgcctgacaacacagatgggatttgctccaaagaaccatttctaaacaggtccacttcccccatattctttattttccactgccccctggtgggtaatgggctagaagggaggggttaaagcatttaagaaccatcattaaaaatagactttgaaaaaaattagttacagggagtcccttctcaggagactctacactgagtcaaggtgacaactaaaactaaccattacaaagcccggagatggtggtccacacctttaatcccagcactcagaaggcagtagcaagtggatctctgagttcaagaccagcctggtctacagagtgagttccatgacagccagggatacacagtgaaaccctgtctcaaacaaaacaaaaaacaaaacaacaaaaaaaaacaaaataaaataagcaaaaaaaaaaaaagaaaaagaaagaaagaaaagaaagaaagaaaagaaagaaagaaagaaagaaagaaagaaaagaaagaaaagaaaaggaaaagaaaataaccatcacagacagggaacaatccttctattctgagggagaaatagcccttgtatccttcttaatatctagtcctcccatcccgcacttgggaccttgtctagactcactgccttcgtcaagaccagtagcttcaagctagatggagcaggattccctaatcctgagagggaagaatcagggaaaagcaccttgcatgctgtgctgttacactgttaccttgcatgctgtgctgttacactgttaccttgcatgctgtgctgttacactgttaccttgcatgctgtgctgtttgttacactgttaccttgcatgctgtgctgtttgttacactgttaccttgcatgctttgctgtttgttacactgttaccttgcatgctttgctgtttgttacacgttaccttgcatgctgtgctgttacactgttgccttgcatgctgtgctgttacactgttgccttgcatgctgtgctgttacactgttaccttgcatgctgtgctgttacactgttaccttgcatgctgtgctgttacactgttgccttgcatgctgtgctgttacactgttgccttgcatgctgtgctgttacactgttaccttgcatgctgtgctgttacactgttaccttgcatgctgtgctgttacaccgttaccttgcatgctgtgctgttacattgttgccttgcatgctgtgctgttacactgttgccttgcatgctgtgctgttacactgttgccttgcatgctgtgctgttacaccgttaccttgcatgctgtgctgttacaccgttaccttgcatgctgtgctgttacactgttaccttgcatgctgtgctgttacactgttgccttgcatgctgtgctgttacactgttaccttgcatgctgtgctgttacaccgttaccttgcatgctgtgctgttacattgttgccttgcatgctgtgctgttacactgttgccttgcatgctgtgctgttacactgttgccttgcatgctgtgctgttacgctcttacaatgaagaacaaacattcttctaaataagtttaaaactgctcttcccagctcttgaaagtggatctggagacccctcaatagtgtgaaagagaatttaggggatccccaagaaggactgaagaaagaagagcacataacaggggtgtccaaggccctccattactagccatgctcattgtacccacacgctatatcagaaagcttattacatttcttgggtgaagcctttgttttccagtaaaagagaaagaacaaagaaaaaacacacaggcaccttggcctgatgttctggtcttggacagggaacatcccctcctagacttggttttctactcagtagggtgaaggttgagtatctgatagacagtcatgctctgcactctgagggtccacagactccgtgttgtgagagagcttggccctagatggggaatcatagaagttcagcaagctgaaggacaggacaaagtagccatgatttaggccactgccagatgtcaggtcacctacctgctggacagggcatggagcagggtccagcctgcgtgctggtgttctgaagagataagggtcaacattatcactgtgcctagaaggctagatgaatcagaacagagcccaaagtccacctgccttccttctgagtttcacttttgagcagaaggtaaatgtgctgctctgactggagcctcattttagactgaccctcggggactcaactctgcctacagattgacaccattcaaatcttccttcacgcaaactggtgacgcttccactttccttgcctgctccatcaccagtcactatgctctcctgtccttagacacctgctatgtgaatgaaggacacacttgtgactgggtgagaccaacagcctccatttcaccctaaaggaaagagcaacaggtgagtggcttggagagtctctcatgaaggatggacatgggagtgggggtggggtggggaggagtcaactaagatgaggaagtaggtagagccagcatcctgtcaggaaatggttcttacttcctgttgatctccactgcacattttttagagagtagtgttttgagacagactcccactctatagccaatgccggcttccaacaaatggcaatcctcctgcctcagccttctgggtgctgagattatagtgagctaccacaacaagctgagtttttcctctttttaacatcattgtctctttagctcaggactgatttttctttccaatcaaaaaacttccttcagctcaggttggtctcaaaccagacattgtcttgcctcatcctcttcagtatctgcctcctggtgtatggaatttcaatctcaggattcacgagaggtagaggaaggacttcaaggtcatccttggctgtgttgcaagttagaagccaactggactaagtgagacctgagggggagcctaagggataacgtacagtgtaactccatcgtgagagctcaaatgtgagtgagtgagtcagctgtgatcaacaactgaaaagaacggggccaggccatgatctgatgatgacaggtttggtgctagttgtctattaagatagcatagccatcagaagtcctagtttgcttgctattgctgtgataaatatcaagaccaaaagcaacctaggaaagaaagggttaatttcatcttacagctggcagaccactatgaagggaaatcaaggcaggaacccaagcagtaacctggaggcagacactgaggcagagaccatggagcaacactgcttgccctctgtgacttgctcagcttgtttttttacatcatgcaagcccacctgcccaggggtggcactgcccgcagtgggctgggtcctttcccatcaatcgttaattaagaaaaattcccccacagatttgctcataggccaatctgatggaggcagttcctcagttaggatcccttttctcagatgactctagcttctgtcgagttaacaaaacaaaacaaacaaaaaccaatgcagaaactgcaaggcatggtgggtaatcacagctgtactttcttctatgtttgctccagggaggatggtggattgcccacggtatagtctatctggcgtggctgcctccttcctcttcgtcctgctgactataaagcacccaggtagggtcccttcctacccaccccatccccacttgctgtcatgcccctcagttctaaaatgcacagtctcaaacccaacctgacagtgcagtacaaaggggtgcgggctcacactggcctttccacccctcccccacctccccatcccctggctttggaaagcttcttgacttagttgctcatctcttgggtgcgagtgacaactttaggcggcactggaagtcacctggaaagcgcaactggaatccatagctggagcatgctcagttttcacacaatactcaactctgcggggaagaccacacacgtaaatcccaccagccaaagacacaagatctctaagtatcggagagaattttgagcagtatcttaaatctgagttaagagtacccttatgactacttttattttattagcttttaatgttgcgtgtgtgtgtgtgtgtgagtgtgtgtgtgtgtgtgtgtgtgtgtaggacagtgtatggggggggggtgcaccctgcagcttgcatatgagggtcagaagacaatttgccttagctggttcttctccccaccatgtaaatcctgggacttgaaccctggtcttcaggcttgattgcaagtgcttttccctgctaagcttccactcgctcctcctccctacacagggttttgggtctacccaggctggcctctaactcacctggtagccaagatgaccttgacctcctgatctttcctgcctccacctccccagggccgggactacagaagaagaatgggtacccacgacatgaaattctcaaacatcacagcacacagaattgtcaaacacatctttgatttttcagatatcaaagaacatgacttaagatttgatcagaagactcaaactttctaggcaagccttgcctctaacccaccatgagacacttttgtgaaacctacatttgctatttactggactcttgccttctctgggaggaaaggaaaaaaccaatcagcaccgtccctgggatgagtgacccaggaaggtagaaggacccagtggcttcgctatttacctaaactcaaaatgactccaaaatcaagataaagtccccatggaaacatcaactcacatattaatttatctgggaatgaaccccagagatgtggttgcttttggtatcttaaagatggatggtttaagcctgcaaaactcagggctggagaggtggctcagttaagagtacagaaaactcttccagagagccaagttcagttcccagcatctactgccgatggctcacaaccacttgtaagccagctccagggaacatgatcttcttttctggtctgcacacacatgtgtgtacccacacaaatgtgcatagttaaaaataaaacactttaaagaaaaaaacaaatccagatccccaaagctcattaactgtggaattgcctcccaagtggtgacatatattcacgctcaaaattttaaattttagaacacataccgtttatttttaaccagaaaatgtgcaccccttccatgttttaattctctgaaacattgacattaaatactttcctgctttctgttaacaagttccagcaccttggctacttgaagcgagcatcctggttctctggcttgcctctctgtttcctctttcactgttttgtagatgacttcagagtggtcggtcctaacctcccaatcctggctaaagtcggggaagatgccctgctaacgtgtcagctcctccccaagaggaccacggcacacatggaggtgaggtggtaccgctccgaccctgacatgccagtgattatgtaccgggatggagctgaggtgactgggctaccgatggaggggtacggaggccgggcagagtggatggaggacagcactgaagagggcagtgtggctctgaagattcgccaggtccagccaagtgacgatggccagtactggtgccgcttccaggagggggactactggagagagacaagcgtgctactccaagtggctggtgaatatctgcccaggggcccaggggcacagaggaacaggggcacaggggcacaaggggcacaggggcacaggggcacaggggcacaaggggggatggatccacttacctttgggaactgtatcacctcttgaaaaatcctttttcaaccaccgaaggaggacatttctttttttttttttcttactcatttttaaaataagaattgtttgcttttatgtgtgtatggggatattctgcctgactgtgtgtctgtgcgccatgtatgtgctcagcgtccatggaggccagaagagggtcagatcccctggaactggagttacagatagttgtgaactatcacgtgggtgctgggaacaaaacccaggtcctccagaagagcgaacagtactcttaaccactgagccacctccccagtcctcctcctcctcctcctccaccaccacctcctcctcctcctctttcttttttcttcgagacagggtttctctgtatagccctggatgtcctggaactcactttgtacaccaggctggccttgaacacagaaatctgcctgcctctgcctcccgagtgctgggattaaaggcgtgagccaccacgcccggcttattaagtccttgagaatttcatacaatgtattttaatcatatccttcctctccccccaacccctcccaaactccacccccttctctacccttacaatcatggctcccccaccccaccccatctcttccttctatccagtgctaattgtaccatccacacattcaagtgtgtgaccatctgctgagcttgctcaacctaccatgggctacacaccttaaggaaaattgactccttgctcccagcccatccccagctcctggcatctatcagtcatcaatatcttctcagctgggcatgggattcatgcccatctccccatctatgctgagaatttgtcagcttgaggtcttgtgcacgctatcacaaccactctacatgcaggaggggaggtcaggcaaacccagttgcttcaccagggaatgattctctggggacactggccactctggccaatgcagtttttaccaccaccttttgaaaaatccattagcatgcattccttgtgcaaagtgatggatcttgtgatgcttttgttaagtttatcatggtcctttaccatatttacccatgccttctcctgtcacctcccatcatccccttctgcttaataccatggtctccagctccatccattttctgtgaataacttcttttaattctttttgagtgaataaagtgggttctagaaagatggctcagcaattaagaccccatgtactcttccggaggagccagttttgattcccggcacccacacagtagctcacactatttgtaactccaattccaggggattcaatgtcatctttggactccacaggcacaagacacacatgatgcagatgcacacgcaaaacacccacacacataaaataaaatttagcacaccatggtcacttggctatccagtcatctgtgaatgcatatcggggctgaccctacaacatgggcactgggaagggttctttcttcatgaatgaatgtgagcttaaattcccttgggtgtttttccagaagtggagcaatgggtgttatatatcagctctgattttagggggctttttgtttgtttgtttggttggttggttgggttttgtttgattttttagggggggggttcctttttgagaaacatccacacagatgttttaattgttcccattagtacgttcaattggctcaaaagaatggacgtgagaatctgtgtattgctaagctgcaggtagagctggacactgattcatgacactcagagacattgaaatttaagtcaaatgttatctgtgggtgcaagtgaaaggcttattcatctgttttctcagccagtgatataaacagctgtgatgttttaaaaaaggcactctatggtttacacaaattagtctaaaatagatttccccacttcaagaaaggtacagtaatttctcaaccattttactgcataccaaaattgcaactgcccacgaatctaacaaaccacggaagaaatgaaaatagcccataaatgtgatgtctgagttaataataaatgtctcatttaaactagagttctgatatcatccaaaaacagcagacaaggagcctactacagagaacatgagaagcaaagttgagggcagagatgtcatcatgattaaattaggacatagacattcctcctgaataaattagggcacagacaacctcatgaataaatcacaccacatcttcaaagtaccagagtcacaaagcaaactgtgtcatgtttccctcctctccctttcatctactgagtctgaagatgctaatgtttaaagatacaaataaaacagccagaactccatttgactgggaaggaactctggtaacattgtctgcttcccaggctgtgggctcccacctcctccctatgaaggactaccccaggtctcggttcgatctgtggactctgggattcaaagatgtgcgctttctctctctctctctctctctctctctctctctctctctctctctctctctctctctctctccagctctaggatcttccccaaatatccatgtggagggacttggagaaggagaggtccaacttgtatgcacgtcccgaggctggttccctgagcctgaggtgcactgggaaggcatctggggagaaaagttgatgagtttctctgagaatcatgtgccaggtgaagatgggctattctatgtggaagacacactgatggtcaggaatgacagtgtagagaccatttcctgcttcatctacagccatggcctcagagagacccaggaggccaccatcgctctgtcaggtcagtgctttggctcaggcaccacagatctcaggggttccaggggctgctcagcagcaactcttctttttctttaatcatatttatgtaatatgttcaaatttataaacattcatggtatttcagtaatcttcaagtttatattttactccactgtgttaattttgctacacagatgttaaacacattggagatataataaaaatagtcctttaactgagacgtcttcttgtggtgtgccagttgcttccaagaaccaatcatgtgcttagtcagaatgggatggtttctttgacagcttcttagttatagtcttgtcaataagtagtaacaaaaacaataatcaaaacacacaatacaatagttacaggtatgtttcctatgttgttagaagttagagcagagagggagagttgcacttaatgattcttagagcccagaaagtcctcatgctcagtgataaagctccacttaccatctagtatctatcacctatctcctacatatctaatctatcaatcatctgtctgctgtttatccatctatcaaccatttatcaattacacatcactacagttacaattaactatccatcgtcatgtgtctaatccaccatctagctgtcacatatctatctaccaatcaacatcatctatctaatcatctaccattgatcaatcatctatctataatatatcatcatatatcaatcacctgtctttctaaatatctatcatctacctatctgtcatctatccatccattcatccaattatctgtgtatccatccaattatctatcatctgtctatctctttgtcttatctatctgaaatagacatttgtatttcttttgagaccgtctcagtctatactccaagctggtctcaaactcactgcaatcctcctggctgagcctcctatgggttgttactatgttactataggcatgaaccaaccagctagactttgctgcttatgtgaggagaattgcctttaaacattttaaattgaactgagaattttaggacactctgtgtttggatgtattgctggtgtaagcaaaggatgcattaaagagttaaaagtaaatgttgtgttaatgttaattcaatatcatacagcccctgtttagaatactaagtaatacttgtttatgactttatatttcatacttagcacttatttataaaaaataatacatatgttttactagtgcttaatatcagcagaaacaaaatggattgacggtgatagaaccaacctttttgttgagaaaaagtaagatctatgtcatcaggtggtccatgggaagaattttctgtttttcatactttttaaataaattgagttcttgaataaaaagtgaagctcacctttatttctggaaagtttctttactttcctttagaccaaatcccttaagatatttttcttttttttttctccagagaggctccagaccgaactgggtgagtgggacctgcgtgcacgcccatgcatgagggcagagcattgagagcaccggggacacctcacgatcctcgtgagaatgggaggaaatgccaaggcacatcctcaaaaacttcctttggggattggccaggggaggctttttcaatttctgttgctacacacccacctggcactcaggtttagcccatgatcacagggtagcacaaaccgattgtgtaaagtctgcccatttagtgatggcctctttatcttattctgagaattttagcagtaaaatcattcccttattggcgtgtagcctggcctttaattaatgtttccttcagactagcaaggctcttctttaaattgcatgcagactacaagccccaccttcctccaaggagggaccctgggcctctaacctcccctgggatgctcgtgggttccaaacctcacaggatgtccatgttagtagagtgattttctctgtgttgattcatctatgtctggtgtatttaacagcttccgttagcgtaatcggacattcccagcccagccctgttcaagtcggagagaacatagaattaacttgtcacctctcacctcaaacggatgctcagaacttagaggtgaggtggctccgatcccgctattaccctgcagtccacgtgtatgcaaatggcacccacgtggctggagagcagatggtagaatacaaagggaggacttcattggtgactgatgccatccacgagggaaaactgaccctgcaaattcacaatgccagaacttcggatgaagggcagtaccggtgcctttttggaaaagatggtgtctaccaggaggcccgtgtggatgtgcaggtgatgggtaaggataccaggtggatcttttggcttctccagcttcctaacactgtggcacgctggttcctgggagatttctctgacacccaaaatattctccgtgctcattcattttcaagtttatattgaacttttggtgtagcaaccaccataaacacttcaagagcacaaccttgggtacacagatttgaggtttttaaataaatacttctttactaattccctgagaatttcaaaccatctgctttgataatattcaccacccaacttcccatcctctttttacaaaattaataacccatggactcctatttccgctgtccacatacttgtgagtgcagagccatctactggagcaaggtcaacctgccaggagccacatccttaaagagaactgactctcatgtcccctgaatcatcaactgtccatagctccttaggtaggagagggctcagagccccttccaagctggaacattgaccagcttgatctagtgcaggtcttgcatagacaaccacagctgctgtggtgcagtggccctgtcctattcagacactttcagtacggttcccatcccccaaactctgactcttacaatagtaccacttccttcttccatggcggtcacttagccatggggggacaatgatatagacatctcatttgtgactgaatcccccattcaatctctgcactttgaccagatgtgagtttctgtcttagccactacccactgcaagagaaacttctctgatgaggtctgagagctgtgctaatctatgggtacaaagagaaaagaatttgatactatgtccatttagcaaaatagtagtagtaaggtctcccttcaccactgtgagttcttggccagactgacagcactaggcaggcctttcctgtggtttaaatgtttaagtgcagaacaatcaggaaggtgggactctcaagcactccgtaaagtgacattctgagaatattccccatgattttacacaaaccttgttatttcacagtgctgctaagattctgggaaataattggtttccaggaattgtagtaatttgaagactcagctagatctaccacatgcacagaatctgtaaagactgacagtcttggtgtgcttgnnnnnnnnnnnnnnnnnnnnnnnnnnnnnnnnnnnnnnnnnnnnnnnnnnnnnnnnnnnnnnnnnnnnnnnnnnnnnnnnnnnnnnnnnnnnnnnnnnnnnnnnnnnnnnnnnnnnnnnnnnnnnnnnnnnnnnnnnnnnnnnnnnnnnnnnnnnnnnnnnnnnnnnnnnnnnnnnnnnnnnnnnnnnnnnnnnnnnnnnnnnnnnnnnnnnnnnnnnnnnnnnnnnnnnnnnnnnnnnnnnnnnnnnnnnnnnnnnnnnnnnnnnnnnnnnnnnnnnnnnnnnnnnnnnnnnnnnnnnnnnnnnnnnnnnnnnnnnnnnnnnnnnnnnnnnnnnnnnnnnnnnnnnnnnnnnnnnnnnnnnnnnnnnnnnnnnnnnnnnnnnnnnnnnnnnnnnnnnnnnnnnnnnnnnnnnnnnnnnnnnnnnnnnnnnnnnnnnnnnnnnnnnnnnnnnnnnnnnnnnnnnnnnnnnnnnnnnnnnnnnnnnnnnnnnnnnnnnnnnnnnnnnnnnnnnnnnnnnnnnnnnnnnnnnnnnnnnnnnnnnnnnnnnnnnnnnnnnnnnnnnnnnnnnnnnnnnnnnnnnnnnnnnnnnnnnnnnnnnncacactcaacctattgctgctgtcccttctgctccctcttccctcctcctcctccttctgccatttctcctcttcctcctcttcttcttcctcctccatttcctcctcctttatcttcttactcttttcttcttttcctcttcctattttattttcttctccatggtggagtatttttaaaataaatcttttaaaaataaatatttgtctcttgcaaagtttgtcttcaggtaacctaaggacaacatttctctgaatttcttctctctctgtctctgtctctctgtttctgtctctctgtctctgtctctgtctctgcctgtgtgtgtgtgtgtgtgtgtgtgtgtattttactctatctacaaactcccccttgttgtcaaaacaattctggcatgtctttttccctctgatgtaaattttattctgcactagaaattaattttcctcaaagccctggcagttatgtttggcagactttatgtttaccaccgtagttactccagtaatctgtggtggagtgatataatgggaaggagagaaggaaatggggtggggcaccagcagacataagcttacctgcttcccttggcacctgactttcaggaagactgagccaacgggttcctggagagacccagccctcaggctgctcctgtgagaaaagccatctcgatgttttgctcatctcatgacctcctggggtttgcatttcagactccaagatagctttgctatggatgaccctgcctgttgtggtgctgcctctggccatggctatcgacctgatcaaggtgaaacggtggcggcggaccaatggtgagtgggtgaacagggcggacaggcccgaagtcattcttcagcagctgatgaggcctggcttactcatgtattcaaagctcagcgctgagtgagcttcgagtttacagcaatggggttaaaagacagtaacatgaggactagagagactgctcagtgtttgaaatgtgaggacctagatttgcatcactctggtcatttccctcagcctcgtctagcctggtggggaagtacaagatgtcatgacacctcagcataggaggatcagagaagccagaaagcagtcaggggagggctggggagatggctcaggagttgagtacttgctgctcttgtggaggatctgggttcagtttctagcgcttagctgggggctcacaaccatctgtaactccagtatcagggggttgacatttccttatggtcttagcaaacagaaaacataccagggttcacagacattcatctatgcaggcaaaacattcctacacataaaataataaaaagtaaatagatttaaaaaaaaaagttggaagaggagacaaagaaggacagggagaaagaataacaaatgatgagaaagttcggtgacaactgtgtaagaaaatgccacggtggaatctgccccaagtgtgctaactacttggagctggtgaggtggcttaggggttgagagcaccggttgcacttgcagaggacccaggttcgattcccagcacccacattgcaactcacaattgtctgtgactccagtcacaggagagttgtgcagcctcaggcttcctatatctaccttgccaatacccagccatgaccttatgctctcaatcattatcccaccacactgccaagcaggaacactcttgatcttctaatgtttcagtcacgtaaactaaaccctatctagtccccaacctccggggttccatctctctatcagtctacaaattacttagtcacgtgcttccttggaaactcagggcgccacatcttccagttaccacagagctgccccctgaagctctcgttggtccctcagcccccaagtgccattctgtgttcctacatggcccaggccttaggccatgccctatcacccaaggctgtggacacaggtgactaatcctgtgtccactgctggtgtcttatgtagctgtcatggatgaacgacccctctcaccaaaacatgaacaggagactgaggcagagcattgatgacagtaaacccaaccgtggtgttagatggggtgggggcgggggtgaggggcttgctgatacaatgttttcctttgccctgaaaagaaagacaagcctgtcagacagcaagacatggcataggtagggacaccctttctgccacaagggcagaaagataaccccaccccccaagttctttcttgactgtttctataatagtaaaacctaatttcctaatttaaaaagcacttttcaggccaaaagtctagtgtttatattgtttattatgcaaagatgtagcttgcctcttctcttactgtcttagtcagggtttctattcctgcacaaacatcatgaccaagaagcaagttggggaggaaagggtttattcagcttacaattccatactgctgtttatcaccaaggaagtcaggactggaactcaaacaggtcaggaagcaggagctgatacagaggccatggagggatgttctttactggcttgcttcccctggcttgacagaacccaagactaccagcccagagatggtcccacccacaaggggcccttcccccttgatcactaattgagaaaatgccttacagttggatctcatggaggcacttcctcaactgaagctcctttctctgtgatagctccagctgtgtcaagttgacacaaaaccagccagtacacttacctagacccaccaacttacgttcactgaaaatcgtgtggtcattttttcacacccggtaacttttctctaggctgcaccctactgtgtatttttttctaggggtcatgggcctcagggcttgctggttttccatctcagtcctacacccagccggaagcccatgaacaccactccatctgacttcagttatctgcgaccctttcctctctcctcatccttgacactctgtaaccccctcttcttctgtttttccttccagaacaaacacacagcagcaatcaggaaaataacaagaatgacgaaaaccacaggcggcgacttccttctgatgagaggctcagatgaaaatgcaccccgcaagcccaacgcaccccatttcctgaacaccccatccctcctcccatcttttcccctcaataagctgcactgacataggagtgctttcacttgctgctctccaaaggttcttcatggaccctgtccgtacctgatgcaaccatcacgcacagttgggagcacctcgacctgagccaacccataatagtcttgatccctctctcacagtgatggcatcttctctccctttgtctctttctgctatccctcaatctagggactatcccttgcctgtgcacagcatctttatctcatcaccttctggacccaccgtgaggatggaagaacttagacctgcagagaaatgtcactcatctgagtcctggatgggnnnnnnnnnnnnnnnnnnnntctagtgcagaataaaatttacatcagagggaaaaagacatgccagaattgttttgacaacaagggggagtttgtagatagagtaaaatacacacacacacacacacacacacacaggcagagacagagacagagacagagagacagaaacagagagacagagacagagagagaagaaattcagagaaatgttgtccttaggttacctgaagacaaactttgcaagagacaaatatttatttttaaaagatttattttaaaaatactccaccatggagaagaaaataaaataggaagaggaaaagaagaaaagagtaagaagataaaggaggaggaaatggaggaggaagaagaagaggaggaagaggagaaatggcagaaggaggaggaggagggaagagggagcagaagggacagcagcaataggttgagtgtggggtgcacacctgtaatcccagagcttgtgacgcagaggcaggaggatccgaagtcccaggctagcctgaatacatgaaacctctcaaagaaaaacacaacaaaacaacaacaacaacaacaaaaccaacaaaaacaaaaaaacatagagcccaagccatttgatacttggttcccaagccagaggaaggtatgcagtcaccaacctgagagagggaaacgggctgttttctcctggcccagagggaggctgatggagcaggtcacattcaccatggagccgtttgtgaccagcagaagtgtctccacctggaacagctcctggctcccttgctgaaaggcctcggaaaacgatggcattgtctttccatctctgtccctccactgcacatggggccgtgggaaccacccatcagacgtacacctcagctgcatgcctccatctttcaagacctccctggtgatccgtggggtggaacccaccgctggggacagagaccaaggaagccgatggagcctccacacatgtgtgtggtcagcaacatcccccgggggtgggggtggggtgagggcagcttggggaggacagagctctgggccaatggcctcccacgggagctgggactggctacaagatttcttgttttgtttttctatctttgttgnnnnnnnnnnnnnnnnnnnntgcccatcccccaaactctgactcttacaatagtaccacttccttcttccatggcggtcacttagccatggggggacaatgatatagacatctcatttgtgactgaatcccccattcaatctctgcactttgaccagatgtgagtttctgtcttagccactacccactgcaagagaaacttctctgatgagttctgagagctgtgctaatctatgggtacaaagagaaaagaatttgatactatgtccatttagcaaaatagtagtagtaaggtctcccttcaccactgtgagttcttggccagactggcagcactaggcaggcctttcctgtggtttaaatgtttaagtgcagaacaatcaggaaggtgggactctcaagcactccgtaaagtgacattctgagaatattccccatgattttacacaaaccttgttatttcacagtgctgctaagattctgggaaataattggtttccaggaattgtagtaatttgaagactcagctagatctaccacatgcacagaatctgtaaagactgacagtcttggtgtgcttgaagaggggcagacaaacatcacccttagaaacagctctccgacatcagcaaatgtttttaaggacataggcctaagtcttggatagccttcatatttcccttataccaagtcccagtctaaattaacagacaggagcatgacacgcctagaggaccatctgttacagggctttcttcctctattttgagaagcctctcttactcagcatcttccatgtcgtccaagtctcatgtttaatcaaaattacttcgttgtcaaggtcaggagggaaaagggaattgaggttacaaaaaagttagatttgaaaatgtattttttaacttgtagtctatcctagaagactgcaacaaagatagaaaaacaaaacaagaaatcttgtagccagtcccagctcccgtgggaggccattggcccagagctctgtcctccccaagctgccctcaccccacccccacccccgggggaagttgctgaccacacacatgtgtggaggctccatcagcttccttggtctctgtccccagcggtgggttccaccccacggatcaccagggaggtcttgaaagatggaggcatgcagctgaggtgtacgtctgatgggtggttcccacggccccatgtgcagtggagggacagagatggaaagacaatgccatcgttttccgaggcctttcagcaagggagccaggagctgttccaggtggagacacttctgctggtcacaaacggctccatggtgaatgtgacctgctccatcagcctccctctgggccaggagaaaacagcccgtttccctctctcaggttggtgactgcataccttcctctggcttgggaaccaaatatcaaatggcttgggctctatgttttttgttttgttttgtttttctttgagaggtttcatgtattcaggctagcctaggacttcagattctcctgcctctgcgtcacaagctctgggattacaggtgtgcaccccacactcagcctattgctgctgtcccttctgctccctcttcccctcctcctcctccttctgccatttctcctcttcttcctcttcttattcctcctccatttcctcctcctttctcttcttactcttttcttcttttcctcttcctattttattttcttctccatggtggagtatttttaaaataaatcttttaaaaataaatatttgtctcttgcaaagtttgtcttcaggtaacctaaggacaacatttctctgaatttcttctctctctctctctctctctctctctctctctctctctctctctctgtctctgtctctgtctctctctgtctctctctgtgtgtgtgtgtgtgtgttctattttactctatctacaaactcccccttgttgccaaaataattctgatatgtctctttccctctgatgtgaattttattctgcactagaaattaattttcctcaaagccctggcagttatgtctggcagactttatgttttaccacagtagttactccaacgatctgtggtggagtgatgtaatgggaaggagggaaggaaatggggtggggcaccagcagacctaagcttgcctgcttcccttggcacctgactttcaggaagactgagccaacgggttcctggagagacccagccctcaggctgctcctgtgagaaaagccatctcgatgttctcctcatctcatgacctactggggtttgcatttcagactccaagatagctttgttatggatgaccctgcctgttgtggtgctgcctctcgccatggctatcgacctgatcaaggtgaaacggcggcgacggaccaatggtgagtgggtgaacagggcggacaggcccgaagtcattcttcagcagctgatgaggcctggcttactcctgttatcaaagctcagcgctgagtgagcttcgagtttacagcaatggggttaaaagacagtaatgtggggactagagagactgctcagtgtttgaaatgtgaggacctagatttgcatcactctggtctccctcggcctcgtctagcctggtggggaagtacaagatgtcatgacacctctgcataggaggatcagaggagccagaaagcagtcaggggagggctggggagatggctcaggagttgagtacttgctgctcttgtggaggatctgagttcagtttctagtgcatacctgggggctcacaaccatctgtaactccagtatcagggggttgacatttccttacggtcttagcaaacagcaaatataccctggttcacagacattcatctatgcaggcaaaacattcctacacataaaataataaaaagtaaatagatttaaaataaagttggaagaggagacaaagaaggacagggagaaagaataacaaatgacaagaaagttcggtaacaactgtgtaagagaatgccacagtggaatcttccccaagtgtgctaactacttggagctggcaatgtggctcaggggttgagagcaccagttgcacttgcagaggacccaggttcgattcccagcacccacattgcaactcacaattgtctgtgactccagtcacaggagagttgtgcagcctcaggcttcctgtatctaccttgccaatacccagccatgaccttatgctctcaatcattatcccaccacactgccaagcaggaacactctgatcttctaatgtttcagtcacgtaaactaaaccctatctagtccccaacctccggggttccatctctctatcagtctacaaattacttagtcacgtgcttccttggaaactcagggcgccacatcttccagttaccacagagctgccccctgaagctctcgttggtccctcagcccccaagtgccattctgtgttcctacatggcccaggctttaggccatgccctatcacccaaggctgtggacacaggtgactaatccctgtgtccactgctggtgtgcttatgtagctgtcatggatgaacgacccctctcaccaaaacacgaacaggagactgaggcannnnnnnnnnnnnnnnnnnnnnnnnnnnnnnnnnnnnnnnnnnnnnnnnnnnnnnnnnnnnnnnnnnnnnnnnnnnnnnnnnnnnnnnnnnnnnnnnnnnnnnnnnnnnnnnnnnnnnnnnnnnnnnnnnnnnnnnnnnnnnnnnnnnnnnnnnnnnnnnnnnnnnnnnnnnnnnnnnnnnnnnnnnnnnnnnnnnnnnnnnnnnnnnnnnnnnnnnnnnnnnnnnnnnnncccaagctctttcttgactgtttctataatagtaaaacctaatttcctaatttaaaaagcacttttcaggccaaaagtctagtgtttatattgtttattattcaaagatgtagcttgcctcttctcttactgtcttagtcagggtttctattcctgcacaaacatcatgaccaagaagcaagttggggaggaaagggtttattcagcttacaattccatactgctgtttatcaccaaggaagtcaggactggaactcaaacaggtcaggaagcaggagctgatacagaggccatggagggatgttctttactggcttgcttcccctggcttgctcagcctgctctcttatagaacccaggataccagcccagagatggtcccacccacaagggcccctttccccttgatcactaattgagaaaatgcctcacagttggatctcatggaggcatttcctcaactgaagctcctttctctgtgataactccagctgtgtcaagttgacacaaaactagctagtacacttacctagacccaccaacttacgttcactgaaaatcctgtggtcattttttcacacccggtaacttttctctaggctgcacgctactgtgtattttttttttttttctaggggttgtgggcctcagggcttgctggttttccatctcagtcctacacccagccggaagcccatgaacaccactccatctgacttcagttatctgcgaccctttcctctcccctcatccttgacattctgtaaccccctcttcttctgtttttccttccagaacaaacacacagcagcaatcaggaaaataacaagaatgacgaaaaccacaggcggcgacttccttctgacgagaggctcagatgaaaatgcaccccgcaagcccaatgcaccccatttcctgaacaccccatccctcctcctatcttttcccctcaataagctgcactgacataggagtggtttcacttgctgctctccaaaggttcttcatggactctgtccgtacctgatgcaaccatcacgcacagttgggagcacctcgacctgagccaacccacaatagtcttgatccctccctcacagtgatggcatcttctctccctttgtctctttctgctgtccctcaatctagggactatcccttgcctgtgcacaacatctttatctcatcaccttctggacccaccgtgaggatggaagaacttagacctgcaaagaaatgtcactcatctgagtcctggatgggtttttctagaaatgcccaatccagtagcactagagggacaaagcaggtggtaggagagggtttctttcctccgtcctcaagagaaaggactaactgtgattcacggttacaaaagacctgacacttgcactacaaatcagaccgggggtgggggaattgtagaaataactaagggggtaaaagcacttgctgttcttgcagaggacctgagtttcattcctagcacccatatggcaggtcataaccatctataactccagttctagggggtcagatgcccttttctagcctctgagggcaccaggcacacatgtggtacacagacatagatgtaggcaaaacacccatacatctaaaataaaaataatttttataaagaattagaccaaaatctctcatgtggtctctatccgagcatgtctgcagctggtttatgtaagaaccacagaaaggagacagaaaaaaaatgctaatgcttaaatccctcataatatatttcacacctatctatgccatgtactggtaccccaaagtacacaatatttccatgcctaaaacagggttttctacagtaacctcatcaaacaatctgtcttagttactgtccaattgacatgatgaaacaccatgaccgaggcaactttataaaggaaagcatttggtctggggcctatggttccagagagctagagtccataaccattatggctgaagggaatctggcagcaggcagccaggtgtggcactgaagcaataactgagaacttgtatctgacccacaaggattaaggcctaacttggaaccatgtagacttcaaacctcagtgactcacctgctcccacaaggccacacctcctaaccttcaccagggtccaccagctgggtctaagcattcaatcatatgagcctacgggggccattctcactcaagccaccacattcttgtcatccttttctaaatttgctttttgatccccactggagtttatgtgaacaataaaagcagccaagttgagtccatgggaaccttgctggcaacctattccttttctcttgctgtcaaacccatccttcacgtccttataagtggggtctgccagtggacccatggatctggtgcccacataaacagcagtgccaggatgcaggaaagacagaggaaggatgctgtaaccctgaataaaagacatgctgattttaactgcacatacaagttcacctttaagtctctcctgggctcactccctcattttttggatggaggaaacatcataaaacttgacattttaactaaaaattataatccctctaataacagttggcaccataccacgaccagttaaggaggataaagttctggacaacagcaaataatctatagctcaatccatcttcccagagctgcctgaggagcagctgctacacgctcttatgcaaaatgaaatgaatacgtacatgaacttggtcctaaataacatggcacagaccaacctaggaagcaagaaatagactttgaactcctgagagaacacagcatgggtgtccaaagtagaaacaaaactgagctagccataaaaaggaacctcaaagggtgcccagggaacggatggaagtgtgaatgtagatttaaccaaccaggctaagggagcagaagataagcacattatacaaccaatcaaccccttctaaaggtcggcctcaatctatactccgcggtcaatcacctggtaagggagagataatggcaagtgctgagataaccttgagaccagctctgagactattggagacctctgacctcttcctgaagtggaacaccccttcaccacccaatggatttggactcttcctgttagacaaatattcagtaaagaaaatgggtaaacagcatgggggaggggcagatgaacacaaagtcccaccccttagctgaggatcaattggcatctggtacctgctgggagaaggggagtcagtgttctttaatagtgtgatccctggcttattgaccatactgcagggtgggccccactcccaagagcagttgggcctgggaaagagaaagagagatgttgggtgagaagggggcgggggtgggggtagagctgggagaggtaggggaaggagaggggatatgatcaaagtaatcatatgaaaatctcaaataattaaaacattagttttaaaagggagatggctttaccatataaattgtatacttctctttcttttgagtcacagatgctgcaggtctatttagaatttgaaggcactgcaagtgcattggactagtctacattttcccttaaaataatcctctgtcctttcttacatttaaaatattttgctagtctatgccatcagtatgcttgtataacaaaatggttttcccatccctttttcattatttttttttttcagtgaaggactgggtgtggtggtaccaacctttaatcgggcagatctctgtgagtttgagggacagccagagctacgtatggagatcctttctcataaaaacaaactcagtccttcagtaaagactaatggggggggggggaagatgggcaaaaggaaccatgccaggaagcatcaactgaaatgcatcacttggagatgaggctggcctcaaatgagaggagagggtcgtgtgggaaaagctcatttgtctttagaggatgagtttaagtaaagacctttaaaaactctgggccaggtggtggtggacaccattaaccccagcactcagcaggcaaaggcaggcagatctctgtgactttgaggctaccctggtctccagagtgaggtccaggacagccagggctacacagagaaaccctgtctcagaaaaacaaaacaaaaaaaacggttctcactcaaagtacagcataataaatgcatcaatatattaagaccatttaggtcaaatccagcatccaagactttgactgtctccaaacacacctctccttttctttaacgtgtgctggttggtttagggaagatggagaaaatgtctccatcggattgtcctatagtcagtgtgtggagcatttccttgattaatgattgacatgggagggcccagcccactgtgggtggcaccgttcctaggcaggtgggtctgggttgtatataaaaactggctgagcaagccatgggagcaagccaataagcagccatccccgcacccctaatcctttgtggcccctgcttcagtttctgccttgagtttctcttctgatatcccatgacccgagtgtaaaacaaacccttcctctccaagattacttgtttcttttctttttcttttcttttcttttctttgcttttctttttcctttcctttcctttcctttcctttcctttcctttcctttcctttcctttcctttcctttcctttcctttccttcccttcccttcccttcccttcccttcccttcccttcccttcccttcccttcccttcccttcccttcccttcccttctcctttcctttcctctcttttcttttcttttcttttcttttcttttcttttcttttcttttcttttcttttcttttctttcttttcccatttcaacaaagccatagaaagcaaactagaacacaggtgcacaagaatccctccaaaacccaacaggatgtttacccctcctctaaaatgttcttcacattcagctactggcttcctcagagtcatctccttcccagaagaaatggttgcaagtctgctctcccctcagccacagtaacccttccctaactctgctcttcctttgaagtttccaagctccctcccacctactccatcccatcctgatacacccacacagcctctgagaaacaggagcaatacatcctggttctgtgtccctcacaccaaggttggggaccacacagcaggagagcatggtgtctgcgcccaccatgctctccaatgtgacctcaggggccattcactactgaggaatcagcgggatcaagccagaataaaaagtgtgtccggatgctctgcctggcaccttcagagtacatcatcattgtcgcagcagagccccagggaaattccattatcacagagttttacagtgtttgcacaagctgataggtcataggtttttacagcagacaggatagcctcatataaagcaaataatttattggttacaatggtggagtactcttggaagtggggtgagaagaaggcagggataccatgaaaacacattccctgtgaagatttatttgccctggtgtgcaaataaatcatttattagatgaggatttagaaatagccaaggtgtgtttgcagactcaccatgtgacttaatcctcctatgcagaagacagaaggtcggtgctccacatgcggtaggtttttgcctgagccccatggaagtggaagtgaaagtggggtagagaagaggtagaccagagggacggcctgcaaacacctggatccatgacaaggagattgtcaaggttagagggccatgtctaaggggctcatggtggtgctaaaaatgatctcctgtgactttcagacaactgtggtgtctttccccaaagaacaccagggtcctttgtcactcacacaaagaccccttgcctcccttttccagaaacagctttgacctgaacaaccatgttctgaggccattagtctgcccatgtctctaatcactccttgaaagaacatgttatctctcactgactgagagagagagagaggggagagaggaggcaacctggaagagacttagctcagcctccttgaattctcaccaacactttccagtatgacaaagggctgcctgtccactacccaccttcaggatccatgctgtaccccccccccccgcactccttccctcttgcccatcatccaggagagcttcggactgtctaaatgcttagagagatgaaggtttcttagaacctatcaccatctcagagagggagccagacagggtgaccctgccttgcctcccggcatgtctcctcctggataccagcaggtctctcctgtgaatcttgctccagatgcttcaggggtctgagggtccttgaagaagggttggatggacatttaaggattcagaaaactggaggcaagaagactcctccaggaaacttggggagtaatccttcaaatgaactaagacggaaggaaagaccatccagagactgccccacctgggtatccatcacatatacaaccaccaaacccagacactattgcatatgccagaaagactttgctgaccggaccctgatatagctgtctcttgtgaggctatgccaatgcctgacacacacagaagtggatgttcatagtcatctattagatggaacacaggacccccaatggaggagctagataaagtacccaaggagctgaaggagtctgaaatcctataggtggaacaacaatatgaactaaccagtacccacagagttgtgtctctagctgcatatgtagcagaagatggcctactcggccatcaatgggaagagaggcccctgggtcttgcaaactttatatgccccagtacagggtaatgccagggccaagaagtgggagtgggtgggtaggggagcagggcggggagagggtataggggactttcgggatagcatttgaaatgtaaatgaagaaaatatctaataaaaatgggggaaaaaaggtctcaaaactaaagacaaaataggattagaaaatagggcttcaatgcagacaatagagctgtagtaattacatggttacaaggtgcagccaagagctggggcaactgatttctttctttccaaactatgtgttccagttaggagccgactgtttgggttaatctcctgattgctttgcttatgcttaggattcaggatgagctacaggaccccttggttcctccgtttcctcatctgacagtgtactggatggtaacccatgtccttaattttttgagattacataaattaacatatgggaaacaagggtgtctatagcccatccatttagccaagtgcttgcaagctctatcacaatgtatctgatgctttgatacactgtcatctcctggctagtcctctattcacttaagaaagaattgaatagacagggacacagttcaactttcggattctcattcactcaggcctggagataccctccacagacattgattaaatctgcctcatccagatggggaatacacagcatgaacagcctcagctgggcccttccattgtagtgccaaggaagtgtttgatcctcaaaaaaaatagacaggagccaatct

SEQ ID NO: 1163 - DNA, 1340 bp, Mus musculus
atggtggattgcccacggtatagtctatctggcgtggctgcctccttcctcttcgtcctgctgactataaagcacccagatgacttcagagtggtcggtcctaacctcccaatcctggctaaagtcggggaagatgccctgctaacgtgtcagctcctccccaagaggaccacggcacacatggaggtgaggtggtaccgctccgaccctgacatgccagtgattatgtaccgggatggagctgaggtgactgggctaccgatggaggggtacggaggccgggcagagtggatggaggacagcactgaagagggcagtgtggctctgaagattcgccaggtccagccaagtgacgatggccagtactggtgccgcttccaggagggggactactggagagagacaagcgtgctactccaagtggctggatcttccccaaatatccatgtggagggacttggagaaggagaggtccaacttgtatgcacgtcccgaggctggttccctgagcctgaggtgcactgggaaggcatctggggagaaaagttgatgagtttctctgagaatcatgtgccaggtgaagatgggctattctatgtggaagacacactgatggtcaggaatgacagtgtagagaccatttcctgcttcatctacagccatggcctcagagagacccaggaggccaccatcgctctgtcagcttccgttagcgtaatcggacattcccagcccagccctgttcaagtcggagagaacatagaattaacttgtcacctctcacctcaaacggatgctcagaacttagaggtgaggtggctccgatcccgctattaccctgcagtccacgtgtatgcaaatggcacccacgtggctggagagcagatggtagaatacaaagggaggacttcattggtgactgatgccatccacgagggaaaactgaccctgcaaattcacaatgccagaacttcggatgaagggcagtaccggtgcctttttggaaaagatggtgtctaccaggaggcccgtgtggatgtgcaggtgatggcggtgggttccaccccacggatcaccagggaggtcttgaaagatggaggcatgcagctgaggtgtacgtctgatgggtggttcccacggccccatgtgcagtggagggacagagatggaaagacaatgccatcgttttccgaggcctttcagcaagggagccaggagctgttccaggtggagacacttctgctggtcacaaacggctccatggtgaatgtgacctgctccatcagcctccctctgggccaggagaaaacagcccgtttccctctctcaggttggtgact

SEQ ID NO: 1164 - protein, 443 aa, Mus musculus
MVDCPRYSLSGVAASFLFVLLTIKHPDDFRVVGPNLPILAKVGEDALLTCQLLPKRTTAHMEVRWYRSDPDMPVIMYRDGAEVTGLPMEGYGGRAEWMEDSTEEGSVKIRQVQPSDDGQYWCRFQEGDYWRETSVLLQVAGSSPNIHVEGLGEGEVQLVCTSRGWFPEPEVHWEGIWGEKLMSFSENHVPGEDGLFYVEDTLMVRNDSVETISCFIYSHGLRETQEATIALSASVSVIGHSQPSPVQVGENIELTCHLSPQTDAQNLEVRWLRSRYYPAVHVYANGTHVAGEQMVEYKGRTSLVTDAIHEGKLTLQIHNARTSDEGQYRCLFGKDGVYQEARVDVQVMAVGSTPRITREVLKDGGMQLRCTSDGWFPRPHVQWRDRDGKTMPSFSEAFQQGSQELFQVETLLLVTNGSMVNVTCSISLPLGQEKTARFPLSGW

SEQ ID NO: 1165 - DNA, 33120 bp, Homo sapiens
cattcttcttccactcttcacagatcaggctacagtccacatctttaactgaactccttgtcactgacatgtgttagctccatgttgccaaatccaatggtcatctctaggatgtcattttattcatcatatcagaagcattttatgtagttaaccactactgcatcattgatgtattttcttgacttgttactaaacctcactgtcttgagattctcatcacacgagaataacagccagatctcagcctgccttgccaagtctcccatcttcccaacctctaaatgactgagggcccaggactcatctcttgcatttgtttcctatgcatcttcattccagaatctcccatggattcccacaactaagcacaattctttgttgaagtttctctaacttacattactagccttgacatgttgcccatagctttgaagcatgacttgaaaccaagctttgcatatttcttctgtcctttttcaaataagttttggctattgtagatcctttgtattttcatataaattttagaattgtctattgccacaaagaaacccagtgggaatattgatcaagatcgtgttgagaactgttatttcaaaaatatcaattcttcccaaatcaaaatatattatatctctttacacatttagaattttatcagtttctctcatcagtattttatagtttcacatcacacatctttcggttcagtttatgtctaagtattttatgtttttattgctgtcataatgaagtgatttttaaattttatatatgatattctgctgtggtgtatagaattacaatttgtttttgtattttaccattgttaaattcacacattctaggcattttcaatagctctcttagggttttatatataagcaatcaagctttccaggctgtaatgtttactgtttgccaaaaggagtctgaaattatgtgaaatctgctaggcttaaactaatttttaaaataataaaagttgaaagaaaaatccaggtcaatttaaaaaataaagaatattttaaaaatagtttcccatgcccaattttatgttaaaatacaaccagacatagttaaatgttttatatatggtcatgaaactaaattgtccccaattattttcatattccagttcatatcaatttcaatggctaggctatcctttggggtatagttttcctttcatcctgctaacccattaattatccttttctacgtgtccacaaatgtcagaggtgtttgagccggagcaactccatcttgaataggggctgggtacaatgaggctgagagctactgggctgcattcccaggaggttaaggcactttcagtcacaggatgagataggaggtctgcacaggatacaggtcatgaagaccttgctgataaaacaggttgcagttaagaaacgggccaaaacccaccaaaaccaacatggccacaagagtgacctctggtcatcctcactgctcattatatgctaattataaagtattagcatgctaaaagacactcccaccagcgccatgacagtttacagatgccatggcaacatccaaaattaccctatatggtctaaaaaggagagaagcccttagtccaggaattgcccaccaccttcccggaaaactcatgagtaatccaccccttatttagcttgtaatcaagaaatgctaaacctacatgaagtatgaacgattccttacattccattccatgcaccacatcctccctgaagattgtcttgattccttcatagttattgaattattataatattagtgcctatgttctctactctcaaaagtgcaaatgacattaataactgaacttataatattttctgctttgctaccttaagaatgagtgcctggtattgcgacgtgattacaacgaatttaagacaatgaagcagtcctctctccctatctccctcatatcctctctggctctctctctctctctgtccttctctcctcctctctttcccccgcattctcccagggtggttcagtggcagaattctgctgggacctttaagagagagaagcatattcagcagcagcagcagttttcctattcctgcccccatccgcggctttgaactgagtttaccacgaaatacaaaaacacaattttagaaagaaagatattggcagttaagatttgggaagtttctaaatgggactctcagtccttcccgccactctgaaatcgcggtgcagtagtaaaatcttggaggcggttcttgaacaaacctgtcatctactggccatgtgtggaactgcaacagcccggtggggaatgcacttcgcagagatggagatcctctcagaggccccaagaggaccaagtaaaagaacccaggatgaatggcaggctggatgggtgcaaatgcaggaggcttagtagatcggtatgattttctttgccttctttctcccaatatttggaagggtcccctatttccagtgtgagacatgcccggatatctctgtgagtgcagcttctttggggtcctgggaggagtgtgatggtattaacacattctgtacaccctctccccgcaattccccaagggggcatctgcattagttttggagtcaactgaggtgggcttcaccgaagcttacatctcttcctgggaactttagtcttataggctcccacctgcagtagaatcaattttaggtaatttcatcattttcaaaaaataatagatgatcattgtgattgtcttaaacttctgtaactctttcataaaagtaaatttaaaagtaaaaatttattttattttattttattttatttattttttgagacagagtctcactctgttgcccaggctggagtgcaatggcgcaatttcagctcactgcaacctccgcctcccaggttcaagtgattctcctaccttagcctctggagtagctgggattacaggcgtgcaccaccacgcccagctaatttttgtatttttagtaaaaacggggtttcaccatgttgcccaggctggtctcaaactcctgacctcaggtgattcacatgcctcggcctcccaaagtgctgaaattacaggtgtgagccaccacacccaacctaaattttttaaaattaaaagttttagaggaactggtttgtcagacactttttgtaaagtatatgacagccatgtatgtaaagagctcaacttagactgtaggtcagccagaactaagaatacctcagtcctccatccctaaatgtttgggcattttcctattcagaagttctactgcctgcccttcctcctttcttctcttttctttcttttcttcttttttcttttcttttctttccctccctccttcctcccccctccctcccttcctccctttcttcctttcttctttccttctttccttctttttgccaatcaagaaaaatggccagaggtgcagattgaaccgtggccacgctgtgaggaaaggcctccgtcctgtgagcaccaccctcccctcactggcctcgggaatcccaggccccccactcacatctgggggaggagtcgcagggcttctgcaggtgctctctctcctccagtcagtcagcaaaccgaggggactgtggaggacaagccactgtgcctccaggagatgagagctgctgatttttctttcctttccctgaggaaacgatacctgtataagtctcactgctgggagactccacaaagtaatcatctttctggtgagttgatctaagagctctcaaaacatctttcaaccaggtccccaagaaacagctgatggcgtcgcctgaacttctccatattcatagcaacactttcctgacatttcttggattgaccttgatttcttatcttcatttctaatctcctctatttttctatccaccttctttccaagaccttccattcccagtaatgacacctaatagctatatagggattttgtatcatgattatattcttactttatccttacaacgatactttaatgtgagccacccacatactatccctgtgtaaaaactaagaaaattgagacccctggaaagaacagacttacccaaagtaaagcttgcccaaatgtatagcaaagctagaatgaaaatctcagtcagcctaaactcagggcttcttttgtcgtctagtggctgagggagttatgaatgtgggtcacaggtgaccgccgcatttgaagaagagtctgtaagtgaatcgacttgcggaacatccttgaagccgacagtgagcccgtctctgctgccctctggtggccaggcagatccatgactcccctctcctgttcctcctgccctcgccggatgcttgtttttccctctcctcagttctagcagcttatgccttgttttcccgcttctcctggaggtggactctagtcagaatgcagagattgtgactcctttttttctctcccacacaccaacatcttcctgcacaaaatggcctcccataatatgtagcataatttaggacacagttctcagcacaggcagacctctgagaaagtgtatgcagatgatttgtgagaacacacacacgcgagtgtaaacggagcttctttacgcggtgagttggcgctgatgtgactgaccataaaaaattcaaataattgcagcatttggtaccatagagatgatactacagaatgcatgcaatgagcggcatcttttcacacattcaggtgtataaagtaaatttctatattttcctattacggattttaatttgtatgccaagcattatgatgtcttctgacagaggagttcatctggtaatttccagataaattcagtggctttcacacaattaatttaatagcagcctcttcttcacccgccgtgtgatttctaagttctgaggtgggaggtggtgcagggctggtgtagaagtctctcctcacatttgcatcatcagctcccacaatatgtcactatcccatcgtgtttcctggtcgtcactgtccttcccacagtggtgacgatcactgttatgtccttgatgccactctcctcttgctggaacattccatcccagcattttaggcagcaaactttcatcccactgttggagccttccagagtctgccacttcttgccttggagaacttttcctttgctgccactctgagagggacatctgtgggcatcgctaccattctgggaaccggaggtgaagtggggttcattcccctctactccaattgagagagaaccagggtaaagagaccctcctatcctcgtccatgtttaattgtttctcttctctccaaatctctcatcctctacagtgaggggagggtctttgtctagactgaaggatggagggggaaacccttacattaagaatcgtaaccgtaagtcaggggacccaattatgggctgctcataacgggagggaaagaaacttaaggaaaaaatcggctcaaaccttgtaacatcataatgctgcatatgcttttattattacattgacatgaaaatctgcaattaaattaaaaattgttctggagaactcttgaaatcctgagactatatctgagaccccctctagctcaaggaacacagacttaaggggaacgtaaaggaaaatctggcagaaacaaaaacacacacaaaatatgcctatcattatactcttcatgcccaaatattatgctgagaaggttattacatttctttggtaaacatctgagagtaattaaaccttttattactcagcaaagggagataaagtacctgagtaaaaagagcaataaagtagcccacaagggaccttggcccagagctctgatcctggagagggcagttcctttctctgggtctctgttttctcatcagtggaatgagggatggcacgtttgatattcagttttgcttccaactccagcccgatgagtgccatgctctggtggagacttggcactagttgggaatctttgatgtgtggcaaggtggagggaagggtggatggcacccgctgatgtgtgggacggtggggtctgtgtgaggacctaactggggggttgcagatgaggcctccatgaaggccttggctttctggggaaggtgagaattgccagtgtcatgattttgtgtgcacgtctgcagaattcacaactgaacccagccaaagtccacttgtccccggagtttcactgttgagaggattatagctgttaggaggtgaatgtgctattctgattttcggaatgcaatctcattttcacagggcctccgggatttggctctgccttcaactggggtgagacggcttaaatcctccttcacccaaagtcctggaggaggcctccacactctctggctctcccacactctctggctctctggtgtgtctttgatcagcacaccccagggctctgacctgtttctgaccacctgctatgtggatgaagatacatctggggccaagtgagaagacccagtagcaccaggtttcgccccaaaggagagagggagacacgtgagtggtttggattccctggtgaaggatggccacgggaagctggggacattgtctcagattacagagtaggacatacggacggaatcaatgtcctttagggaaatgctgccacctgttacactgcctcccacttatatttatatcccactgtgcagtcttcaaagtgcgatcgtagcccatttgaccctcacagtgttctcgtgaagcaggctgagtgaggaagaagcacgaaattaaaaacaagaaaaccaggatcacattttcatttgtcatggatgatgtggggcatgtgtccctgagccttaacgtcttcttctgtcacatggtcatgacacagcttggaaaacgttaggatgattgtctccaccacacagcagagaaaatacaggctcaagaaagtaaagaaagatgtccaaggtcacacacacacacacacaaaaacccaattcactttgtctcctagaaatcttattttagctttctctataaaaatgtattaacatatgataaactatagctgtttttaatgtctacatagatacataagctttcgacttcgtgaactaagttaatttattcttaccagtcagttactatggctgcttggcattttgaggagcaacatttgaggcttttactgaaaaaagttctaatgacccatgatacgtagtaatttgcaattttctttgatatgagttttagcagtgcaggataggccttgaaattcagaattgttcatcatctaatgcctaaacataagctaccacttattattacaatttaacacttaaactttatccagaaaattaaattaaattaaacatgggtttttgagaatttgatgatacatttgcatattagatcatatatcttgacaacaccaaaatttactatatttaataggaacagcagtttcagaagattcttgcattacatccaaatagtaaaacggaggggtcaaaagcttatcattttaaaaggtttttacttaaagatggcaatttaagtctagttatctattttcaaaaaatgtgccaaagcttttcagcatcctgacagcaaaccctgtggcagggcatttcctcggcaccaccggccttctgggctggatgactctttgttgtgggggctgccacgtgcctcatagaatgtttagcaacacccctggtttctactcaatatatgtcccctcccccagtcgtgacaactgaaaatgttcccagacattgccaaatgtcctctaagggcaaaacagcctctttccccattaagaaccctggtccaaggtggttatcctccctgatatattctctcacaatctatctgagcactggagatggattctcccaacattcttcgaaagcttcattgatttgagcaatttttttgagagttcacttgtagattttccctcccaccgctttgacatgaaagacctacaggaacacaagcctctgaagtggtctgtagcaagtgtgagttcattttagttcacacggctgagaaatcatgcttggtatggatgttgtggggctttctttactcttacttggtggaaaaaaatgttcctgcttttcacaaaaggagtcaagggaggcatcagcaacacccttcagtctaaggggaggtgactggtaagtttcaggtggcaaggtgctcatggtctgcactgtcttctaacacccaaccccattttcacataaatatcatactgcccttttcgatctaggtattgtgaatgggctcatataagtttccttaaagatatcttatatgaaagtacatattttttataaagcaaatgggcaatatttgtgtaacaacaatctcctgactcatttgattgttaaatctccatttcagaatgttgatttttacccctgtcccataaaatcttactagcagtagtttcttggaaagggggaaactgtaattgacttgacattgctcctgagctggtttctctactttgtgtgaagcaagttttctttcaataaaatacttgacacatcacatataataagtcttagacttctttcactctgaagtttgtatttttcaatggtaaaactagccttctatccttgtcctggtaagttttaaagtttttagctgtgtgaagtatttttgttcagctgggacagtggggttgctgggtttgccagtttctgccagttgggctttttgtttttttaattcattcgtgtttttaagtctattctaaaaggccacttacagatattttcccgactatctttctactactctttctttcactttccacggcatctctgtgtcccgggttctctgagcgctagcactgaatgttggctttctggctgcagtgtggagacgcagagccttcctgccctttcctccatgtgtagaaaacagtggtaaagaaaggctttgcaggaggagttgggaggaggacaggaaaaaatatttgaatcttgctctataagttttgcaagctcacaacagatgaacctaaggagttttgtttgctttggtttggtttggggtttttttaatattattgttcctttacctcaagtgttttttcatttcagtcacaagacttccttacacctaaaaaattgcttaaaatattgtctcatgaaattagggttgttgaggcaggaataatttcataaagttctattggaaggcaaatgtcaggactgatgtaggaagacacaccaacgaagttgagggtggtccaaagtctgttacaagttggaaggcttttgtaaggaagttcaggcagaaagaaaggggctcttcatattggagttgtcttttttcactggagggtacaatacagaggttacaatcattggacacagatgacaatatatagactaaaatatttcatgcacaaaacaatcagtaaaactttatgattcagaaacaaatccatatccttttcgatgtcaggaggttacatattaatcactacatcaaattagctcagaagctacattgaagccgaactacatcaatgtatgggtgtatgagcagatcgggttataggttacagaggtattcttcaatcagacgttatcttatgtgtaggaaaaggcaaggactattattccttatcttttaaggagtagagtgactcaggcaagagagatgggaggccgtgtgctcaatcttgttttgtctttgaagcatctttctggagaactgcaggtcatcacagcaggggctttgtgaaagtatgctagcaagccgaaatgagcaagcaaggcttcttacatttgctacattgtctcacaatataacacgttaggtaaagggttggatgtgatcagtaattgcagagaaatggagccaagcccatttcactgactgtgcaggggttgatgtggattctctgctaagactgcataaccaatggaagccatggagtgtgccgggtgtgtcacagcctcacttaggcacagcgtttccttgtctttgttccagggaggatggtggattttccaggctacaatctgtctggtgcagtcgcctccttcctattcatcctgctgacaatgaagcagtcaggtaggattcccttctccctttactgtatagtctaatgtcccagtgagctagtctgggtccaaaggtcgagaacaacatctaagagtgtaagtctggggccaagccacctgtatccaaaaaggaactcctcacttttgaggagctcctccactcccaggagctcctccactcctagctgagtcacctttggaaagttacttgagcacctcataccttagttctttcatctttttaatgagaataacagcagtaactacatctcagaggccagcacaggctttaggattaaatgagacattaaaagcacttgaatcagtggttgcaccacgttaaattattaattcactctagtactttggggtcaagaaatgcagctgcttcttatcataaattaagctgcaattaaaaaaaatacttggaaataagaaattagaagaaagggactttggaaatctcactagctgaattttgacgtcaaaatgttgcaccttgaaaaataattatttaaaaattcagtgtcaaaaaaaaaaaatcagtgtcagaaggagatgtcagagccctaaggaaaatgcagcatggcgaagtgggaaaaaacacgacacagagcatcagagggcgcaggctctgcctcggcaccgcagagctggtgtgtctgcctcggtgccgcagagctggtgtgtctgccttggcgctgcagagctggtgtgatgtgatgaagctgctggcttctctgtgcttgtgctgcagctccctaccctgtaacagtcaatctgatggaatgtcttcagttctagcttcatatttagacttcatcaatgaagaatacaagcagatctccacttaggctctttagccaccttttgagcagcatctatttgatacccagcagcagctaagtagggtgaggttcttcctagcaggattggatctgcacagagaaagagcaaatggccccggagcatttagaatgagaaagaacatatcatacatgacataaaatgatcaaacataataacatacataactgttaaacatctcttcaatttgcagataacaaggaagagatcagacatgtcttagaatttgtttggaagacccaaaaatctctagacaaaccagtgtccttaatccagcacaaaatgtccttgtgaaaactgcattgtacatagtcccagtaattggcctcctgccaactccagacgggaaaaaaacaaacaaaaaaaaaacaaaaaaaaaacagtttttatatctaagagaagaggaatcctgaaaggctaaaaaaagctaataaatggatttattatctaaacttcaggaaaataaaatgttaataacaagaataaggtttccaatttaaaaagtcaatttacatgagaataaatgactcaaggaataaataatttacttgagaataaaaacaacccaggtatgctggtattaatatcttgaagatgaagaaattaggacttcaaatctcaaaatcttaccaagagtaatagatttgccaccgaatcacatagctggtaggtgacagacagcaacctcacccacatttttgaactgcatttgttttcagtacacaaaattgactctgtaacaaacagatgtgcaaatcatcatgctggatttctctaaaacattaaacatatatctctccctcttctagttgcctccattttgacaggctggacaccccaaagcatgcatatgattttctgattggcatttcctcgttcctctttttcacttattttatagaagactttagagtcattggccctgctcatcctatcctggccggggttggggaagatgccctgttaacctgccagctactccccaagaggaccacaatgcacgtggaggtgaggtggtaccgctcagagcccagcacacctgtgtttgtgcacagggatggagtggaggtgactgagatgcagatggaggagtacagaggctgggtagagtggatagagaatggcattgcaaagggaaatgtggcactgaagatacacaacatccagccctccgacaatggacaatactggtgccatttccaggatgggaactactgtggagaaacaagcttgctgctcaaagtagcaggtgaatatctggggaaagacacagggtctcaagaggcagagatatattaatttgtggtaagctttgtgacagttgaggaaatccttttgaatcatcaaggtaattcctaatgcttagtcctctaccctgattgatttaaaaataagtggttctggagtcttcaagcttagtgttaaaatattttcccaaatttaatttgcacagttttgactgttcttgaggattatttggaatccatgacatgcagtctttagcaattttgctgagacacacatttgtgctacctaaggctggtgcgcaagagcaaaccaattgctgcatgaatgagcccagctgacgtccggcatctgtatctcagggcattggtttttctctacccaatcccatctatgcagaaactgagacgtgaaaatgttctttccttgtgaaatgccctcagttagaaagctatcaacaagactgaaaaggctaagaatgtcgtgctttggagattgttatatactagtgttcaatgaattggggactcacagatgcttttggacacaccctctgtgaatgggaaggttcttcatattgctgttgtattagctaagcaggaaggagtagggaagaaggggacaactgaagaatggatctgtcttatgaaaagtaaactatcatatgattccctgacagggctaacttctccatgctctaaagagaaaatcaagtaaatccaattactaaggcaaatggggaaaatagttctctggagatgttaacgtctccagctgatactgcttccttctttacttccctggaaggctgtttcctaatacctttttttttcttaacatccattactgttactgtgttcaaggtgattcaaaatggatggaggaatacatatatttctgacatggggggacagggaacgtactgatgtatttcaatatcaggaacatttacaaataagtcacacattttctaagggtccaagggaagggagtggatctctcttttaccagcaagtgattaagacagaattcccatttatggaaaatatagtccccttagtttgggtgtgggagtttcacgttaaatagagaaaaaaaatccatgatttcataaactgttgtaaactaggatttctcaaaaccatcttacccattgaatagaatatttagctacaaataacgcctcgtggagattcgcatttcacatgctcccgtttatccacttgcttccgaagatcacagccaccagcaaaagatgcaggaagaacaggcccctggggagtgatttctgactttgtgttaaatcttcaatcaaattggagttcaagacatcatctaaaataccagacaatgtgcccaatacagataattttaagatgaaaaaggcagagttcatggcacagaggaattaatgaataaattacagctcatctctgtttgcagtgctagaggcgttgcaaaatgtcatgatgtcccccttctccgattcccctttctggatctggagaaaagtactggtcagatgctaaaatgtaaagacccagactggggaacaaataaagtgtatctgaactcacatttgaatggggagactgaggtcgactttctgctcctcagactcctgaactccggccacctccctgtgagcaacgtcactgggatctcagcctctgtgatttctgcctctgtgggctctgggtgtcagagctgtggcttccctctgcaggtctggggtctgcccctagcatccacatggagggacctggggagagtggagtccagcttgtgtgcactgcaaggggctggttcccagagccccaggtgtattgggaagacatccggggagagaagctgctggccgtgtctgagcatcgcatccaagataaagatggcctgttctatgcggaagccaccctggtggtcaggaacgcctctgcagagtctgtgtcctgcttggtccacaaccccgtcctcactgaggagaaggggtcggtcatcagcctcccaggtcagtgctctgcctctaggacccacatgctcagatcagcaggagaggtcccagggactgcaccatagcacctcgtatttttatcaagagacattatctatcatatagcaatatgtattgaaagccataaaacatttatgactggaaatatacgcactacattttacttgaatagctgttatggcgcctgcgttatttttgagttctacctttccttcttctgcattgattgtttttactcacaagtattcattgcattgtaaagaaaataaagctatatttcttcaactgaaatgttttcctatgctgtcttgtgctgattacttctagaaatctatcatatgaagataatcagagatgtagacaactatttgcataatagaatattaattatggccttatttataaatagcagcaaaaacaaccaaccccccaatacaacagtacagtgtggaatcttgtcttactatacattatagcattaataaaaagatatttttaaataattttaatggttgaaaaaaatcctcatgatgcactattcaatgataaacatgacatctacctataaattgacatttccaatcacataaaagttactggccttaaataacttataactgcactaaaactttcaggataccctccacatttggatataagtatacagttattcatataaatggatagattaaaaaaactttaaagttaatgttacattttaattttaaatgaagctgattgtatattacatataattcgtctctctactttgtaatttaggtgatactgtttatgtccatataattttgtactttctgtgtatctataaaaggaacatatgttattttcatgctgatagctaagtatttatgctgtaaatatcagaagaaaccaacagaatcatggggagatagaagtgacagcatttttgttgtgcagagaaaaggaaaaaaagctgtatcattgggtaatctgtgggaaagaatcagtatttttctgcatttcatttttttaatgaattgagcttccctatataatgtataaattgctttcttttttaaaaaatagtttctctcctttcccttacaccaaattccttaatatgttattcttgttctttttccagagaaactccagactgagctgggtaagtacgaggtgctggcacacacctgtggagggagcctctgccctccccagcagagggaggggagctaccacgagaccatgtgacccagaggaaaaactgaggcacgattttaccaggtcctatgttcattaaataccagaggagaccagcaaagtaatggcctcattcaaggaggttgcagctgtgttacctgacactttgggggctcatggagattccagtgagcatcagatggacacctataggaagcatggcatcatctctgttctatgtgttgaggggaaagggagctgcctcagaatgtgtgggggatgacagcagacagctggccggggcctggaggccctttgaaaacatttcaagtgtgaacaagggcagcatcattatgacaacctgggttgcacccagcacctccctgctcaactctgctatggggtcctgcacctgctcctcaccccagtacacccctaagctaatcactattgggagggagctgttactttctgagtgcaacctgggatactgtgagtgtagcaattttttttttttttttttttgagacggagtcttgctctgtcgcccaggctggagtgcagtggcgcgatcttggctcactgcaagctccgcctcccaggttcaggccattctcctgcctcagcctcccaagtagctgggactacaggcaaccgccaccacgcccggctaattttttgtatttttagtagagacgagatttcaccgtgttagccaggatggtctcgatctcctgatctcgtgatccccccacctcagcctcccaaagtgctgggattacaggcgtgagccaccacgccgggcattttttttttttttgagacggagtctcgctctgttgcccaagctggagtgcaatggcgccatcttggctcactgcaacctccatctcctggattcaagctattctcctgcctcagcctcctgagtaactgggactacaggcatgcgccaccacacccagctaattttttttttttttttttagtagagacggggtttcaccatgttggccaggatggtctcgatctcctgacctcatgatccgccggccttggcctcccaaaggtgctgggattacaggcatgagccactgcacccagcctaatttttgttttttaaatctcggagttggactgagggtattattttgctgcacctgagataagtggtttaaaacataaccagccgatggctgagcccctttgagtttcccctttacctccttactagctccctcctttttatggcctcttctcccagcccaaggcaaccagcctgcctccctgcctaggtgcatagaacgtggatcccttatgtgctctttccatcaattccttgctctccatcaagtcacctgctccaggaatgtgtatccatgtgtgtgctttaggtgagcttaagcacacctttcagcccacaaaagagtttttgaggaaaatcagggtaacaaacacaacccaatctctaccagagtctactatggcaccttcaaccccattaggccataaacataaagggaagggtccctggaaggcgcaaagtaactccacaatctgaggagagacacacacctgtgtatcttacccttctgagatcaggaagtaaagccagtgtttggggcaggttgacacaagtctgtctctcaagaaggttttaggagaagagtcactcctctgagttctctgagacccactggagacccagcacacacaatacgaccccatgtcctgttgttcctaagtcatggtaacctccggggccacaattaaccaacacggaaagatggagcttccctttgcttcctgtcaggtgggagaggagggctctgggcacggaagctttgcaggtgagctctaatgatgggacacccagctctctatggaagtcctaagactgaaatcactgcttgtagtcttacaaataatgtttttcatttataaaaataatagtttttaaaaatattaattgtatgccaggcacgatgctgaatatgttatgggaattatttcattttttcttacaataattataaagtttaattgctttatcctcatattacagctaagaaacaatcttagagacatacatggtttgccaaaaatcaggaagaaatggtgatgtttaccttctaatctacatctatctaacttaacagtgcaagtccttaattacttatgtgtgactttgtcagctcattcatctctatttttctcatctttaaagtgaacaggttgaatttaatctctaatgtagtgtccagttctaagagattagatataacttagcatatttgagaaatgagatagtgcattaattgaatatgctgattgaaagaggattatgtggtatgatgatgagattatcaggtttcaaggaatcagtgtataattcagtgtacttcacgctccagaagggaattaatttttcagtggatattcagaaggcattcagaacatacaaacaataaccaaaacaaaacaaagcaatatatttcagcacaaaattgtctggaaggctgtgtacaaaaccgtatagaaaaaggaggttaactactgcatgttcacacttataagggggagctgattggtgagaacacatggatgcatggcagggaacaacacacactggacacctgttgggggatgggggagggagagcatcaggaagaacagctaatggatgctgggcttaacacctgggtgatgggatgacctgtgcagtaagccaccatggcacatgtttacctatgtaacaaacctgcacatcctgcacatgtaccccggaacttaaaattgaaagaaaaaaaaagtgggttaggcatagtggctcccaaggagcttgtattctagtagaacatcaattattaacaaacagggctgcatgatttttttagcactttaaactttagttttacttggattctggacaaaaggagttttgtctgtatctgtaatgcatcaaattaattgaatctccatacttacattttgcttccttcagtctccattgaagtcaattttagctcttaattacctatgtcaggcagggcaagccagtttaagatctaatatgtgcacaggtcacacacggacagggaataaaatcctcatatggataaaggagatgaggaaacagtctgttttattaagtaatttaccgtaagccatgtggatgcagaaacagccccaaactaatccctagtccattttttctgattcttgtcttcagactttaatagatacataggagaggaaaataatattgttttaggtaaaattacaggacaaagcaaacaaaatgctggaaataactgggagtcaactgttacctggaatggaaggtaataatctgaaaattcaaattgtgttgacagggactttcctctctacaaaggtagctggcagttttcggccaatgacataatgggatgttaacgcctttggccagtgactctatgcagagaaccaacaattttatgcttgtgtttctattataaatgatcacaccttatgcaaaaccattcttatcatttaacagaaaaggacgacacttaatttagaatagagaaaaaatggcacgggcagggcctgatgagaatggaaaatgtaatatagcttgggcccaggaaagccctcagagaacatctttccccactttgcacagtgggagaattagaccccttttttacattcatcattgtttcacaatttgtactttgccgacttccccaattattgatcttaaaatgttaattttaattttcaaaattatttgaggacattcaactggtgtgtgtctataactccacctatgtggagcattggggaaataaaatatagcggctggaccagacttacaaggtactataaagtccacctagaggaaagcttcttcaaatatcattaccaaaagtccacatgagacacgtttttaaacccctccctattaccacgtcagagggtggggatggctccaacgccttcaagtctcacaggtctgtgcacctctgctcacgctgcagggtcttccaggcacttaatgcaaactattttgttcaactctgaaacattatgattttggtagttgtatagcaaatttacagtttaagaaactgaggcattaagaagtagtttaagacagattaagaagtagtttaaaatcatacagaattgaagtgttagaagaaaaactttagacagactaaatttagcagagtctaactgagaaaaggatgactcataaacaagccatccctcagaatcagaacggtttcagagaattcaaagcagcaatttggtcagacagcatttatggacagaaaatggaaatgaggtacagaaaacagaagtgaggtacagagacagctctattggttgcagcctggcgtttgccgatttgaacagggtttcaacagttggctgcctgcaactaacagaagtgcagcagctgctactcagctatttattacaaaagtgtactcctaagttagccttagctcctaagttaggcttattcataaaataattttgcaattaaaactctcagaataaaatgagcaatttataaatttggccccaggatgcctctgtacctgagtgcttatgtaacaaactgcaacctaagttaggctttcagtagttgacgtactaagttaaattgcagtttgttacataaggagtcaggtacagaggcatctggggccaaatttataaactgttcactttattctgggtgttttttgtttgtttgtttttaaagtctcgctttgtcacccagcctggagtgcagtggcatgatctcagctcactgcaacctctgcctcccgggttcgagcaattcttccacctcagcctcctgagtagctgggattacaggcacccaccatcatgcccgactaatttttgtatttctgtagagacggggtttcaccatgttggccaggctggtcttgaactcctgacctctggtgatccacccgcttcggcctcccaaagtgctgggattatagacttgagccaccacacccagcctatctgggagttttaattgcaaaattattttattattggtctgtaaactgaaaaaaatacaggtagaagcaggtagggattcaattactgttttactcagactgacacacatcatggaatgattcctccttaaagaagagcaacctctattctgagtccatgaaacccccacctcacctaaggatgaccctgagcctcacagcaaccctgggatgctcatggtttctaaactccaatggagctgttcttagagatgacattattggttccattttgattctttcattgtgttttgtccactctatttaacagcttctttaaaagtgaatggaccttcccagcccatcctcgtcagagtgggagaagatatacagctaacctgttacctgtcccccaaggcgaatgcacagagcatggaggtgaggtgggaccgatcccaccgttaccctgctgtgcatgtgtatatggatggggaccatgtggctggagagcagatggcagagtacagagggaggactgtactggtgagtgacgccattgacgagggcagactgaccctgcagatactcagtgccagaccttcggacgacgggcagtaccgctgcctttttgaaaaagatgatgtctaccaggaggccagtttggatctgaaggtggtaggtaagaattctagatagatattttgtattcaatacctgctcctgccactttaatatgctagttcctggacaatttctctgacatttgaaattttcttaatgcttattcatcatcaaatttatatcaaatcctccagtgtgtgaaactgtcatagttacttaaaatccacaaactcaaatggatgaaatttaattatttgggcatataacttgtatcttttccagtatcttcaaaaattgaccatatctttaaggaaatctgagtatcttactacatattttacaaaaggctcattgtttcacagtgtgttattagaattctgagaaatgcaataaaattctagaaactgtaatcatctgaagactaaactggatccactgtgtaaaccaaaattataaatattgacagttttggcagggacaggggagaaaagatgaaatcactccctgcagcatcatttcccactgtccgtgtgtgtgagaattgaaacgtccaaggttagcagatgccattgagtacatataggcccaagtcttggatatgctacgtgtttctcccacggattttgattctaaattaataaacacgtttagccatgggagcgcatgttgagaagtttcatgagcctcgtattttctgccattggacgtagatatttataaggtttcgatttttgagaatatcctcctactccgtatgttaatcctgtccatgtgacccatgccctggccgaagttattttgttctcagggacagaataaatgttggatttgaacatttaccttacctcttaatcatcccagaatgatttaggaatacaaagaataaaaataagcaaacaaacaaaataagaaaatgctccagccagcctcatccctaagtggagtgcaatcccccttaagcttttctcccttccccaagccctccacatccccttctttcctcccagtgaaattgctgcccactcatccacttgaaaggaccccaggctttggttgctttctctgccccaggtctgggttcttccccactgatcactgtggaggggcaagaagatggagaaatgcagccgatgtgctcttcagatgggtggttcccacagccccacgtgccatggagggacatggaaggaaagacgataccatcatcttcccaggccctgactcaaggcagccacgggctgttccacgtgcagacattgctaagggtcacaaacatctccgctgtggacgtcacttgttccatcagcatcccctttttgggcgaggagaaaatcgcaactttttctctctcaggttggtgattccttatgttccttcaggtttggaaaataaatatgaagaccaactcagacttactcattgtattgctcttcttcctttgtgatttttatttgctgctctctgacgaggtctcctgctatcctctgcaaagctggttttcaggacacccagggattctactcctctgagtttctctctgacaccctcaactagcgccctgcaattatttttatcattggatacacactaaattctcgtaattgaccctgttttcactctctctctttaaattctcttcttctgatgtgaaaacaattaaattacagaactttgtgttttccccctcatggaggattttcttctggattagaaactgatttttattaataccatcttcatggttgcggcttgagtaattttatcctttcctcctcaagtcattccagtgattgtgtgatatagttggaagagagaagggaaaacttgtctgtgcatgtgtacatttctgagacgagcaaacatgaaatacttgcattctctcctctgcatctccagagcagggaggagcaggccaactgcttcctgggaggccaaattctctcccttctctccagcctagaagctgctcagatgaaaagtacaatcttaatattgtcccagtttcacagtttcaagggattcttgggtttccattttagagtccaggatgacgtttttgtggaaaacactgcttgtttggggattgcttcttgctgtggctgtaggcctgcccaggaagaggagctgaaaagaggtaagtcagggaaacagaaacagcggagcacactgcagtgggaaccgtactgcgtacttccccgagcctcccttttcacaagtcacctatgggaggcagtcagtgaatatccagtaactaaggaaacatgagaaacaggaaagcccagggcttatcatgcaatccaggctcagtgatgcatgaggtcagtgtttccacttgtaatagaagcaaaatgattaaaagataatgatttgatttcctgctgcccattccccagtgatctggttagggaagaagaagaaaaaagtgagtagtacagccatccttgttttcaaggctgagagctgaggttcactgagatttgttggcgtgaacaatttcctatgatctttaaaaatgtggtgacctacttgttggtgatttctgtgttgctggtgacttctcatgtgttagggaggctgttttgtgtgctctagaaagtgcttccactttaaatttcttatgtccgtgaaacacttgtcttcctgtttggctgttaatagaatgaaattatattgattaattatcagaatggattctctttctttacagtgaatgtgacattggcttcaaacacagctcacctgagactgatttcttctgaacagaacaagcgtgtgatccatggacattcaggcagccagatatcccacagagatctgactatctgctctatgggccagagggaactcctgtcagggagctggtactgagaggtggagactgggaacagggcgcgatgggtcccggaggttgccaagcacatgttgcaaagaaagagtcatctctgtgtcacctgacagtgagttttaggcaatggattgcaaaagaaatgagttctgggccatcccctctcttccaagccccatccccttgaaggtggcccctgaacaagtcagaatccccctgaccgtgcctctgaatacctctcctcttataacatgattggcaagtgccctatctacaccttccccaaaacttccttctctgggactctgcaccccgcttcattctttggttccctaatgtaggttctctggacattttttctgtacccacaagaacatctccaacgtatcaggaaaataacaatctgggattctggaaaccagaatgatattctgagtcctgatcatttctcatttctctaactgcttgaagggggctgccatgatcattgaagtactaactcaaggtgttttaattctactcaggaaaatctgctggagactgatcttttcagagacctatcctgttccaggttctctgagatccggcctatcaatcacaatctgacatctgataatcaaggacccttagaaaatcccatgggaaatacaatttagcctacaggaagaaatgaaaggaataatcaaggatttggtcagtttcttttttttttttttttcttttcttttttttttttttttttttttacaaagtctcactctgtcacccaggctggagtgcagtggcatgatctcagctgactgcaacctctgcctcccgggttcaagcaattctcttgcctcagtctcatgagtagctgggattacaggcatgtgccaccatgcccagcctatttttgtatttttagtagagatggggtttcactttgttggccaggctggtctcaaacttctggcctcaaatgatccactcgcctcggcctcccaaagtgctggaattacaggcatgagccaccacacctggcctgatcagtttatttaagatggtgacaattaattgtccacataggtggaactgagaaaataaaaaatatatatatacagttaaaaaaaagtgaaagaaaatacagctgcataagggggagaaaaatctgatcactaaaatataatcttgaaaatcttatgaagtgttgtaaaatccctcctccagactttttgagaaagttgatacaggaaattgagtcaggaaaaaaattttagactttccgatccaagcgaaaaattatgtatcatctatacgaacatgtcaattttattgttagagcaaaataaagtgcacaatttaaaattaataattataaaataaacaaatataagcagtacatgtaacacagtaaaaatattttaaagttataatgagttcaagaagataaactatatgtggaagacagaagaatgtcaacaagacttttggaaagaatgttatgaagtgagaagacgaggacctgctagtgacgctctgctgctctccaggatggcagacgtcagaggcatcgcggtcccatgcggatcactcatgaacagcactctgaacttgctcttctgggccatcatttttttttctatttttaaactcataaatttaaacacataaatgttagaaactacacattattcttccacaaatgtttacacattaattttaataaacatttttttcaattgtggtaaaatacataacataaaataaaaccctttaaccattttaaagtgtacagttctgtggtattgtatatgtgacattgctgtgtgaccatcatcatcactttctagttccagaatattttcatcgccctaaacgaaacttcatacccattaagcagttactacccatttttcaccccctactccccaggtaatctactttctgtccctatgaacttttctattctgaatattttatataaatggaaccataaactatctgtgtatgtgtatgtgtatgtggcttctttcccttagcctaatatttttagagttcttccatgtcatagcatgtatcagtgcttctttcctttttaaaaaaaaaattaacagacattatttttaagaacagttttagatttataacaaaataaaatggaaaatccagagagctcctagatccctcctctctcccccctatttctgctattattaacatcttacattagtgtggcacatttgttacaacccatgaaagaatagtgacacattattttcaactaaagtccacagttttacattaggttcaccttttgtttatataatctctggagtttaacaaatgatttttacatttacattgatctatctttatatttatgaagacttaaatttattagtaaatatactaggtttacctgaaaatattttaacactattttgatttaatgtaattaaaaataatttattgcacaacatctaaaggttaactattatttttcacttacttttgagtcttccttcctagtgaatgtagctctttgcttgttagtctgtgcttgtgaaggccctatgaatacatatattcactttccagggagaaagtctcaagaaaattggttttatcagtcacattctctcactgtatattagaaaacatactttcctatagcttcccaaattggtgattaatgtactttctgagttccagttccagttagaaaagccacaggaaggagaggggttggtggcgttgaggatgatgccccagtcactggaagtccctgtggctgttgggtgggtaatcgggttggtgcctcaggatacagttccctcccctcctggtgtgtagacagctgggtgtagtcattaaagtggggccactctcagaataaatgtgcagattggctggatctcagtttcagggagaggacaggaggaagccacagagactgaattgttaactccctgacattttcctcctttgtcagtacaatttaacttccatgaggacagtgatttttttccttcttgtctagccccacaacctgtaaaaatgacatacattgattatcaataaacatttgtaaaatgcatgaattgtctcataaagtgatatttattgaatatcttacctgttgaatgtactatgctaaggcctagagatacaatccttaataagacataattcctgccctcaggtctttcttttttgcagtggagtcactctgtttttggaatgtcttattataccttcataaactttactaaaaatgggagtgccagagtagtccagcaataaagaattaattgatgtagccaggtggtgaattcacttttccagaaaggataggctacttggagaccctgcactacttattgatttactcaaagctacaaatgaaaataagatggacactgttatccctgacaggtctaaagctctgagtccaatcaaccatccaccttcacgttttctaccatgtccacctgcagccactgctccccaatctctaagcttagaaggacaaacacccattaaaatgagtaaagaagtgacaagtttaagaatcttgttgtagaaaaaatatgaatttagactctgaaaaagagatagtaaaaactcctcttgaacctcatgctgaatgtcctaagtgtataaaaaagtaaaatgtctaaggctgaacctgttacatttcgtgttctataccacagttccaccccatttgttcctgttttgttgttacccccatgtttagggctcgcatgtccagaaatcccttctcatccaccatgtccatttgattataactattaatattttatcaccatttatttacctctgtcctgccttgattatttcttgatgaaatgtgtaagcctccctttagggtcagtgaaattaggactaggctctggcttgattcttcctggcttcgaatactgtctttgccacttagtgtgtgacgtgaaatttcaccaaggagatacatctacaggacagattgttagaggcacttgtggtttacagatctgcaaatactgtagaagaaaaactaaggggatctcttccatcatcaggaagaaagggttcatttaacagaagaagctcggccaggtgcggtggctcacgcctgtaatcccaacactttctgaggacaaggcgggtggatcacaaggtaaagagatggagaccatctgggccaacacggtgaaaccctctctcttatactaaaaatacaaaaattgtggtttccaggttcatccatgtccctacaaaggatatgaactcatccttttttatggctgcgtgggaattgaacaatgagaacacctggacacagggcggggaacatcacacaccagggtctgtcgtggggtgggaggagcggggagggatagcattaggagaaatacctaatttaaatgatgagttgatgggtgcagcaaaccaacatggcacatgtatacatgtgtaacaaacctgcacgttgtgcacatgtaccctagaacttaaagtattaaaaaaaatacaaaaattagctgggcgtggtggtacatgcctatagtcccagctactcaggaggctgaggcaggagaatcgcttgaacctgggaggtgcaggttacagtgagcagagatggtgccacagcactccagcctggtgacagagcgagactccgtcaaagaaaaaacaaacaaacaaacaaaaatacacaaacaaacaaaaagcaggagaagctcatattctatatccttgaagacaacttgatgataaacagctggagaagtcttacatgcagcaaggacaagggaaaccctcaacagtgggcagaacaggtcaggaagaaaaagaatgttaatgttagcaatgactcttggtacagatgtttctttatttctactttactgctttctctcctaaagtataaactgcaacattgactcctctttcattcacattctcacataggacacaattctggacttgctgaccagtgagaacttattaaagaaaagggctctttccttccagaaggcttgggctcctcctccaattatttacaattattcatgagccttctccgtcccttgtcaaagtccaagattagcagttgattgtacactagagcctgaagagcaaacacgctgagctattaaaggacttggacagattcctatgcatctccaacagtggtaatggaagtgagaattcactctactgcaatacttcccttcaaacgcctcccctcctccatatttgataacaaaaatagtaagaagagatttccctgtaaatgtagctttaaaattatatacttcaacacacactcagcatgaaaacagatgagaaatccatgaacttgtttggagttttcttgtgagaaatagttgctgcccacaaagagactgtatttccccaatagcagcaccggaggaaatctccctggacattttccagttctctcacttcactttctgcctcttcctctttgacagaaagtgaaatcacacctagtgaaactgacctactcaccatccaaggacagctttcctggtgaatgtacctagaagatgctccagtggagacagcagaggtgccaacacttcgctgcttattatgctaatagaacattagcttcctgggcaacatctctatcacaactcgttaaagaagttacaggggtaactggaaaagaatcaggacaattttcatgatgatctaagcagaaggtcacagatgtgccagcactctgaaggctagaataaggatggaaaatcccacagaaggtgattccagtaagagaatagatgtgggactaatcgacctcgttgtgaaaagacacgtctccagccttgctgtcctggaaaccttctagggggacagggaggctcctgacagagtctctgggcaggaagtgagagccatgacccttccttcttcacatgtcaccatgcagaaattcttctctggactttctacaaaccaccactctctcttcattgtgctgaacaaacacccagagctcatctcgttcctggtccaacttctgtccccattatttacttctacctcccagtaatgtctgtctcccctgtggtaaagtaatgtctcccctgtggtaaacccagaacactgaagatggttttggattccccttgtccttggtgtgtgggggcatcccagttcggggaacattctccgttgaagaagtgtatcttctaccctcagatcggatgaggttgggatgagctgcatctggatccagagaaacagccactgcatgtatagttggaaaaaaaaaaaaaaaaaaggaggaaagctgcaaatactgggaaggcagaatggagaaaaacaagagggagaaaactggaaggttaggtaaaactgtgttccgtcctaggagatacacgatgtgtaagtcctagaaggctagggttgggcaagatcttcagtaaccatctattccagccaggctaggactgtctagccaggatggctgtcacacctgaaagtgttccagggtaaggttttcaggatggggtcctgcctattcttcaaacgcctgttacgttattgcttgttcttaaaattaagtcctatagtatttccagtcatggtgtgtccactttcatttaagcctcttcattttcattttctgtgggtttatgtaataactgggccatccacttctcatacacctttatttctagtgattgaaatcccaggccttgtagtcaaaaagatctgaatcttgataattgctctttctttagtagctctgatcttggtgacgttaccttgcttctttcaggcacacctaactctcataataatgcaaataattatggcattcagcacaggactattgtgagaaataaatgagatagcgtatagggaacttaatactatgacttctctgtgatgaacacttggttcattttagcttccaatatttatagtaacactaatagcagaggtgatagtagcaatagtactaatactggtagtaactaatcttcttttcaaaccaaacatcctcagtaattaaaatttttctcataagaatttgtatttgtaaattagacctctccctctcctctccctctccctctccctctccccctccccctccccctccccctccccctccccctctccctctcttccctctccctctcccctttccacagtctccctctggactgtgctgctgccatctcggctcactgcaacctccctgcctgattctcctgcctcagcctgcccagtgcctgccattgcaggcgcgcgccgccacgcctgacgggttttcgtatttttttggtggagacggagtttcgctgtgttggccgggctggtctccagctcctaaccgcgagtgatccgccagcctcggcctcccgaggtgccgggattgcagacggagtctcgttaacttagtgctcaatggtgcccaggctggagtgcagtggcgtgatctcggctggctacaacctccacctcccagccgcctgccttggccccccaaagtgccgagattgcagcctctgcccggccgctaccccgtctgggaagtgaggtgcgtctctgcctggccgcccatcgtctgggatgtgaggagcccctctgcctggctgcccagtctggaaaatgaggagcgtctctgcccggccgccatcccacctaggaagtgaggagcgcctcttcccggccaccatcccatctaggaagtgaggagcgtctctgcccggccgcccatcgtctgagatgtggggagcgcctctgccccgccgccccgtctgggaggtgaggagcgtctctgcccggccgccccatctgagaagtgaggaacccctccgcccggctgccaccccgtctgggaagtgaggagcgtctccgcccggcagccaccccatccggaagggaggtgggggggtcagccccctcccggccagccaccccgtccgggaggtgaggggcgcctctgcccggccgcccctactgggaagtgaggagcccctctgcccggccagccgccccgtccgggagggaggtgggggggtcagccccccgcccggccagccgccccgtccgggagggaggtgggggagtcagccccccgcctggccagccgctcagtccgggagggaggtgggggggtcagccccccgccaggcgagacgccccgtccgggagggaggtggggggtcagccccccgcccggccagccgccccgtccaggagggaggtgggggggtcagccccccgcccggccagccacccggtccgggagctgaggggcgcctctgcctggccgcccctactgggaagtgaggagcccctctgcccggccagccgccccgtccgggagggaggtgggggggtcagtcccccgcccggccagctgccccatccgggagggaggtggggggtcagccccccgcccggccagccgcgccgtccgggaggtgaggggcgcctctgcccggtcgcccctactgggaagtgaggagcccctctgcccggccaccaccccgtctgggaggtgtacccaacagctcattgagaacgggccatgatgacaatggcggttttgtggaatagaaagaggggaaaggtggggaaaagattgagaaatcggatggttgccgcgtctgtgtagaaagaagtagacatgggagacttttcattttgttctgtactaagaaaaattctgccttgggatcctgttgatctgtgaccttacccccaaccctgtgctctctgagacatgtgctgtgtccactcagggttgaatggattaagggcggtgcaagatgtgctttgttaaacagatgcttgaaggcagcatgctcgttaagagtcatcaccactccctaatctcaagtacccagggacacaaacactgcggaaggccgcagggtcctctgcctaggaaaaccagagacctttgttcacttgtttatctgctgaccttccctccactattgtcctgtgaccctgccaaatccccctctgcgagaaacacccaagaatgatcaattaaaaaaaaaaagaaaaagaaactgcctctgttaggatcaaaggttgagaaagtaaggagaatacagagcttccttccataacggtaggaaggcaccaaatttgaacagagtaaggctcctagtgccactgcctaaaaggattgagatgagtagcataggtaagttctgctccaggcttcagatcacaattctagtaacatagcacagtgagaacatttttattttttctggac

SEQ ID NO: 1166 - DNA, 1431 bp, Homo sapiens
atggtggattttccaggctacaatctgtctggtgcagtcgcctccttcctattcatcctgctgacaatgaagcagtcagaagactttagagtcattggccctgctcatcctatcctggccggggttggggaagatgccctgttaacctgccagctactccccaagaggaccacaatgcacgtggaggtgaggtggtaccgctcagagcccagcacacctgtgtttgtgcacagggatggagtggaggtgactgagatgcagatggaggagtacagaggctgggtagagtggatagagaatggcattgcaaagggaaatgtggcactgaagatacacaacatccagccctccgacaatggacaatactggtgccatttccaggatgggaactactgtggagaaacaagcttgctgctcaaagtagcaggtctggggtctgcccctagcatccacatggagggacctggggagagtggagtccagcttgtgtgcactgcaaggggctggttcccagagccccaggtgtattgggaagacatccggggagagaagctgctggccgtgtctgagcatcgcatccaagataaagatggcctgttctatgcggaagccaccctggtggtcaggaacgcctctgcagagtctgtgtcctgcttggtccacaaccccgtcctcactgaggagaaggggtcggtcatcagcctcccagagaaactccagactgagctggcttctttaaaagtgaatggaccttcccagcccatcctcgtcagagtgggagaagatatacagctaacctgttacctgtcccccaaggcgaatgcacagagcatggaggtgaggtgggaccgatcccaccgttaccctgctgtgcatgtgtatatggatggggaccatgtggctggagagcagatggcagagtacagagggaggactgtactggtgagtgacgccattgacgagggcagactgaccctgcagatactcagtgccagaccttcggacgacgggcagtaccgctgcctttttgaaaaagatgatgtctaccaggaggccagtttggatctgaaggtggtaggtctgggttcttccccactgatcactgtggaggggcaagaagatggagaaatgcagccgatgtgctcttcagatgggtggttcccacagccccacgtgccatggagggacatggaaggaaagacgataccatcatcttcccaggccctgactcaaggcagccacgggctgttccacgtgcagacattgctaagggtcacaaacatctccgctgtggacgtcacttgttccatcagcatcccctttttgggcgaggagaaaatcgcaactttttctctctcagagtccaggatgacgtttttgtggaaaacactgcttgtttggggattgcttcttgctgtggctgtaggcctg

SEQ ID NO: 1167 - protein, 473 aa, Homo sapiens
MVDFPGYNLSGAVASFLFILLTMKQSEDFRVIGPAHPILAGVGEDALLTCQLLPKRTTMHVEVRWYRSEPSTPVFVHRDGVEVTEMQMEEYRGWVEWIENGIAKGNVKIHNIQPSDNGQYWCHFQDGNYCGETSLLLKVAGLGSAPSIHMEGPGESGVQLVCTRWFPEPQVYWEDIRGEKLLAVSEHRIQDKDGLFYAEATLVVRNASAESVSCLVHNPVLTEEKGSVISLPEKLQTELASLKVNGPSQPILVRVGEDIQLTCYLSPKANAQSMEVRWDRSHRYPAVHVYMDGDHVAGEQMAEYRGRTVLVSDAIDEGRLTLQILSARPSDDGQYRCLFEKDDVYQEASLDLKVVGLGSSPLITVEGQEDGEMQPMCSSDGWFPQPHVPWRDMEGKTIPSSSQALTQGSHGLFHVQTLLRVTNISAVDVTCSISIPFLGEEKIATFSLSESRMTFLWKTLLVWGLLLAVAVGL

SEQ ID NO: 1168 - DNA, 1360 bp, Homo sapiens
atggtggattttccaggctacaatctgtctggtgcagtcgcctccttcctattcatcctgctgacaatgaagcagtcagaagactttagagtcattggccctgctcatcctatcctggccggggttggggaagatgccctgttaacctgccagctactccccaagaggaccacaatgcacgtggaggtgaggtggtaccgctcagagcccagcacacctgtgtttgtgcacagggatggagtggaggtgactgagatgcagatggaggagtacagaggctgggtagagtggatagagaatggcattgcaaagggaaatgtggcactgaagatacacaacatccagccctccgacaatggacaatactggtgccatttccaggatgggaactactgtggagaaacaagcttgctgctcaaagtagcaggtctggggtctgcccctagcatccacatggagggacctggggagagtggagtccagcttgtgtgcactgcaaggggctggttcccagagccccaggtgtattgggaagacatccggggagagaagctgctggccgtgtctgagcatcgcatccaagataaagatggcctgttctatgcggaagccaccctggtggtcaggaacgcctctgcagagtctgtgtcctgcttggtccacaaccccgtcctcactgaggagaaggggtcggtcatcagcctcccagagaaactccagactgagctggcttctttaaaagtgaatggaccttcccagcccatcctcgtcagagtgggagaagatatacagctaacctgttacctgtcccccaaggcgaatgcacagagcatggaggtgaggtgggaccgatcccaccgttaccctgctgtgcatgtgtatatggatggggaccatgtggctggagagcagatggcagagtacagagggaggactgtactggtgagtgacgccattgacgagggcagactgaccctgcagatactcagtgccagaccttcggacgacgggcagtaccgctgcctttttgaaaaagatgatgtctaccaggaggccagtttggatctgaaggtggtaggtctgggttcttccccactgatcactgtggaggggcaagaagatggagaaatgcagccgatgtgctcttcagatgggtggttcccacagccccacgtgccatggagggacatggaaggaaagacgataccatcatcttcccaggccctgactcaaggcagccacgggctgttccacgtgcagacattgctaagggtcacaaacatctccgctgtggacgtcacttgttccatcagcatcccctttttgggcgaggagaaaatcgcaactttttctctctcag

SEQ ID NO: 1169 - protein, 450 aa, Homo sapiens
  VARIANT (1)...(450): Xaa = Any Amino Acid
MVDFPGYNLSGAVASFLFILLTMKQSEDFRVIGPAHPILAGVGEDALLTCQLLPKRTTMHVEVRWYRSEPSTPVFVHRDGVEVTEMQMEEYRGWVEWIENGIAKGNVKIHNIQPSDNGQYWCHFQDGNYCGETSLLLKVAGLGSAPSIHMEGPGESGVQLVCTRWFPEPQVYWEDIRGEKLLAVSEHRIQDKDGLFYAEATLVVRNASAESVSCLVHNPVLTEEKGSVISLPEKLQTELASLKVNGPSQPILVRVGEDIQLTCYLSPKANAQSMEVRWDRSHRYPAVHVYMDGDHVAGEQMAEYRGRTVLVSDAIDEGRLTLQILSARPSDDGQYRCLFEKDDVYQEASLDLKVVGLGSSPLITVEGQEDGEMQPMCSSDGWFPQPHVPWRDMEGKTIPSSSQALTQGSHGLFHVQTLLRVTNISAVDVTCSISIPFLGEEKIATFSLSX

SEQ ID NO: 1170 - DNA, 1368 bp, Homo sapiens
atggtggattttccaggctacaatctgtctggtgcagtcgcctccttcctattcatcctgctgacaatgaagcagtcagaagactttagagtcattggccctgctcatcctatcctggccggggttggggaagatgccctgttaacctgccagctactccccaagaggaccacaatgcacgtggaggtgaggtggtaccgctcagagcccagcacacctgtgtttgtgcacagggatggagtggaggtgactgagatgcagatggaggagtacagaggctgggtagagtggatagagaatggcattgcaaagggaaatgtggcactgaagatacacaacatccagccctccgacaatggacaatactggtgccatttccaggatgggaactactgtggagaaacaagcttgctgctcaaagtagcaggtctggggtctgcccctagcatccacatggagggacctggggagagtggagtccagcttgtgtgcactgcaaggggctggttcccagagccccaggtgtattgggaagacatccggggagagaagctgctggccgtgtctgagcatcgcatccaagataaagatggcctgttctatgcggaagccaccctggtggtcaggaacgcctctgcagagtctgtgtcctgcttggtccacaaccccgtcctcactgaggagaaggggtcggtcatcagcctcccagagaaactccagactgagctggcttctttaaaagtgaatggaccttcccagcccatcctcgtcagagtgggagaagatatacagctaacctgttacctgtcccccaaggcgaatgcacagagcatggaggtgaggtgggaccgatcccaccgttaccctgctgtgcatgtgtatatggatggggaccatgtggctggagagcagatggcagagtacagagggaggactgtactggtgagtgacgccattgacgagggcagactgaccctgcagatactcagtgccagaccttcggacgacgggcagtaccgctgcctttttgaaaaagatgatgtctaccaggaggccagtttggatctgaaggtggtaggtctgggttcttccccactgatcactgtggaggggcaagaagatggagaaatgcagccgatgtgctcttcagatgggtggttcccacagccccacgtgccatggagggacatggaaggaaagacgataccatcatcttcccaggccctgactcaaggcagccacgggctgttccacgtgcagacattgctaagggtcacaaacatctccgctgtggacgtcacttgttccatcagcatcccctttttgggcgaggagaaaatcgcaactttttctctctcaggttggtga

SEQ ID NO: 1171 - protein, 451 aa, Homo sapiens
MVDFPGYNLSGAVASFLFILLTMKQSEDFRVIGPAHPILAGVGEDALLTCQLLPKRTTMHVEVRWYRSEPSTPVFVHRDGVEVTEMQMEEYRGWVEWIENGIAKGNVKIHNIQPSDNGQYWCHFQDGNYCGETSLLLKVAGLGSAPSIHMEGPGESGVQLVCTRWFPEPQVYWEDIRGEKLLAVSEHRIQDKDGLFYAEATLVVRNASAESVSCLVHNPVLTEEKGSVISLPEKLQTELASLKVNGPSQPILVRVGEDIQLTCYLSPKANAQSMEVRWDRSHRYPAVHVYMDGDHVAGEQMAEYRGRTVLVSDAIDEGRLTLQILSARPSDDGQYRCLFEKDDVYQEASLDLKVVGLGSSPLITVEGQEDGEMQPMCSSDGWFPQPHVPWRDMEGKTIPSSSQALTQGSHGLFHVQTLLRVTNISAVDVTCSISIPFLGEEKIATFSLSGW

SEQ ID NO: 1172 - DNA, 21781 bp, Mus musculus
gctgctcatacaggacacccaaagctatgatgctggaatctatgtgtgcagggtggaggtgctaggcctgggcgtcagaatgggagacaggactcggctgctggtggagaaaggtgaggtggtgggagatcccccaagatgcagtgttactgggagttagggatggtcccctgctctgagctcccaaattccttcctctccaccgtctccacgtcctgctgtagggcctcctcagcaagcttccaacacagagcaagaggctcacacaagtctcctcctccgggctggattctacgccctcagctttctctctgtggccacgggcagtaccatctattaccagggcaaatgtgagttgctgagcaggggcaagggagcagaaatgggaggggacagattgcaagaggagaggaaagcttcaggcctgtaactctgagcagcccctgctatttctcctaggtccctgtcacatggaaatcatggacactcctcccgcagcctctgagaagtgattctaagtctcaatgatctagcactctcaggaggccaacaataagtccttacccgctcctctctcctacttaggactctcatattttcttcattctccagtctctctctctctctctctctctctctctctctctctctctctcacacacacacacacacacacacacacacacacatccctccacccttagctctcccttcctacccggggaccacaagctgtttactggctttctgcaggtgggagggtgagccatgggctggacacatatagagaagcctgatgcagaagtggggaaccagactttactagatgaccatagtgtgactgagcacgcacccagggcgaggagagcttttgggggcactcaagtgggtgtgctcctggcgatgcaggcatagtcagtgctgaggtcttctttcatgtctgtgatatcactactggacactggcagctgctggagagatgcatagtggggctcctgccctgagacctgggcctggcagtgcagaggatgatgtgaggaccaggggtactgtcacacatccttccccagcctggccgcagctcccacctgtctttctccctgtgtctccactcttttttttctcagtctctcctctttatatctcttgaacctgttttcgcttactttccctctttctttgtttctatataagtgtgtctgcctgtgttgtataggcccttaagtggatgtttggacatcaactttccaactgtttctacacattatttctatctatccatctatctattttgagacaaggtctctcactaaaactggagtttgccatttccactaggctggttggccagggagcccctagggcttgcctgtctgtaccccacagtactggggttccaggcacaagctaccatgcctgactacagcaaatactttctcagaacctcctctctcccccacctcctttatttactttatttatatgagtacactgtagttgtggtcagacacaccagaagagggtatcagattccgttacagatggctgtgagccaccatgtggttactgggaattgaactcagggcctctgcaagcacagccagtgctcttaactgctgagccatctctccaagctccaaacttcctcttctattgagacagggtctcatgtagctcaggctgaccttcaacttaatatgtagtgaaggacagactccctgcctctatgtgggatttcagtcacatgccagcgctctggttttatgctgcgctgggaatcaaacacagttctacacccgctggataaggactgttaactaaaccacactgctagccacgcccacgccccacccactttgcttttgttgttcttttgagacagggcggctcctctagtcctcatggaactcttctctctcgttttgtttgtttgttttttaatttcctctctcactcacttcctcctctctacgtccttctggagtgttttatattcttataaacacaccattccctccctctcttctggttgcctctttttctgcctctttcattttctcgttcctgctacttcctcttcccttttctctcggctccaccccttcatcccagccccactccctacgtgggtttccctcgtcccctcaccccctgcccgcacaccctcccacctccagcccccctccctcgcccccttgcccccagccgccacttccttccccgccccttcatctgctccacccctcacccttcccccttgtctcctcgtccccccagactcacattcctttccagtctcttcactagaagaaaaaaaaaatggttcagtaagaccccttccctgacccccccccccgccagaatggcaccccacattggctcatccatcctaggacagcacctctcattgaatctgctacctcagaatagcaccccaccccaggcccccaacgccagagcagcaggtctccaccccagaactgccttccacaacacacctactggagccccacccctccaacctcgctggttgccataggaaccacagccaaaacctgggtcttttggacaactctggccttttctagcagtaggaagggtgtggagggcaagctgtgggtgaccgagatgctctagggcttacctctctgactgaaccggcacaagcagatgaacaggatgatgacaagcaggaggaggagccctcccagtcccaggctcccatttagcaggaaatcatctggaaggagtatctctgagagggttttttttttccccaccaatttcccaacctcctggttaaatgtaagtttcctagcttcctatatttttcctgggtcccccttccccaattttttattttatcctatcttcctctccccgatcaatcctgttttctattttttgacaatttcatacatatataaaaagtctcagccgggcgtggtggcgcacacctttaatcccagcacttgggaggcagaggcaggcggatttctgagttcgaggccagcctggtctacaaagtgagttccaggacagccagggctatacagagaaaccctgtctcgaaaaacaaaacaaaacaaaacaacaaaaaaaaagtctcttggtcatttccaaagccctttctccctctcccccctcccaacccatgtctctcccacctttctgtcactttatgttgagagtctcatgtatcctgggaggccttagattctcctagtagccgagtatgcttgactttctgatcctcacacccctgtgtcgtgtcttaagtgctagcttggcaagagtgtactaccatggctgttttatgtggctctggggtcaaagccaggaccctgctatcctctcacagtttaaaatacaggaaaatatactctaggagattttgaggggggggcggtgttgtatttttgtattagtttttgtttgcttgttttgttttgtttttaaagacagggtttctctgtggagctctggctgtcctggaactctagaccaggctggtcttgatctcacacacagagatcctcctgcctctgtccgccatcccaacccctccggccctcttgccccctcactcccacctccccccactctgggattaaaggtgtgcaccaccactgcctggctttttttttttttctttctttctgcagtatcttctatagtttaggctgcttccaaatttcctgaagcctcatgcagagacaagtcatgtccttgatttctagtccttcggaccaccccacctctctggtgctgggattacaggagacactataacccagggcttcgtgcctacacattcattacccagacatatttgttacccagacttcaacttctcacttcctctagagattcacctaccgggttacctctcctgactatgctcactccctactgtttccgggtctcaggaggcccctcttccacctgtactgcctcattctgaccacttctcctaatcctgaaccctgcttttcttccctcactctccagccctcacatccctcccctttccgaacggaggggtccctacttactggttgtgcaattgttaccagatcccattgtcatcagacatagtccagggactgagaacaggcctgaaggtcaagactaaactaatccctcttctgctgggcttaatagcttgggttagtcacgtgcccccaagttccccatctctgaggcaaggggcccctttacagtcctcatcctcactgggctggggattttatgtttgtctttttctcttttttgtttttttggctttttttggagacagagtttctctgtgtagccctggctgtcctggaactcactctgtagaccaggctggtctcaaactcagaaatccacctgcctctgcctcccaagtgctgggattaaaggcgtgtgctaccactgcctggcttatgtttgtcttaacatattgtggtacccattttccaggccaggagcccgagattttaacaaggaaagcccaacgcagccctattggtagagatggatctctgtgagttcaagcacagccagagctacacagtgagaccctgtctcaagaagcgaacaaaagccggggcgtggtggcgcacgcctttaatcccagcacttgggaggcagaggcaggcggatttctgagttcaaggccagcctggtctacatagtgagttccaggacagccagggctatacagagaaaccctgtctcaaaaaaacaaacaaacaaacaaacaaaaaaaaacccaaaaaaataaagaagcaaaagccaagggagactcagaagtagcagagaaagtgtttagctgtattgccccctcccatttactctgccccaggctgatgggggtgggaaaggcagcggggggggggggcacttggaggaagctggaaacactgctcaatcctgaatgctggtgagagggctggtgaaggcaagggagccagggtctggagtagttgtgggaaccactgggaaaccagagagaagggtgccctttcccaggagggaggaccttatttggctggtgtggagtagtggctaccaagaatgctttaacttccccttgggtacttcctgccctttaactgctggttcctgtttgagggtagatagaggcccctcacttgagggacaacagcgtgaaactcagaacctcccagttataaggggcatgctgtaggtttgagggacccctgaggagctgtgatgaatcagggacagaacagattattattagtagttattattattagcagaattttgctatgtagcccaggctgacctgaggctcaccatcttcctgcctcagcctgcagagtatacggcgggccaccactttcagctgcagcttcttttctttggaaaatgaaggcacaagagctcagagggtagggtgtgaatgcagattccttcgggttcagggaactccaaatccatagtctggcctccatttatcccagcaggtttcccgtctcatcccggatctccacccactccccgctgacccagactcttggtttacagtggggacacattcaactgttcagagtggaaagaagctccccaccgcaggcattctgcccctcccgcagttttagcctctttccactgcctctgtgcctccttgcatctaggagaggaagaatagccattgggagatggtgttacatctttcctttgagattcctagatatcattagggtggttactccctcagccccagcctcccggttcaccctgtactggtaaaggaatgtccacctcctccaggggccccctctgcggtgccgccttaaggttcatcatcttgtggtttgtgcgtaggcatgggctcccagcacctcgagtgccagataactctggggtgtctcagggcacctctcttggtgtctggcagctatatgcagcaggatatcgatgtgctaccaaaggagtagggaagtcagaggtagtcagactaaatctgctaacagatgctgacaggaagtgggtgagagaagctgatgttagcaaagccttggggcatcaaggagaacttcccacagaaggcagcattctggcattggcaggagggcaggagggactgaggtgaaggtctctcagtgccactgtgaccaagagagaaaggggtgtagaagactacaccccaatctttgaacagagaggaagctggtagctaggatggagacagaggtgggtgagtctggtgcctgggtccctatgcatgttttgttaaccaaattcagggactttgtggtactccccccccagtgtttcccccagaacaaatggggatcacaatctaagtgggtttcttcttttttatagtttataattacattttttttaaaatttttaaacattgggtgaggagagagctctgttggtaaaagcactggccgcacaagcatgaagaactgagttcgagtccccagggcccacataaagatgggtgtggcaaccacttgtgaaagtccatgttcctagtatgagatgggagatgtggaaaactgagaattcaaggaagatcgcaggggatggggtgtccggcctagaatgttcagagaagatcgaaattagaccctgtctcagataaggtggtgggctggccggggttagcatttgacgtgactgtgaactcatactgaaaaacacacatgcgtgcacactcacacacacacacacacacacacacacacacacacatacacacacacacacacacacatacacacgcgcgcacaaaggtcaaacatctagaaaaactgaaccttacaacaaattcatatacatatatatcatatatatatttgaccaagccagctcagtcaatcaacagggtctcaagggagggagtgaagattgaaaagaaaaaggcaaagccaggcatggtggcacacacctttaatcccagcactcaggaggcagaggcaggtggatttctgagtttgagaccagcctggtctacaaagtgagttccagaacagccagggctacacagagaaaccctgtcttgaaaaaaaaaaaaacaaaacaacaacaacaacaacaacccccccccaaaaggtaattagacaaaactataacaagactccagcctgcactgaggctgaagcgggtttatttctctccagcctgctttgatatcattttaggtacataaaaacaaaaaaccaaaaaacaaacaaaaaaaccccccaaaaaaccatgggcagttcttagagcaaagacaaagtaatcaaatgaagtagtaaacaaggagatcacacaaggtaataattaagtaaaaaactaaaaacaaagccccatgacccctgtttctaatattcttatctgagcctacttccttgtccaagcccagtgacaagccaaattcctagaatcggcaccaaaagctctcagagctctcaatatgtgtgtgtgtggtgtgtattatataatttgtttttattttaaattatatttgtgtccatgtatgcatacaaacttgaatgcaaataccatcagaaaccagaagagggcgttggatcccctcaagctggagctataggttacctgactagggtgctggaacctgaactcaggccctctgcacgagctgcaagtgctcttaactgctgcaccatttcttcaggtcccataagcatagtcttagcacctagatcattggttctcaacccatgggtcccaaccccaccacacctcagacatcctgcatttgagacattgacactatgatttgtaacagttgcaaaaccacagttatgaagtagcaacaaggtaactttatggctggggggggggtcagcacaacatgagggactctattaaagcgttgcagcatcaggaagtttgagaaccactgacctagatctataagcaacactttgctggtcacatgcctccctctcctttgtttgttcagttttgtttaagatttatttattattatatataagtacactgaagctgtcttcagacacactagaagagggtgtcagatctcattacaaatggttgtgagccaccatgtggttgctgggatttgaactcaggaacttcagaagagcagtcagtgctcttaacagctgagccatctctccagcccctttgtttgtttgtttgggtttttgtttttgttttttttttgagacagggtttctctgtatagccctagctgtcctggaactcactctagaccaggctggccttgaactcagaaatccacctgcctctgcctcccaagtgctgggattaaaggcgtgcgccaccactgccctttgtttgttttcaagaccaggttttttctccctgtgtagccctggctgtcctggaatgtgctctgtagaccaagctggccttgaactctgatcagtctgcctttgcctcctaagtgaatgcatgttggttccttctttccttcttgagacaggttcttatgcatcccaacctggcctcacgcttgccaactagtgaaggatgaccatgggtttctgacggttctgctgggattacaggcccgcagcaccaagcctgcttgatttcgtgctggggacaaagccagggccctgggcatgcaaggccagtgctctcccatgaaccacagccctgagctacttctcatatctttccaggttgtgactattacctcatgttaccgctgaattgttcaagttagtctttgtttcctctttttttttccttgcctcaggaagacaaaatttacatctagtaaaatgtatgaagctggaattagttctgttttgcctgttacagaatcaaacctactagccaagtgccctgtcaggaaactctactgctatcccaacactgccttttcgtctctctgggcctcagcatcttcttagggctttcccatggagacgaagtggctagtgtaataaagactgtagttcagtggctagcacattcttggtgcctttggtcagtcagctgtattctactaatattggtgttggtaatattttccaaacgagttgtctggtctgggacatagagactgcaaggtcaccaggaaggggacatggcctgaaacctctgtccaccttcctccgacctgctcttccctaaactccaatcagctgcccctcgggtgccattaattcggttcctgatgttcattgaagtcaacaaatttctcattcattcattcattcattcatacattcatttgccctgtccctcatttataagtagttgatgcttcccaatggaggaggctcattctagacagactcccttaaggtggagtgtgcctctgtattgctttatcaggacagagagagagagagagagagagagagagagaggctgagcccccttcataaagccataaccactgcggacccacttaattctgcctttcccatctggttttagagactgaaacaggaagaagtcagccagtgtggggagagggtcgtatcagggacgcagacacacagccgacccttgttggcctcccactccatctcctcaccccccctcccgtgtgtgtgtgtgtgtgtgtgtgtgtgtgtgtgtgcgcgcgcgcgtgcgtgcgtgcatgcatgtgtgcaggtgcgtgtgtctttgcagccctcccttcagcactgtaaggtccagaagcatgaagaacacacgagatacttggagtcctacctggccatgacaaccttgtttgttgcctggccttctgcaagctcccttccttccctgggcttcatcttccctccctgccaagcccctcttcatctttaccttgaaaacctctctctaccccatctccttccccagttcagagaacccaggcatccagccacccaaccccggccccagcgctgggtaaacaggaagctgggtgaggggaggaagggtgttcggaaagtccccgggcagggggcaggtgtgtgggtctgcgggggtgggggggtctacccctgaggtatgaaagcccctgccccggtcctagttctgagtctggatggggacacggggactgcagggcctgggtgggagaccccaggggaggggctgcctcttgctggctgtggcaggagctacttccctggtgaccctgttgttggcagtgcctatcactgtcctggctgtgctggccttggtgccgcaggatcagggacgtcgggtgagtggctgcaacgggctccagagggctgcctcttgtgactgtttatttacttatggctgtgcttctgcccaccgcgctcagctggccgctctccccagagggaatgtctggtctgtctttgcctctccaggcaatcctagcctgaattttcaagccccttcctggttggcttcttttccagataacactgcacttgcgtctctctgcctgcatacatcgtctttgtttgttcttctagcaagatgcagtctagggaggacacagcaggcccaggccttggggctgggctctacggtgggaggggtggagttgccattagccaaatctgacctctgggcactctaaccctacctacccatccaggttgagaagatcattggctcaggagcacaggctcagaaaagactggatgacagcaaaccgtcgtgcatcttgccctcaccctctagcctctcagagactcctgacccccgtctgcatcctcagagatccaatgcttccaggaatctagcctccacatcccagggccctgttgcgcagtcctctcgggaggcatctgcatggatgaccatcctgtctccagctgcggattctacaccagatccaggggttcaacagctgccaaagggggaaccagaaactgacctcaaccctgagctccctgctgcccacctcataggtaagcatctggtagaccgaagagtgctggctatgtacccccacagtaagcgagagtcctttggctctgctatgacactactggtactttcccaactcctccaccaccaacttctccctcggtatgactgactgctcaggaaacaggtaaaaaccggcagggatctcgccactttagtcccttcgggtgatagatagcaccgttattcctgcccctccccgctaagtaccacagaaggaggaagaccccgctcctccgctccaggtccctgctcatcctgcccgggtctccgacctagagatcacggcccgagcgctcacgcgtgtccctttctgcaggcgcttggatgagtgggcaagggctcagctgggaggcgagccaagaagaagcgtttctgaggagcggcgcgcagttctcccccacccacgggctggcgctgccacaggacggcgtctattacctctactgccacgtcgggtacaggggcaggacgccccctgccggccgaagccgtgctcgctcgctcacgctgcgcagcgccctgtaccgcgcggggggcgcctacgggcgaggttcccccgagttgctgctggagggcgcggagacagtcacacctgttgtggaccccatcgggtacgggtcgttatggtacacgagcgtggggttcggcggcctggcgcagctccggagcggcgagagggtctacgttaacatcagtcaccccgacatggtggactacaggagagggaagaccttcttcggggcggtgatggtggggtgacagccatctgtattcattcctggaggatcgactgacggtgcgaatgtgtgaatcgtgatgtccgggaccccgacagtcccgagcggccgggggcgtggcgggggggggggagaacggaatgtaggacacgaattttgaaaataaagaatgtaaactatgccggcccttgccagtgtcttcacggaaatgcagacgtggtttttgattctgggacacgtgcaggtgtggctgacccagctttgaactgtggacacctgttgcacccacgtcctggctctaaggccagggctccaagagggcggaagaagggacaattaaaccctgagacttctgccagcaccctgattgccaggatgctgaaaggttagggaggttggttgaggtttgttagcagctgcgggtcggtcaaagaagaaacgaaaggaaagatattagactcacggattttcctaatccttatttctatcctatctagtgttagggggtgaaaccagggcgagaaagggtgggagaaagaatccacaaagtagcaaagacctggtccccacaagaccccctcacatacacccttgctcctggcttctgcctctgtgaggaggagccaacaggagaaggtaggcaggattcgttcccagagagaaaaactacaaagactgtggaacaaagctccgtgggttgggcccatcagttcagttgggcctgataggttatatgtatgtagtatgtatgtaatgtatgtatggatggatgtatgctctatctatctatctatctatctatctatctatctatctatctatctatctatctatctatctatctatagtccgggtctcatatatagtcctgggtcacctggaactctccagggctggggctaaaggcatggaccaccacgggttctgacagcccttctttaaggggcagcaggtcagtcgcaggcacgttaaggggcagactaatgaagaaagcaaaggagctgaaaatggcaggggtggggtgggggaggggattgtgtccgaggaggaggagttccaggaggaagccgatgccctggggtcctttctagaaatggaatgtcttcacctttggttcacacaaagttgggcaagtgggaggcccctacgatgagtaacagcagcccccccccccccacgccatggctggaggaggcagagggggacccaggcactatctaggtcaccccagtgggtcacccctaccccccaccccaccccagcataccacgtggttggtttttccctctctacacgggtgcaggaaggcccaaccaacaaagagcccactggggtttcattttctcttctcttctcttctcttctcttctcttctcttctcttctcttctcttctcttctcttctcttctcttttttaaaagatttatttatttattatatgcaagtacactgtagctgtcttcagacactccagaagagggagtcagaagacttgttacggatagttgtgagccacaatgtggttcctgggatttgaactcaggacctttggaagagcagttggtgctcttaaccactgagccatctctccagcctcttctcttctcttctcttctcttctcttctcttctcttctcttctcttctcttctcttctcttctcttctcttctcttctcttctcttctctcctctcctctcctctcctctcctctcctctcctctcctttcccttcccttcccttcctttcctcttcttttctctgttctttcttccttctttccctttttctcctcctcctccccctcctccccctcctcttcctcctcttcttccttctcttcctctctctcctcttccttctcccactgaccttgaagccctcaacaatttacctgcccctacctccgaagtgttgggattaaaagcatggctacacacccactccttatgtgctttggaccttctgcacagagccttccagtggggtgagagggtgaccaattttggctaaagtctagtcaggcttcagaatcttctatacctagtcattgccttccttgtaaaacctagttttcgtgaaaagccccattcagtcggtttagcaagctccctctcctagactggatcaccctcagtcatcccgtgcagcccctgaggtgatgtctgctcacctggcctgtctcaacaggcgtcttgtctgatctgtttagacaaagtccccctaccccggatttttctttcctcttagtcatttgccatccccctaacgcccaccctgctggggctcttaagacccacttgctctcattgaacactctacaacaagtctctgcaccaataactaattctgaataaagtcggccttgcctgcttcagcaagtactattgaataacaacaacaataaattattattattattattattattattattattattggtgttgggatcaaatccaagcctgcatatgtgattaagtaatttaaaaaccaacaacaacaacaaagcatttaaacaaggtgtttttctctttccaatccacccacctcaatacattcatcatttgtctgaaacactggaaaaccaaagccagcaatggctccttctttgttgtgttgctttgggttttgaattcagggtatcccatacactgagcatccaccctcaccccaacatgctccacagagtcacattttcagccctgtgtctttttaaaaactatttcactcatcttcagaggtttggaaaaataaaggggctggtgaccgaaaggcagagctggctgagcccagcccagcatggagcagggatagagcttaggtctcctctccgtggaccatgcccgctctgtctgttcagaggcaggttgaatggtgcagggtgcgcagttagacacctgaagctctgcggctcttccttggctgtgattcaggtgcctgagaatgtggctcctccccagccccatgggagccacaacagccggaaagaactgcagtactttcccagcaggtattggaattcccagagtgggaaattcccatgccccagggcaaaggtaattagggttaggctcctgtttccgggggagaggtagggatgttggctgccttttgttccacgggggtcttgggggtcttaatggcccaggggtataaagactgagatctggacccagagactttaggcctccgcaaagagatggatgcagacttcatcccaagacagaaatcacatttcttttccaagcgatctttatttctctcaatgacccgtagggcaattacagtcacggctcccgtggggagcagaggttcagtgatgtagcgacagcctggtcaccaaatcagcgttattaagacaattgggttagataaatattttgttttaaacataagcaaaagaggaggcaacaaggtagagaggccaggtggggacagctcagctccgttttcacagaaaacatgtctgtctgaagacagcttcccacactgggtcctccaggacaccccggccttccaaataaatacattcataagcaaataaataaataataaataaataataaataataagtgcaaatataaatagaggggggctggctctgtgaggaaggctgtgcattgcacctcagggaagagtctggaaaggtctgaaggtaggaaggcctgagatcttatccagcctcattctgagacagaggcaacctgaccactctccctttgcagaactcaggaatggacattcgaggctccagtgaattcggaaagcccatttgagtccttgatggtggtgcatgagaggcccacagtccaggtcactgtcccagcatcttgtgtttctgagtagttgttgaaagctctgagcacagagttggactctgagccataatcccctttctaagttagaaggacacagactgggggctctgaggagtagacaataaaggggtcagagtaaaggggtcagagtgggggctgggtagagaatggatgaacacccattcccttcacagagcaatgactccaaagtagacctgcccggactccgcaaagtctaagtacttgggcagattgacctcagcgctgagttggtcccccttctccagctggaagactcctcccaggtatatgggctcataccagggtttgagctcagccccctcaggggtgtccttggggcaggggctcttgacggcagagaggaggttgactttctcctggtatgagatagcaaatcggctgacggtgtgggtgaggagcacgtagtcggggcagccttgtcccttgaagagaacctgggagtagacaaggtacaacccatcggctggcaccactagttggttgtctttgagatccatgccgttggccaggagggcgttggcgcgctggctcagccactccagctgctcctccacttggtggtttgctgagggggggggggaggattgagtcagtgtcaccctcttagttcacactccacatcctgagcctcagcagctacccacacttcacttccggttcctgcaccctctgtctttccacatcccattggctatgaggtcccgggtggccccctgatgccttgcttttgagtcactgctctgactctcacgtgctgtctctaagagctctgtcttttctcagcctggctcgacacccctcaacccgccccccaaaatcatgccccttcattctcaaggcacatgtaaagaaatcttacctacgacgtgggctacaggcttgtcactcgaattttgagaagatgatcctggaggggaagagacaaaggcaaggatgagccttttaggcttcccagcaagcatctatgcacttagacccctttcctcccaaaccaaagctttaagttctccccccaccccatctcatcccatgcctaactgcccttcctccatcttaaattaagagagaggtgtgggaacacttactgagtgtgagggtctgggccatagaactgatgagagggaggccatttgggaacttctgtgtaggaaaagaaggaggttagttaagacagactcaccccaaaggagaagcctcccggctgattgccccgcttacagttcctctttgccccaccccaccccccagctttgtgtttttcttcttcattcattcatctgtccaacccacggcttctttctgcggtgccctctgtgcttgatctcccgttatctccccttcatcttcctccttatctctcatgcctctctcatttctgtctctgagttttatctcttgcttatcccctcttcccctggccacatctttccagatctctccacgtgtgaacacacttgttcgttcattcatctctctgtgcatccgacgaaggatgtttagtcagctggacgcatgggtccgaggtcctgactctgtcccctccacactctcctccaccttgccctgcccattagcccacttctttccctcacactgtccttcttgccctcctaacccgttttgcttgtgagcgagaataagggttgcccagacactcacctcatccctttggggaccgatcaccccgaagttcagtagacagaagagcgtggtggcccctgccacaagcaggaatgagaagaggctgagacataggcaccgcctggagttctggaagccccccatcttttgggggagtgcctcttctgccagttccacgtcgcggatcatgctttctgtgctcatggtgtcttttctggagggagatgtggcgccttgggccagtgagtgaaagggacagaacctgcctggttggctgcttgcttttctgggagctatttccaggatgttctggagtttctgttctccctcctggctagtcccttgctgtcctcgctgagggagcttctgctggctggctgtgcagacggccgcctttatagcccttggggaagagggcggggaaaagctctcattcaaccctcggaaaacttccttggtggagaaaaccatgatctcatgtggaggaagcggtagtggccctacacctctgtctcggtttcttctccatcgcgggggcagagggtttggaaagttggggacacccaggcatcaaggaatctcctccccgtcgtccccaccaggattctgtggcaatctggggccaatcaggagggtgtgtgtgtgtgtgtgtgtgtgtgtgtgtgtgtgtgtgtgttgtataggaccctgagaactgaaacccatttcttctctgtcctccagagctaatcattgtctgtttctttgtagaaagaccatgcctgtgtctatttccttttgatttctaaatgggacatccatgggggagaacttagcatgggggggtgcttctgaaagctgggtgcataaggggggagacatgatattgaggagggaaagccccctgtttgagttcttggaggaagtggctgaaggcagagcagcttgagagttgggaagtgtgcatgggctttgggagggctggtggggggggtaatgggatgagtatggggcagccccagagggaatgaactcagccctgggaattcacggacctcacaagccttctcctttcactctgatcatgagctcaggctgctgctttgggtccctgctcccaagtgagttttccacggagcctctgccatatcttgactgcggtacatcaactcagacatttaggtcccacagccctgcttccaggatttctcccaatccgtatgactccccggtcttccaaggattcccctcccccaccctcccactcctaaacactctcccaccctccagtggagtcacttctccccagaaccctcatctctctccacccttggatggatctccctagctcatcctttgggtctcctccggcagttaagctgcctcactcccgtgaatccaccatgtctctgggagctgcctgctcctcatgtctctttgctctgcccggatcccatggaccaactgaggcctctgtcccctgctccactccttaaagagaccaggaagtttctcccccaacgcaagacagacacaagcagacagaatctcagagaaaagaggtttattgggtttcacagatggtgcagggggtccctgtggatgtctagccaagcagtggctggcttttagagcttcgtgctttcttctagaaccccttggtcacccacatctaattctctcgccatctctctcttagatgggtcctgtctgaggtgagacacctttgtgtctgggacctagttgtcatctgacggctttctatttttcccctctttctattctctataaataaataacttaacttttctctccataaatagtcaaccttcccctgttcccagccacctctcccatgtctgtccctccttcatgtccaggtctctgtccgacctagacccacaaaaaccctgctctgtgcaggaacttctaggtaggcttgagtcgtcccctgagcatctggagtggccctggggaagatgtagtcccctgaagtgtctcagactcccgtgagagctccaggttattttagtggggaaggctggagactgtggggatgtgacccttgaaacaacggtcaggatggaggcctggaatccaattcttgggtttctttagaatctacagtgcaaaggctccaaagaatacactgctggggctgaagtgtagatgggagatgccgtcggtgtgggtggacagctggtctcccttactgagcaggaacacagccccctggtacattgagcgcacccacggtccttgaagtcccggatacacagacttctgcgcactgaggagaggcacatggaaggggtattgggaggaaaagagctggacctcgtgtgccaggtagatgggagtgggaatggccctgggggagcagctttctccagagaaaaccacctgggagtagacaaagtagaggccactggtggggatcaggagggagttgttgctcaaagagaagccatgtcggagaaaggcacgatccgtgcttgctctccagagcagtgagttctgcttgctggggtaccctgggaagaggcacaagacattggggggctatcaagatcagaggtccccatccctgagggagcaggcactggacaagtgggatggttggtagggagatgggagtggggtgcctgcccttaggggtaagaaaagttggtgtggggagatgggaagatcgcctgggcccctgggcaagtaggacaaaaggcagggactggacctctcctctggaggcagaagtttaccaacaaggtgagcagcaggtttcaggatgccatgggtcaagtgcttctgagggagtggatgggctgtcctggcagcggagaagcggacaccagagagtccctgggacagaagagagtggagaggactctaggactctgagttagctaggccaccccagcacccccaatctcttgctgcctcacctgggcccctagaggcagggccagcagcagccccaggaggaagacaggaggggtgccaagcaccctcaagaggtggagacggccgagcagtgtcatgtggagaacctgctgagagagagagagagagtgtgtgtgtgtagcggaggcggggcacacagcggaagacagaccttacctcccagctgagacagccaccctgagagacagggcgacagacagaaaaggggacaggcaggggaaccctgaagtgagcagggataaggagagacagaggggaagaggaaagctccaccatagaatcagacaatggctaacagaggcagagagagagaagagagagagagagagagagagagagggagagagagagagagagagagagagagagagagagagagagagagagagagagagactgataaggccgccacaggaacagaccaaaaatcaaagccacgacaggaggaccagacccattaaggctggggatccaggcaggttgtatagaaaaggctgtggctcaagaaaggaggtaggatcctgagggatgcctgataccagggtaagcccaaggagacagggtaggagaggctcacctgctgtgcggggtcctgggcgctggcgctcgggtccctttatagaggaagcggcagtgtggcaggcagcgggcgggttctaggtcggggctggggcttggggaagcccccagggcttagaagatgctgctgtttcagtcgaaggcaggaaaggctggggcctaggagagaaccgcaggctaagggcttagactactgcgttctgggaaagggagtcgggtccggggaactgtgggccgcagggactagcagggagctgggtcaggcccaggagttccagtgaacggccgagcaattcgtggagagggtgcagctgggctgtgactggaagcctggttccctgaagagtgatggtttatatcacttctgcacccttgactgctcacaggcttctctgcacatttccctctctgtcgatcatggtcatgtctggagggctccgaagccacatgtggttagcggcacctttgttttttcaggttcgaacccagggctctggatgcttgacatgcctgccgccccttcaggcctatttcctctcttgtctttgggggttcaagtcacagttattccaatatatctgtattttctggtcatctgccagtttttttttttttttttttttttttttgcttttttcgagacagggtttctctgtgtagccctggctgtcctgaaactcactctgtagaccaggctggcctagaactcagaaatccgcctgcctctgcctcccaagtgctgggattaaaggtgtgtgccaccactgcccagcttttttttttttttctgccagtttcatctgccagtttcatgtcaagaagttccattacagtgccctctccccaaatctggggcatcctggtgtgtaacaatcttaactgtgtccccttactctctggagcggcagttctcaacctgtgggcaaggtccctttggcaaacctctatttaaaacaaatatttacattatgattcataatagcagcgaaattacagttatgaaatagcaacgaaaataattgtatggttggggtcaccacaacatgaggaactgtattaaagggtcatggagttaggaaggttgagaaccctgtcctagaatgttccaggtctggaagatgatttgggggtattctcttagaaccccaagatc

SEQ ID NO: 1173 - DNA, 1077 bp, Mus musculus
atggggacacggggactgcagggcctgggtgggagaccccaggggaggggctgcctcttgctggctgtggcaggagctacttccctggtgaccctgttgttggcagtgcctatcactgtcctggctgtgctggccttggtgccgcaggatcagggacgtcgggttgagaagatcattggctcaggagcacaggctcagaaaagactggatgacagcaaaccgtcgtgcatcttgccctcaccctctagcctctcagagactcctgacccccgtctgcatcctcagagatccaatgcttccaggaatctagcctccacatcccagggccctgttgcgcagtcctctcgggaggcatctgcatggatgaccatcctgtctccagctgcggattctacaccagatccaggggttcaacagctgccaaagggggaaccagaaactgacctcaaccctgagctccctgctgcccacctcataggcgcttggatgagtgggcaagggctcagctgggaggcgagccaagaagaagcgtttctgaggagcggcgcgcagttctcccccacccacgggctggcgctgccacaggacggcgtctattacctctactgccacgtcgggtacaggggcaggacgccccctgccggccgaagccgtgctcgctcgctcacgctgcgcagcgccctgtaccgcgcggggggcgcctacgggcgaggttcccccgagttgctgctggagggcgcggagacagtcacacctgttgtggaccccatcgggtacgggtcgttatggtacacgagcgtggggttcggcggcctggcgcagctccggagcggcgagagggtctacgttaacatcagtcaccccgacatggtggactacaggagagggaagaccttcttcggggcggtgatggtggggtgacagccatctgtattcattcctggaggatcgactgacggtgcgaatgtgtgaatcgtgatgtccgggaccccgacagtcccgagcggccgggggcgtggcgggggggggggagaacggaatgtaggacacgaattttgaaaataaagaatgtaaact

SEQ ID NO: 1174 - protein, 306 aa, Mus musculus
MGTRGLQGLGGRPQGRGCLLLAVAGATSLVTLLLAVPITVLAVLALVPQDQGRRVEKIIGSGAQAQKRLDDSKPSCILPSPSSLSETPDPRLHPQRSNASRNLASTSQGPVAQSSREASAWMTILSPAADSTPDPGVQQLPKGEPETDLNPELPAAHLIGAWMSGQGLSWEASQEEAFLRSGAQFSPTHGLALPQDGVYYLYCHVGYRGRTPPAGRSRARSLTLRSALYRAGGAYGRGSPELLLEGAETVTPVVDPIGYGSLWYTSVGFGGLAQLRSGERVYVNISHPDMVDYRRGKTFFGAVMVG

SEQ ID NO: 1175 - DNA, 22173 bp, Homo sapiens
gacatggcctggatgctgttgctcatcttgatcatggtccatccaggtgacagggcgtgcgctcaggaccccaaggagtgtgggtgggaggagggagatccaggaggctggactagatgctatagggaacgggcttggtgggggctgaaacacacggctctgagggaggagtgggactgctccaaaggtgacactcagtggactcccccaattcacagtctctctgtgtcacccactgtgaggctttttagtttgagagatccaagtaaatctatgataaatttcttggtgaaacttttttttttttttttttgagactgagtctcgctctgtcgcctggctggagtgccgtggtgcgattttggctcactgcaacctctgcctcccatgttcaggtgattctcctgcctcagcctcctgagtagctgggactacacgcacgcacgaccacacctggctaattttttttttttttgagacggagtcttgctctgtcacctaggctggagtgcagtggcatgatcttggctcactgcaacctctgcctcctagattcaagcaattctcctgcctcagcctcctaggtagctgggattacaagcgcgcaccaccacacccaactaatttttgtatttttagtagagacagggttttaccatgttggccgggctggtcttgaactcctgacctcaggtgatctgcctgcctcggcctcctaaagtgcggggattacaggcctgagccactgcgcccagccatttttgtatttttagtagagatggggttttgctatgttggccaggttggtctcaaactcctgatctcaagtgatctgcctgcctcggtctcccaaattactggaattataggcatgagccactgcgcccgcctggtggtgaaactttttttttgagacagtttcattctgttgtccagtctagagtacagtggcggtatctcagctcactgcagcctccacctcctgggtaaaaatgattctcctgtctcagcctcccaagtagctaggattacaggtgcatgccattactgctggctaacttgtgtatttttagtagagacgaggtttcaccatgttggccaggctggtctcaaactcctgacctcaggtgatccactcgccttggcctcccaaagtgttgggattataggcgtgagccactgcacccggccgaaactgtttttaatgaactgagagaccttaactatcaggcatattattaactaaatgcaggagttctcaaaatgtggatttctgggaacctagaacaaattcttaggccccactccagacctactgagtcaaaaactcggggggtaggcccaggaatctgttctagcagatgctccaggtaatttccatacacactcaagtttgagaaccactgaaatagaatgacttgtaaatttccctaagtagataatttaatcagggattttaatatttggtttaattcatcaacatggacgggttaaataggaatctcaaccaattaaggccacgtcttcacctggagatttaattagttactttctttaacgaaaaccaagagtggctgggtgcactttgggaggccgaggcaggtggatcacttgagatcaggagtttgagaccagcctggtccgaggtgggtggatcacttgaggtcaggagtttgagaccagatggtgaaaccctgtctcgactgaaaatacaaaaattagccagtcgtggtggtgggtgcctgtagtcccagctacttgggaggctgaggcaccaggatcgcttgaacccaggggacggagtttgcagtgagccaagattgcaccactgcattccagcctgggcaacagagcaagaccccatctcaaaaaaagaaaaaagaaaaagaggaaggatggcttactgtacaatgccatttgtactaaaataatacctggataatataatgagtgatattagttaactaggcagctgcattcattaatgagcttaatttcaccatgatggtttacatttcagctagacaagttactactgaactggctggagaatgatggcagagggtgagagtgagagttggtataggaagaatttgaaaaatgatttttattttttattttttgagatggagtcttgctttgtcgcccaggctggagtgcaatggcgcaatcttggctcactgcaacctctgcctcccgggttcaagcgattctcctgcctcagcctcccgagtagctgggattacaggtgcacaccaccatgcccggctaatttttgtatttttttagtagagacggggtttcaccatgttggccaggatggtctcgatctcctgacctggtgatccgcccacctcggcctcccaaagtgctgggattacaggcgtgagccactgcacccagccgaaaaatgatttaataagcaatgttaagaaatcagattggttaagagggaagggtttaatgaggcacccaaagtatctattcccatgcaccctatgcctggagaaagctgggatgttctactccaagctctgttgtcttttctctttggaataactggggaggtgtttctctgggtcttccttctgcccccaggatcctgtgctctctgggtgtcccagccccctgagattcgtaccctggaaggatcctctgccttcctgccctgctccttcaatgccagccaagggagactggccattggctccgtcacgtggttccgagatgaggtggttccagggaaggaggtgaggaatggaaccccagagttcaggggccgcctggccccacttgcttcttcccgtttcctccatgaccaccaggctgagctgcacatccgggacgtgcgaggccatgacgccagcatctacgtgtgcagagtggaggtgctgggccttggtgtcgggacagggaatgggactcggctggtggtggagaaaggtgagatgctgggaggtggtgtctcctcctggctggaggccccaagaggcaatgtccttgggaggcagggatgctcctctgaggccccttccctccctgagcctgtgtgcacttcttccccaacccccgtctccattgccccatgcagaacatcctcagctaggggctggtacagtcctcctccttcgggctggattctatgctgtcagctttctctctgtggccgtgggcagcaccgtctattaccagggcaaatgtgagtaatggagccaggggcaatagtggacgggatgggaggggcagtaagagagtgggaggagggaggacagagaccaggaagaggagagcctcgggactgcaacactgagcagctcctgtcctctctctgaccaggccactgtcacatgggaacacactgccactcctcagatgggccccgaggagtgattccagagcccagatgtccctagtcctcttcaaaagaccccaataaatctgccccaccactaactcctcatgagtctcaagtgttttcttctccattctccagatgccaaatctactctctccggattcccccaactctgaactttcccttccaccaggtctgacctggaaaggtccaagaaggcagctgccggctgtggtcccagcgcccctcccaccaccatgtgggagctcagcacatctgcttcccccagtcccaggaggctgagcctgattgtcctgagaaatgggaaggatcagatatgactcctccttggcaactgccctttcctgccaggcccacacataccctcttctggctgttaggggagcttgggtccctgaacactgtcattcacccaataaattactatttgaccccagagtgggtggaagggtgagccatgtgttttttttattttaatttttaaaaaatttaaaaaattccctattcaaaggtcaaaaagccacataagttttgatgatgatcaatttgaacggaggctcgagatggactgagaggactgagacacagaagtggggggaccatggtttttactggctggaccacagggggaccctgtccacccgcctgggttgaggaaggtgtctggggtgctcaggtgggtttgttctcagcaatgcaggcatagtcagctcttggatcctccttggtgcctctcttgtctctgcccctgaggtcaggtccctcactgctgggcactggcagcctctgcagagatgcatagtggagttcctgctctgaggagccctgggcctgggaccaggacagaaggtgctgatgggaggcgatgccgtcagatccttccctgtgagttctgctcccacctccagcctttcttacttctctccctctctctctctctctctccctctctctctctctctctctctctctcttttttctttggagacagagtcccactatgttgtccaggattgtcttcaacccctgagctcaagctatcttcctgcctcagccttgcgatagctggaatgacagacgtgagccactgtgcctggttctggagcctctctctctctctctctttcattgctcttctctttgtgtctctctcactctcattttctccctgtctctcctatcctctgtctcactttttctcttggtttctgtctcattttctctttctcttttgcctcgattttctctgcctctctcatgctcctactttctctctccttgtctcccgtccccaaccctcctctcagcgctcagccatgcttctccccactcacccactcaggatctctcttgccctcccccttccctgtccccagactcacccagctcctctccagcctctttactggaagaaaagaagaagctcaacacagcccaccctttgtgcttctcccgggccctcccgggctccccccaccagcaggcgtggactcccctgttggcttcccagtggctccagggccaggcagtgttctgggaaagcagtgggaaagcgtgtgggggtgggggcacagggggcactgctgcagggggagggagggagtgcagcgctcacctcttcgatgcagccaacacaggcaggcggacagaaggaccactgccagaagcaggagcccgcccagccccaggcccccgtagatacatatatcttcagggaagagggctcaaggttaggaagcccattccttctccagcgtaccccagcctcctggttggttgcagctttctcagattccctctccaacagttttagaggcagaaaaatataccctcagagcttctccatcccagaccttaatacctcacctcttaccaggtttctgggcctcccgtgaggtccctttccctcctgtaccagctgtccccagaggcctgtccacctagtcatgagctgcatacatcactgttccccatcacttcctaagctcccaggactctctctatgcagatgcaagagacactttacttaccatcattccgcgataacattaggtcagggatcagggactggcctggaggtcaggaactctagtccttgctcttttaggcgaaatgatcaggggctggtgacttgcctcaagttcctcatctgtgaagtgaggggccctctgttataatcgttcccaggctggggagcctcccttatgtgccaaccctgagctgggcactttccattcctcactgctaatccccagaacatagggtatcatggtgcccgttgcccaagtaaagacccgagattcaagcctggactttactaggtcacccatcccagaaaggtggagctggggtttaaggccagctctgcccaactccagagcccagccctttcctctgccctgggctgaccacgtggtttggaggggacttttcagccctggatggttctaggtgctggtaaggggatgatggaggggaaggagcctgggcctgggtgggtgtgggcactggggggaagaagggagggtgatatcagcacacccagcaggtgggctgctccctgagccgcagagcagcgcgggagtgtgggggcccccttggctggtgtggagagctgcttcccacaggcagatgctgctagggctgaagtggggcatggaggagtatctggggccccataacttcccctcaggcacttcctcccctccaaccactggttcctgtttgagggtgaagagggggccgttctcttcaccccagagccagatatactgactagggtctggaaactgggacccttctgggtttaagaggaattctggggggtggggagcagaagtgcaggtggaggccataagggccgtgggcacagaaatgaattgtctttaatttctttggggagcagagactcagaggattcctcgacggcccagggaaactcaaacccatactctccctcccctcatcttagcttcaccccactctggggtgtgaccatccttccaccaaggtccctgcccattcccagcttacccagagcttgtggcctgcaggatggacagactccaaactggccagtgctgtctggctgaagagaagtgttgccacctcagacattcctgcccctcctctggctttaacttctcccccagcctgggttcctccccagcattgttaggagaggaagttcggctccagggttagggttacaacatctttcttttcaaacttctgggcctgtagctagggccataatctgcctcagctccagtcatttcactgatcctgccactagtcagcaaacacccaccaccttcaggtgtcttccttgattaactcttctctattacctcttacactgcatctgttgagacctcttgatcttggcatatgtctgtggacacatgtaccctgctccagttcagactgggagctctggcatatttggtgttctggtgacccacttggtgttctgcagctctatgcagcaggctgcttggctgtctgattaacaaacatgagagttaaaggcagccatactagatctacatgagccctgtggatagatcaaggacagaaagttggtgacaagttggtgacaggaaaggaggtgtgggcaatacaggtggacttcctgtaggaggcagcattctggcattgaacacagaactaagtaaaggcagcggcctgaggctctctggagagacctgggtgaaggcttcttagtggcactgtgatggagaaggagatgggtgctggaggattgcacacccactccttgaggagggtgaagactggggagcgcctgtaaggcaaggggtgaggaggagatgtggtgcctgggtgggtccatattaatttgcgtttccccttccaaattcaagaaccttctacttcctcccccacccttctccccatcctccatgttccccatgctgaataatattcagggttttttgtttgtttgttttgttttttttacattttattattaaaaagtgcaaacatagggtgaaatgagaataattgtacagtgaacatattcttaccacctagatgctactattaacattttttgttttgttttgtttttgagatggggtctcactctgtcactcagcctgaagtgcagtggtgaaatcatagctcactgcagccttgaattcctgggctcagaggtcctcccaccttagccttctgagtagctaggactacagacaccagctaccacatgaggctttgtagaaatggggtcttactatgttgcccaggctgattttgaactcctggtctcaagcaatctttccaccttagccttccaaagtgctggaattacaggagtgggccactgcacctggctctattaacattttttatttgctttatcacatatttatcaatccatctcacttttaaatatcttttaaaattacaaatatcagtacattttacatctaaacccttcagaagcttaacattgactggagttcagtatttatttccccatttcttttctggcctgaggaaggcaaattttacatacaaatctcaagtcagtactcttttttttttttgagacggagtcttgctctgttgcccaggctggagtccagtggtgtgatcttggctcactgcaacctctgccttctgggtacaagcgattctcctgtctcagcctcccaagtagctgggactacaggtttgtgccaccatatccagctaatttttgtatttttaatggagaaggggtttcaccatgttggccaggctggtctcaaactcttgacctcaagtgatccacctgccttggtctcctaaagtgctgggattataggtgtgagccatctcgcctggcctaatactgttttgtttgtttgtttttgtttttaagacagagtcttgttcttgtcacccaggctggagtgcaatggcatgatttcggctcactgcaacttccgcctcctgggttcaagtgattctcctgcctcagcctcccaagtagctggaattaaaggtgcctaccaccacgccccgctaatttttatatttttagtagagatggggtttcaccatgttgatcaggctgctctcgagctccttacctcagatgatccaccttccttggcctcccaaagtgctggtattataggcaagagccactgcgcccagccccagtattcagtttttaaactgtcttgttatcaaggctctggagccagatgcctgggttcaaattctggttctgccactgactctgtgagctccataagtttcttaacctctctgtacctcagtttcctcttagggtttttgtcaggattataattattggctgggcatgatggctcatgcttgtaatcccagcactttaggaggccaacacgggcagatcacgtgagtccaggagtttgagcccagcctgggcaatgtggcaaaaatccatctctacaaaaaatgcaaaaattagctgggcatggtggcatgtgcctatagtcccagctattcaggaggctgaggtaggtgaatccatagatcctgggaggtcaaggctgcagtgagccatgatcctgccattgcattccagtctgggtgacatagcgagaccctgtctcaaaaaaaaaaattattaaagtgtgtaaatcagtggcataaacatgttaagtgcattttgtgggtcagctatattattattagtattacggaaacacatagagatgttaccaagaaggggagatgattggagccacttccagcttccttggacctggtctttcttcccttgactctttttttttttttttttttttttttgagagagagagtctcagcctgttgcccaggctggagtgcaatggtgcaatcttggctcactgcaacctctgcctcccaggtttaagtgattctcctgcctcagcctcctgtgtagctggaattacaggcgcgtgccaccacgcccggctaactttttgtatctttagtagagacagggtttcaccatgttggccaggctggtctcgaactcctgacctcaagtgatccacctgcctcagcctcccaaagtgttgggattacaggtgtaagccactaccccggctactcccttgactcttaaccactcatgctgcctacatctaccattcatgtggtccttgctgctttgttttggttattcctgcatttatttgtccttttattcatttatgtataaacatttagtaagcacctactaatggatagggctcattgtagacttggaagctctctgagggtgggagtatgcctcgtccatctgtctttactttttgtagcaagggaggtaaagctccatttccatccctccttagtgagtcagtagtcagtggtgaggctaaggcttacctctccctttctcactcagcacagggggctggagatgagcaagggaacgggaggaggtcagcccagtatgggaatcagttcttctcagggaacccagacatccatccctcaagattccagtccttgtcctagtccggcccttgacctcagagacgggatcagctcttcctccagcacctaccttgagggtatagaagaatgcaaaccacattggaaacctggagatctgtgttctcatttcagctctgctgactggcttcctgcaagctaccttccctccctgggcctcagtttctctctctgctgagccagaagatgtctaaagacccctttggttccaccctgagagcctgtctccctaacctcaacttcttccccagttcagagaacccaggcatccagctgccccaccccagctctgggtaaacaggaagctgggtgaggggagcaggggtgtgcggaaagtcccagccaggtgtgcaggtctacagggagggggtgggcccgtccctgaggtatgaaagccccctgctctggctctggttcagtctcaatgggggcactggggctggagggcaggggtgggaggctccaggggaggggttccctcctgctagctgtggcaggagccacttctctggtgaccttgttgctggcggtgcctatcactgtcctggctgtgctggccttagtgccccaggatcagggaggactggtgagtggctgcaacaggccctggtggagagttgtatcttgcggatgcttggctccctctggttgtgcctgtggtcttttgccccctctggctcagctggctcggctgtccctggtggggatgtcttgtctctttgctgactctctttccatgttcctgtgatgttgtgcttgtgtcccgacataagccccttgtgtctcctctcctcttcccgaggtacatctgtttctccgcccaagtacctatgccttgcttgttctcccttctaaggaggtgtgtgttggggatggtgctggtaggagaaaccccaggcctgcagcttgggtccactttcagaggggtaggggtgacatgagctgaatctgaactctgggcactgtgaccccacccaaccaggtaacggagacggccgaccccggggcacaggcccagcaaggactgggtaagagcagactgtctctccttccccgcttcagaccctcaggggctcccagctccctgctgcgtccccagatacctcttcctctaggaatccaggctccccatccctgcgccctgttctctcaagggtagcctgcatgggtggctgccctgcccccaatcgtggactctttgccccttccagggtttcagaagctgccagaggaggagccagaaacagatctcagccccgggctcccagctgcccacctcataggtaaggacctccaagacctgaataagagtgtaaataatccgaaggttccagttctgctcgcccagagtccttcggctccatgattccagtgctcggtttcccacccgcttcacgaccttttgtcgctcgtgcccactcttacgctcgtccccgcagtgtagtttcttcttccctccggtgcaagcaaaagccggcctggaggtccccactacagcgttctgcaccccacatccgtgttccctcggcccccaactcgcactcatcccagaaacagcaccatccctcctcccccggcccggctcggctcccgcaggggctaaaagccgccacttccccagaagtcccaagcctttaggatcgcattcccaagagcgcgtcggcccgtgtctccgcaggcgctccgctgaaggggcaggggctaggctgggagacgacgaaggaacaggcgtttctgacgagcgggacgcagttctcggacgccgaggggctggcgctcccgcaggacggcctctattacctctactgtctcgtcggctaccggggccgggcgccccctggcggcggggacccccagggccgctcggtcacgctgcgcagctctctgtaccgggcggggggcgcctacgggccgggcactcccgagctgctgctcgagggcgccgagacggtgactccagtgctggacccggccaggagacaagggtacgggcctctctggtacacgagcgtggggttcggcggcctggtgcagctccggaggggcgagagggtgtacgtcaacatcagtcaccccgatatggtggacttcgcgagagggaagaccttctttggggccgtgatggtggggtgagggaatatgagtgcgtggtgcgagtgcgtgaatattgggggcccggacgcccaggaccccatggcagtgggaaaaatgtaggagactgtttggaaattgattttgaacctgatgaaaataaagaatggaaagcttcagtgctgccgataaagatgctgagttgcgacacacgtcttaattcagggtgggtgcacgggtgcgggttaaatattctcagtactcttctggttgcttgaaacaattcatcacaacacagtgtatggcctttgctcctagggatgatggtctgcctgtcccaccccctccctgcctctgaatggccaggccccaccattagcccagttggagggtgggaggaagggggacttctcaaactccgaagcttctctaggcatcctgattttcagggccacatggtcccaaccagactctgcaccatactcttttctcttgggtaccccccaacagtgagaggggtcattacagagcccagcaagcaccactcagaaaggcccagcagcagagtaagcccctatcatgacagaggaatgaagcctggaggggccccgcacttctccccctagagctgcctgaaggcctctctgtctcctacccgacagtcaactcttctcctccaaggagcttaattcaaggctcatggggtctgaagggaggaggctgaaggagaaagaaggggagaatattagagagagatggggatggcaggaaggagcctgtggtgcctgaaaacaccaggaagttctggggaggaggaaaaaccgatgccccacttagggtgtcccatttagggtgagacggaaaatcctcacctttttttcacactttaggtcccccttcccaaaagtgagtaagtgtgggtgcttctgggatgagtaacagtgtcccccattacttcatggctgactttcagccacaggctggaggaggcagagggtgacccaaggccctatctaggtcaccccaatgggtcaccctaccccctcagcctaccacatggttttctcctgcctggcaccccagggctggaggtaaagcctaatttccgaactcagtgggggctcccagtctaggggggctcaatttccgtctccatatttgtttttggaattattatttttttgagacagggtctcgttctgtcacccagacgggggtacagtggcatgatcatagcttactgtaacctcaaactcctgggcttgagtgatcctcctgcctcagcctcctgaggagctaggattacaggcatgcaccactacacctgactaatctttaattttttttctagaaacaaggtcttgctatgttgcacaggctggtcttgaactagtgggctcaagtggtcctcccacctcagcctcccaaagtgttgggataacaggcatgagccactgcgccccacccttatttgtctttgactctctccagaagagccttcatccagggagggggtgcttttctctttccggattacccacctctcacctctcccctccttcaccacaaagaccagtgggaccaagccggcatgtgagtccttcacccacatcttattcctatgtttcattcttttttaaaaaatagagacaggatctcactatgttgcccaggttgctctggaactcctgggttcaagcgatcctctcaccttggccttgcaaagtggtaggattacaggtgcatgccaccacgtccggcagttcggttccttgttctttattgtcctcagtctcttcgatttcacccactgagagaatggaaggggatagaacagctggaaactggttgaaggaagccagaattcactaagtgcccactgtgccaagggctgagtgaggtcctctgatggaggtcaggccttctctcacatgccctatgtgtggtggacattcctatccccattggatagataggttaagtggctggttcaggttgcagagttaggacagggtgatttgaagcctagacacccgaatctctggaagtcccttggctgtgtgattcaggtacctgagaatgcggctcctctccagctctctccggactgctggccagctgcaacagccggaaatctcacctgagctgcaggattttcccagcaaggattggaattcccagagttggaaattcccatgccctgagggagaggtaattaggttcaggctcttgtttcctgggggatggggaatattctgttgggctttgtttatgtagggtctccagggccctaggagtctaaggatgggactgggtccgagggatcttaaagcctgtggagagaggacttagggagcttcttcccacccacaagaagaggcagatgcagaattaattccaagaaggagaccatgtttcttttctaagcaaactttatttctcgccactgaatagtagggcgattacagacacaactcccctggggagcagaggctcagcaatgagtgacagttggtcaccaaatcagcattgtttagacaacttaatcagataaatattttaaaaaacataatcaaaagaaggcacagaggccagggggctacatgggaacagcctattgttcagctccgttttcacggaaaacatgtctgagccaaggcagctcctacattgggtcccccaggataccccggtctcccaaataaatacattcatctgtaaataaataaataataaataaataataaataatcacaagtgcaaacataaatagagggagctggctccatggggagggctgggctccgtgtctcaaggaagtctggaaacatctggagagaggaaggcctaaggtccacttgtgtcaatttctaggtgaggtcttctcaagtcctgcagcattctggccagaaccaaaggctccctggtctccagattccagatgtcagggatcaaagctgtaggccccagtgagttctggaggccccagtttgaattcttagtggttgccagcacttcactgtgcaggccacacattcctgaatcccaggtttcgaagtggtggtcttgttgcttaaagttctaagcttgggttccgaccctaagcccccaattctctttttgagccagaagaggttgagggtgtctgaaggagggggtaataaagggattggggcaggggaggcgtttgggaaggttggatgttcgtcctcctcacagggcaatgatcccaaagtagacctgcccagactcggcaaagtcgagatagtcgggccgattgatctcagcgctgagtcggtcacccttctccagctggaagacccctcccagatagatgggctcataccagggcttggcctcagccccctctggggtctccctctggcaggggctcttgatggcagagaggaggttgaccttggtctggtaggagacggcgatgcggctgatggtgtgggtgaggagcacatgggtggaggggcagccttggcccttgaagaggacctgggagtagatgaggtacaggccctctgatggcaccaccagctggttatctctcagctccacgccattggccaggagggcattggcccggcggttcagccactggagctgcccctcagcttgagggtttgctggagggagggagagagggagaggagagtcagtgtggccatgtcggttcactctccacatcctggccctcgagctctgcccaccccacatccggttcctgtcctctctgtctgtcatcccacatcccacctggccatgacgttctgagtatcccactaaggcctgtgctgttcctccacccttcccttgagctcagcgagtccttctcacattgtctccaagttctgcctaccatcagccgggcttcaatccccaaatcctagccctccaagttccaagacacatcctcagagctcttacctacaacatgggctacaggcttgtcactcggggttcgagaagatgatcctgaagaggagagagaaaagaaaaagctgagacccttaaacttcctagaaaatacccccctactttcacctccatccatcctcccccaagaccaaaactttaaatttcccccactgcttccataccggtactaaccctacccccaaacccaaacccagaattaggaaagaggtttggagacacttactgactgcctgggccagagggctgattagagagaggtccctggggaactgttggggagaaggagaatggttaacatcgagggagtcacccttaaaggaggaacagctggctgcctgtctggcctgcgctcttagccctgaggtgtctggttttctctctccattcatctgtgtattcaccttccaggcattcaacagctctttccctgagtgtcttctgtgtgccagacaccctatcttcttctctccttatctcccccatctctctccttagctgtcatatttcccgctctttctgtctcaccatctttattcatatcacttgtttcttcccccatctctcttctcacaccccacatctgtctccatatcttatttatatatctgcttgttcattcattcattcattcattcactccatacacacttagtgagcaccttccatgtgccagacatcctgtctctccatctttctctctctctcttccccatctcttgccacatctctttctgcatccccgtctttctccacgtttttttctctccatccctccctatcagcgcacatctttcacccatcccatctctctccctctcttgcgtctccatttccccttgggtgggagagtggatgaaggctggccaggcactcacctcttccctctgggggccgatcactccaaagtgcagcaggcagaagagcgtggtggcgcctgccacgatcaggaaggagaagaggctgaggaacaagcaccgcctggagccctggggcccccctgtcttcttggggagcgcctcctcggccagctccacgtcccggatcatgctttcagtgctcatggtgtcctttccaggggagagagggtggagccgtgggtcagtatgtgagaggaagagaacctgcctggcagcttgtcaggggatgtggcgtctgagggttgttttcagggggggtctgtagttgcttctctccctcttagctggtcctctgctgtccttgctgagggagcgtctgctggctgggtgtgccaacaactgcctttatatgtccctggggcgagaggagggcggggaaagaatcattcaaccagcggaaaacttccttggtggagaaacccatgagctcatctggaggaagcggtagtgggccctgcaccttctgtctcggtttcttctccatcgcgggggcggggatttggaaagttggggacacacaagcatcaaggatacccctcacactccccatcctccctgctccgattccgaggggggtcttctgggccactgactgatttgtgtgtaggaccctggaggctgaaccccgtccccatgcccctcaaaacctattgcctccatttcttttggggaccaggtctgtggtctgtttccttctaacttccagacaggatgcaggaaaaagatagaactagaactgggaggggcttcagaaagctgagtccttgagggagagaaaacggggttggagggaaaagctgtgttgagtcctgaggcctgtgtttgggtccctgcggggagaaggagctgggggcttggtggcaggcttgaggcctcaggaaaggctgggtgggggtagcagggacaagcctgggacagccccggggagtgaaatcacccccgggaattcacagaccccactggggcaggccttcttctttcattctgacccggagactcataatgctggtttcagtcttggcttccaaggaactctggggtccctgatttttttcatgaagctctcacttctcagggccccagtgtgtggccatatcttcttaaacgtcccctgtattccatacctggaggtcctggaggctctttcactccctggggccctctacatggccctgtcttcgttaagggggggtccccatactcgacttccatagccctggacattctcctacccattgctgtggtcacatctccccagaggtctcctgtaacccattcctcagagccgctacatgtggccatatctcccaggagctccctgacccccgcccctccagaccctgacttttccttcatcttctcagcttctcctttgcttcccctgcagcagtctggcggcctcacctggtgagtccatcacatatccctgaagctctctgagcccttatccttttgttctccccacagctcttgctccctttgagccctctgtccctccctccattccttagatagactgggaagttctcactcccagacacacacacacaagcagacagcatttcagagaaaagaggtttattgggcttcatcgagggtgcagatgcctccgtgtggggctctggtcggcagctggctttcagagcctttccctgccttctggggccctgtgatccctcatgcctacttctttctctcttggtcagccttgtgcgcatgccctctcactcttcatctcttgggcctgtctctgtttctccttggatgttcttctattattcccctctctccatcctccataaataaataatttaatttttttgccttcataaatagtcccctccctgcctctagtcatcccccaagctcctccatgtgcctgctcttcctctgtgtgtggatctaggccccacctagctggtgggacagaccaacagctttgggctgggaattcctaggcaggcttgaaatcctcagccagacagacatcagggatggttcagggaggtgtggtcccctgggatgcctagaattccttctttgaaagctccggtgacttgatcagggaagacttgagctgttggaatggccaaaggagaggtggtgacgacccctgaaatggtcagaatggaggcagaatggggagaaggtcttgaaatcaattattttttctttctggatttttccaagttctacagagcgaaggctccaaagaagacagtactagggctgaggactaggtgggggatgccatctgtgtgggtggatagctggtctccctgggtgagctggaacgcagccccgtggtacatcgagtgcagccagggttcctgcagccctggatacaccatcttctgggagctgaggagaggcacatggaaggggtactgggaggagaagagctggacctcatgggccaggtagagtggggaggaggtggccttgggagagtaggctttcccagagaagaccacctgggagtagacgaagtagatgccactggtggggaccaggagagaattgttgctcaaggagaaaccatcctggaggaaggcacggtccgtgtttgctctccagagcagtgagttctgcttgctggggtctcctaggaagagccataggggatgggggtgggagatcaggggtctggatcagaggtctcaatccctgaggaagtgggcactgaacaactgagttcctgggggatggcagggggaggcataggagtgggctccctctgttttttttagcgtgggggaagttgggggagaggggtggatgcttgggttcctgaggcaggggtaggaggagagctggtggggacatgtctgggaggtcaggtggatgtttaccaatgaggtgagcagcaggtttgagggtgctgtgggcaagatgcatcttggggtgctgacgggcagtctgggcagctgaaggtgtgaggccaacaccagggagcccctaggggagaacagagttgaggggggctctagggctcaaggtttggctgagccaccccagcagcccccattctcctgctgcctcacctgggccccaggcagcagaaccagcagcagccccagaaggaggaggtgtagggtggtgccacacacccttgggaggaagagacgttcaggtggtgtcatggggagaacctgcagagaaagagagagagagagagagacagtgagcggggcggggcacgcggcggaagacagacctcccgccctgggagacagcaccccccgacccccgagagagagatcgacagagaaggggacaagatgcagtcagagaaaccccaaggtgagcagagggagacagagagagacaggaagggaacagagaggaatcatggcagaaacagagaatgtgtgacagagacaatgagactgacagatggagagtcagagacagagaaggaaaccaaaaccaaacccaccaaggcccaggcccaggcaggccggggatccaggcagcaggtgcaggagggaccgaggcccaggcagagggcaggacactgctgggcggtagtccaaagcacgaagcacgggcagcccaaggagatggggcaggagagcctcacctgctgtgcggagcccctgggcccggacgctcaggtccctttatagaggaagcggcagtggcagcgtggcaggcagcgggcgggttctaggtcggggctggggcccggggaagcccccagggcttagaagatactgctgtttcagtcaaaggcaggaaaggctgaggcctaggagagaaccacaggctgggggttcaggcgactgagttctgggaaagggagtcgggtcaggggaatcgtgggctgggagggccagggagtggggtcaggcctagagttccaaagaagggacagtcaattcagagaggaggtggttgagcagctggggtgtgagctggaggcccggttccctgaagagcaatcatatataacatctctgcacccttggctgagtacaggcttctctctttgcccatttccttctcttgtacccctgtccttgtcccaaacaactcaaatcatacttgtcccagtatacggactttccagcccatctggcaggtttcacatcaagaaggtccattatatatccccttcatcggggacattctggtgtttgcctcttgtccaggtgaaaatattaatggatcccccttccactcttgaaagtgtcctagtttggaagataaattttttggtccccttactcagagatgatgctggacagtcaagtatgatgaggtctcatctcactcctgaaggatgccctccatctcttcctgacttcaggtggcttccacagaacagatttatataaccccaaataaacacacattccaggatcaatgtggcagacaccttccaaagttttctacaaaggaagtttcagaattccacatgggtgaggcttaagggtggtgacttagggtggggtggggacagctaagggacttgttctgaagctgcatttgcagagccaatacattattttaaaattgttccaggcctggtgcagtggctcacacctgtaatcctggcactttgggagtctgaggtgggcggattacttgaggtcaggagtttgagaccagctggccaacatggtgaaaccccatctctataataaatacaaaaattagccaggcgtgctggtgcgcatctgcagtcccagctactcgggaggctgaggctggagaattatttgaacctgggaggcggaggctgcagtgagtcaagatcgcaccactgtattccagcctgggggacagagcaagactctgtctcaaaaaaaaaaaaaaaaagtttccaaaatttttttcctttttattgatatgtaacttaggtatgaggtggacacctcttaagtgtacagctgatgaatttttccatctgtatgtagccaccacccagctccacgtattttcaggtccccagcaggttccctcatgccccctccctgctgataccctccaaagataaccaaccactctctcacttttatcaccatagattatttcctcctggtttggggcatcatataaatgaaatcacacagaatgtactcatttctgtttgacttctttcagtcagcattatgtttgtgagattcatatacgtggttgtatgtatcagtaatgttttttaaaaaaattatgatgtaatattctattgtatcaatatattctaatatattctgttgatggggatttggtttgtttctagtttttgtctaacacaaaaaatgtctaacacgaacattctcatacatgagcccattttcacttagcttgcaagttacaaggtttaaaaaa

SEQ ID NO: 1176 - DNA, 900 bp, Homo sapiens
cagtctcaatgggggcactggggctggagggcaggggtgggaggctccaggggaggggttccctcctgctagctgtggcaggagccacttctctggtgaccttgttgctggcggtgcctatcactgtcctggctgtgctggccttagtgccccaggatcagggaggactggtaacggagacggccgaccccggggcacaggcccagcaaggactggggtttcagaagctgccagaggaggagccagaaacagatctcagccccgggctcccagctgcccacctcataggcgctccgctgaaggggcaggggctaggctgggagacgacgaaggaacaggcgtttctgacgagcgggacgcagttctcggacgccgaggggctggcgctcccgcaggacggcctctattacctctactgtctcgtcggctaccggggccgggcgccccctggcggcggggacccccagggccgctcggtcacgctgcgcagctctctgtaccgggcggggggcgcctacgggccgggcactcccgagctgctgctcgagggcgccgagacggtgactccagtgctggacccggccaggagacaagggtacgggcctctctggtacacgagcgtggggttcggcggcctggtgcagctccggaggggcgagagggtgtacgtcaacatcagtcaccccgatatggtggacttcgcgagagggaagaccttctttggggccgtgatggtggggtgagggaatatgagtgcgtggtgcgagtgcgtgaatattgggggcccggacgcccaggaccccatggcagtgggaaaaatgtaggagactgtttggaaattgattttgaacctgatgaaaataaagaatggaaagcttcagtgctgccgataaagatgct

SEQ ID NO: 1177 - protein, 240 aa, Homo sapiens
MGALGLEGRGGRLQGRGSLLLAVAGATSLVTLLLAVPITVLAVLALVPQDQGGLVTETADPGAQAQQGLGFQKLPEEEPETDLSPGLPAAHLIGAPLKGQGLGWETTKEQAFLTSGTQFSDAEGLALPQDGYLYCLVGYRGRAPPGGGDPQGRSVTLRSSLYRAGGAYGPGTPELLLEGAETVTPVLDPARRQGYGPLWYTSVGFGGLVQLRRGERVYVNISHPDMVDFRKTFFGAVMVG

SEQ ID NO: 1178 - DNA, 906 bp, Homo sapiens
tgctgactggcttcctgcaagctaccttccctccctgggcctcagtttctctctctgctgagccagaagatgtctaaagacccctttggttccaccctgagagcctgtctccctaacctcaacttcttccccagttcagagaacccaggcatccagctgccccaccccagctctgggtaacggagacggccgaccccggggcacaggcccagcaaggactggggtttcagaagctgccagaggaggagccagaaacagatctcagccccgggctcccagctgcccacctcataggcgctccgctgaaggggcaggggctaggctgggagacgacgaaggaacaggcgtttctgacgagcgggacgcagttctcggacgccgaggggctggcgctcccgcaggacggcctctattacctctactgtctcgtcggctaccggggccgggcgccccctggcggcggggacccccagggccgctcggtcacgctgcgcagctctctgtaccgggcggggggcgcctacgggccgggcactcccgagctgctgctcgagggcgccgagacggtgactccagtgctggacccggccaggagacaagggtacgggcctctctggtacacgagcgtggggttcggcggcctggtgcagctccggaggggcgagagggtgtacgtcaacatcagtcaccccgatatggtggacttcgcgagagggaagaccttctttggggccgtgatggtggggtgagggaatatgagtgcgtggtgcgagtgcgtgaatattgggggcccggacgcccaggaccccatggcagtgggaaaaatgtaggagactgtttggaaattgattttgaacctgatgaaaataaagaatggaaagcttcagtgctgccgataaagatgct

SEQ ID NO: 1179 - protein, 36 aa, Homo sapiens
MSKDPFGSTLRACLPNLNFFPSSENPGIQLPHPSSG

SEQ ID NO: 1180 - DNA, 854 bp, Homo sapiens
cagtctcaatgggggcactggggctggagggcaggggtgggaggctccaggggaggggttccctcctgctagctgtggcaggagccacttctctggtgaccttgttgctggcggtgcctatcactgtcctggctgtgctggccttagtgccccaggatcagggaggactgggtttcagaagctgccagaggaggagccagaaacagatctcagccccgggctcccagctgcccacctcataggcgctccgctgaaggggcaggggctaggctgggagacgacgaaggaacaggcgtttctgacgagcgggacgcagttctcggacgccgaggggctggcgctcccgcaggacggcctctattacctctactgtctcgtcggctaccggggccgggcgccccctggcggcggggacccccagggccgctcggtcacgctgcgcagctctctgtaccgggcggggggcgcctacgggccgggcactcccgagctgctgctcgagggcgccgagacggtgactccagtgctggacccggccaggagacaagggtacgggcctctctggtacacgagcgtggggttcggcggcctggtgcagctccggaggggcgagagggtgtacgtcaacatcagtcaccccgatatggtggacttcgcgagagggaagaccttctttggggccgtgatggtggggtgagggaatatgagtgcgtggtgcgagtgcgtgaatattgggggcccggacgcccaggaccccatggcagtgggaaaaatgtaggagactgtttggaaattgattttgaacctgatgaaaataaagaatggaaagcttcagtgctgccgataaagatgct

SEQ ID NO: 1181 - protein, 227 aa, Homo sapiens
SLNGGTGAGGQGWEAPGEGFPPASCGRSHFSGDLVAGGAYHCPGCAGLSAPGSGRTGFQKLPEEEPETDLSPGLPAAHLIGAPLKGQGLGWETTKEQAFLTSGTQFSDAEGLALPQDGYLYCLVGYRGRAPPGGGDPQGRSVTLRSSLYRAGGAYGPGTPELLLEGAETVTPVLDPARRQGYGPLWYTSVGFGGLVQLRRGERVYVNISHPDMVDFRKTFFGAVMVG

SEQ ID NO: 1182 - DNA, 209612 bp, Mus musculus
  misc_feature (1)...(209612): n = A,T,C or G
cttctgtcctctctgtcccacctccctacccacgtttattcccactctcacccctggtccttgctctgaactgggattcaaagtgtgcagccctgcacctgccttttttatgtgggatctaactcaggtggttattcttgtactgcaagtcctttactgagtaagctgcctccctagcccccaagtctcatgttaggataactgcacagtttcctaggaggcacgcccctccagctaggactgaatgaatttatgtagagacataccttgttggccttcctcactggctgctgtcgaccttggaaaattgcacaattgtgaaagtgttttcttttcataaagccctttctcacctcttccttccctctcaatattctagacttcatttggttgtcttaccacttcttaaaatatttgacaattcttgctaatactctgaaatacttctctcaaagataatttgcataaaaatgttgagagggagaaagaatagtagtttaactacccaaaggcattctatcatcattattttctactctatctaaaaaatacggtgtatatttaagatattcaacatttaaaaattgtgtgtgtacatgtgtgtatgtgtatatgtgtattgtgtgctcatgtgtatatatgtacatatgtgtagtgtgtgtatgtaaaatgacaatatcagcatcattcatcatctaccacctggttttgacacagaatttcacatttgctctttagtacagcaggctagctggcccatgagcctctgcaaattctcttgtcttccactaaatcactaaaacaccactgggattacagatgtctgctacagcatctgactttacgtgatttcgggtcctgaattcagattttcacatttgtttggcatgcactttatccatgaagccatttccccagctaaaatatgatgcacatacagagatatacttgagcaccaggaaagtcaagaaaactagcctactcattgctccaaggcttcccataatgatagcttttgtccattatgataagagctaaaatgtgtcttagcaatctctgtctgctgtacagcatcactactcctgtctttatgccgtaccttagatatcttggctcgttcatcttctatgactccaagtttgttcccttcaatctacttctttccatgtacttctctgtcctctttccattgttagtttcctggaatttctccatttaagaagggtatagttttcataaaaccaaaccaaaccaaaaccaaaacagtaacatggtagagagtcaatcttgttggaacagcccagaggaagttattttccctcaacagaacctctgtagaaaggaaagaatttgcccaagctgactttatggcatttccctgatagcttatgacctctccaatttcagagctttctgtcagcatgggtttctggtctcctttatagatgggattaatgtgtaggagtgtgaactcaagcgtagttattttcctatctcctgaagaagtcattctgtgaagaaatgcttctttaggctaaaacgaagccaaacaaagcgagagctcaaggcaattgataaacaggaatagaatagagtcacagccagtgatgcccgcttctgtcctttcctggtaccagactagactccctttgcctgtgttcaccagtcaagtcctgaaactttcctgacatgcttttccatctatagaaaaggaaggagaaggtatgcaaggcagacacaatagtactcttgttatcctaggttcttttccaaccacaggtcctgacacagaaggtctagggtgggtcccagatgctttattgcttctaccaggtgatactggtgtggtcttgtgagagataagaactcagatcaaagcaccccagactttgttgagagggagacttatctcctgagcctgcctatctatctatctatctatctatctatctatctatctatctatctatctatctatctattgctttctaccccgagggaatcagttacgtgcatctacattagaatctagcaattctacgtttgacacttgtatcaagattctattgcagttgccagctttcaggagttagtatacaagacgagcgtagctctacccggtctgcacattggaaccacttgaaaagatttacaaacaaatactaacgtttggaggttcctttcatgaccaaaccaggaactccacgcatgaggtccagaatgagcaactcttatgctcctcacttgaagctccttgactcaacgtggactcaagactgagacgctgtggtcattgtctctacagacacgtacagttctttatacttgcttttaaccggtaaagtatgcacatgaattcatgtggccaccatgatgtcttgatgcatgtatgcatggtaggatgatcaaatcagtctaatgactgtcaatcacatcaaatatgtgtcttctctttgggataaggacatcaaaactcttctctcttactacatttaaaaagaacagtgctattaactcatcttgcaacaaagcaccggagactacacagtgcctgtgcctacttcctgtgctcttttactcacccttctcctttttgagcctctggacattttttctcttctttctctccaaagtttttcgcatttcttgtggctcccagaaaccattttgaatcaaatatttggattttaagtttctaagcttgagggcaagttgattgtgttgttccacttctatcttagatgaagccaggttatactttcaagccccaaacctttgtagaaatctatctaagcacctgctgatgaacagaattgtagcttctcaaatcccagcctcctggctgacaattatgcctgactcttaggcaccacacaagaaccatatttgtgtatttgagccttctggaagtgacatgtttgcaaacatctcaaagagctggataccaaggaaagttcaatattctggaatccatggctttgcatgctatgaaagtgaggacacacttgagctagactccctgtcaagattggctgctgcttctgcttctgctgctgctgccactgctgccaatgatggccacttagaattctgggaattttccctagccatatcacgctgaagacagtctaggataatcccaccttctagattctaacttgtctcctttactgtgaactagacctttataatcaaatttccttcacccactctgctttaaagctgaaagaaattaaacatttctgggaaataattttaattagaattgctcttgttcttaatatttattaataacaccacatttctcatttgttaaaacaagaaatgtatgacttcaggaagacagtaatatgaacattttgtatacacacagtgttttgcctaatacatatgcaaatttataaaatgggctcaataacttctaacttagctgtgtttatttctcacttgctatttacttgtaatttacctctgcctgagataaatgtgcaggattcagtttgtaggtccaacatgaagaagtgtttttgtttttgttgttgctgttgttctgtgtttgaacacatgggtgctcacacacagcctcctaaacacactccttgctgtctctgcactcacagcacagttggaaaaaaaatcttgcaaatagtacgctataatattgcatgaagattttttgctctaatagtttatgaagattttgcttatattactcattattagtctccataattacccagaggggtgcttataactattgctaatttgtatatgtgaaactgatagtttaattgaaatccccaggttttttgtattactctctcagtaatgttgagactcaatctggacgtggcaaacggatgatcagtaggattttgattgttgtgaacgtttaccagttgatgacttcttacatgagcaatatggaaaatttgttcaattatgctttttaataaaatgttcagaaatgagagtaagagttcttacagttgtcctccataaggccagagtcatatcattaagacccagcaggagggacaggaaatggcatagtctaattactttactctcatagtctaaatggctagtctcaagtttgaagcacaaagacaaacagaagacacatctcccatactgttttaaaagtttatgacagcctttaaaattctctctgagttatctgttctgattggttgggtaagcaaacactaatgggtacctgggaaatatctaactctccatattcagtgctattgatgtaactcagtagatattttaaaaatggatttgaaacaatacaaaacatccattacccaattttggttggaacttccattttcttatccatgaacaagtctgcctccaaacaactaagaggagtaggccctccctgcaggttgctttgggttgtctcgtaattgacctgcttttccatctaaaggagagnnnnnnnnnnnnnnnnnnnnaaaattatttcccagaaatgtttaatttctttcagctttaaagcagagtgggtgaaggaaatttgattataaaggtctagttcacagtaaaggagacaagttagaatctagaaggtgggattatcctagactgtcttcagcgtgatatggctagggaaaattcccagaattctaagtggccatcattggcagcagtggcagcagcagcagaagcagaagcagcagccaatcttgacagggagtctagctcaagtgtgtcctcactttcatagcatgcaaagccatggattccagaatattgaactttccttggtatcccgctagagggggagagggggagaactggataacccccagaatgagtttgactatgtacatacctcagccaggagttagaacttgtggctggtgaatcaggaagatgggaataaggatgcttcctgggttaggtatcagggatgcagcatcagagtgggggtcctgcttttgttgatgggtttgtcatcacatagagatactagtgagtgtgtaaagcacaccaacccctggagggtagcgatagctgccctgctgagctatagtcttcaagatggtccctttgaagagcaggggaaagtggttgagcagcagcagaaagatatggcagagccaaaatggaagaagcagagctatgattctaaacctaagaggtgttttgaaacaggactcttgaggatgtaggttggtcggcaaagccatgggagggttgctttaggcaggctttctactgattcagtcaagtttagcacacttcaaaattgaagcagatgatgaaacagtacacatcatggtgtaagtgttgttaaggaaatgttgcggctgtgtctttgggtgtacacacacttcatgtgcatttcttatcctgtttacaaaaagctgctttctaagcagtttctgggaggagaaaaagcccagctgagcaagcaggatggtttcaaccgtgccttttcttttttaaagcacatggaatccttgttcccaggacattgggaactttctcaatcaataaataatatattatatagcaaatttaaaaggtttttaaattggcaattaaagatatacattctgtatatatttatggtaaataatatattttagtatatgagtgcattgtagagaagctaaatcgagctacttaacacatgtactacatcacatatctttttgttattgagaataaaatctacccccttggggactttcaaatatacaatgtattgctgtaactatggttgccgtggaaactgtagttctctctaacttacaattgctaactagttttgtgtcctttgactacatctgtccagttaccctacccttttggtccccggtaacttaccaccatttttttctctctgttttgtgtgtttcagtttggtactttatatgaatatggaacctatgtaatatgtaaatgcaaaggcaaatgcagtatttgtcattgacttattttacctaatgtgatgcccccaaagctcacccacattgttgccaatgacagggcttcctatttttgaagaatgcatgttattccattataatattattccatatatattattccatatataatacgttctgtttgatctcttgtatattgtttgcaagtagaggatatgtgtgagtgggggggatgtgtgtagtctccactgactgtgctatcgaggaaacagagttgaggttctcctgaagtgtttgataggcaaaggggtacaggaaaagtaagagtaaagagttagcattgacagtgagcgtactttgggattgataaaggaactgacctaaacctaacagtgtgcactttaggaagaagggtcaatatgcttgtactagaaagaggggtgcttataagtctggggttggatttgagatctgatgatgtaagcatctgagctgcctgagttgcatgaagagacatgatatttcaagaagatgagttggtgttggtttgaatatgagactgagaatcaggaagaatcgcagccacacggcctaccgtggctttcagtcaccgagtgcgattagatagatcggagagggcaacctaacctgggctaagagagaaaagaaaatcacttctgactattataattgatgccatgtataaatgaagacaccatgcacttaaagaagaatttatgctttctgactcatctttgcaggaagcagctaatcttcctcatcatgctaactgcgttctctgagggatactgttaactattctcataatgaagacttaactcaaatgccagtgtttttttgttttaaagtgcaccaaagggagaggagtatctatttttttaattaggtattttcttcatttacatttccagtgctatcccaaaagccccccataccccccctcccctacccacccactcccacttcttggccctgtcgttcccctgtactgaggcatataaagtttgcacgaccaatgtgcctctctttccactgatggccgactaggtcatcttctgatacatatgcagctagagacatgagctctggggggtactggttagttcatattgttgttccacctatagggttgcagatccctttagcttcttgggtactttctctagctcctccattggggcccctgtgatccacccaatagcggactgtgagcatccacttctgtgtttgctaggccccggcatagtctcacaagagacagctatatcagggtcctttcagcacaatcttgctagtgtatgcaatggtgtcaacatttggagactaattatgggatggatccccagatatggcagtctttagatggtccatccttttgtctcagctccaaactttgtctctgtaactccttccatggaggagtatctattatccttttgtgttttctaaccttatgtgcagttaagtgttctttaatgtacactaggaagagtttggacaaatgcacacacagacacctcacaatacggaacagttacatctcccagacagttgttgttgttattgttaatttatattatttatttatttcaccccaagtgttgtccccctcctagtcccccctcgccgagttcctccctctccctctcctttggctcggagagggcatcctccctgaatccccacaccctggggcatcaagtcttcctaggattaggtgcatcttctcccactgaagccagatgtggcagcccctcaaaagctattattatttttttctccttcctgtagtccctctactcctttcagaaatcattgtcatgggtagttagcatagacatcaccttaagctccatcacaacagcaatgtaaaaactgctgtgtgaccccctgtcaccactgccattgccaccatagctttgtctgtatttacgtttcatatggatgatctttttttttttttttttctgccaccacgatttttaagttaacctacactgtggcacataccaggcgcttgttccattatagattgaagtggttgtatgaatttgacaccatttaaaatccattctttttattggcagtgtttccagggtttgactacataagtgaatctgatgtgaatggttttctttcctcttttaatgttgcttttccttttgtttatgtgagttttcatttcacttgggtgaacaagtaagatggacttttggggttacagatgtatatttaactttacaagaaattatgctcagaactgctcatagcattttatatttttataacgtcttatatttatatcaaggtccagtggtcccattttcttatcagtgatgctagtattagcctttgcagctactctggcagatgagtgcggggccatcactgtgctgttagtttgtactgtcttcatgtcttgtgagtgggctgtggcacaccttgagacaaccattcaagttatatccccagcgtttcacaggaattctctatatattctgggttgactttagctatccacattgtggatattttctcccagactgttagtctttttttttttttttttttctcaacagtgttcttggatgaggggtttgatttacatcttgatgtgcccaatttatcaatacttttttaaatgttgattgctataagttttatatggtaaacttttgtcttcctcaggactgctaaatcccctcttgtgttttcttctttgctactttatttatgactttcacttttgttatgagatctgtgacctttgtccccttagttttatgtgacttggctccatcaccccatcaactgtccgtactgggagtcttctcaggatggatggctaaaaaagcatctgtaaaggatttgtctttcttctactcatttttggtcatgattgctcccacaaggcatttcccatcacattcccaggtgatgaccctgggcttaatttagtgtctattctctagatcattttgattgttgatttacatattttcttaatatgtaaacttgataagaagaacacagagtatactcttttaacttttattccactctgatacctgactcagaggtccacctttcacacagaaactatcacttagttgaattgcatcattgtttttgggagaactgattctgagttaggatttcaaacctgctgcttacaattttttctatttttagattctacctgaagaggagcccaaaggagattattttaaactatattttaaaagtagactattctttgtacttttaaagttcttttaaagatgtttatttaaaataatttttatttatatgttattatttgaattcattttcactttattatcatgagaccattaacattgttaaagttgcagccaaaaactgttgttttttcaaccttagttaatatccaaatatacattttgaactaattttatgcctaaaacaaacctacttttctgcgtaaaatagagcagcaatataaactacatatatttgctaggttctatgtcacatggagaagtgatagattttaatatttttttgatatttaatagattttgaatgattttatttccaaagaggactctttaatgtttttttttttcagattagatttttcaagatcaagtaatataatgaacaaagaatttgtcccatcaaatcatatttgtattaatagcatttttggaggaacattctcaacttgtctctgttacaacatcaatattcttaatttgtggaaaagagactccagcctatctaataaatgaaaacatgtttggtcatcattactactgaccactaagcacactcttccattagactcttgactgcaaagaggtgccttacagtgggttcagtgggaatttctgtttgtgatataaagcttggggttattgaaggtggggtcattggtcaccatgcttagtggattatgacacatgctatattattgtcttatagaatatagctatttcatctgctcatcttataaaattttccattttgatcacttgaaagacaaaggttgttcaataaagctaagtaattctctctttcttctttagaatcaagtttcttactgggaaatgcccaaattgtggactggcctgtagtttatagtaatgacggtttttgtaaactctctggatatcatcgagctgacgtcatgcagaaaagcagcacctgcaggtaagtggatccaacaactctgaaatcttttccaaatatgaacaagattctgagagtggtgagaggtttgtgtttacttatactcaagacaggataaaattaggtcgaagaagtaaaaaaaaaaagatttaattgtgaacagcaaatatgaattttaggagctgatgctgataactttcgcaaaggagaacttttgcttatatgtgaattaattcactcattaaaattttttggttacctatcataagccaacaggtcgcacagctcctgagtgatgagaggagtagtcagtagtagggagctactgatgacattggtgcctctgaagcaattaaaatagcacctaacaaaacagaaaacctgacctagccaagtggcgcatagttcacaagaacgtaaaggcacaaaaatgaagcctatctattacactgagccaatcatatgcctttatagtgttgatacagtcaatccagctgagccaatcacatgtctttatagtgttgatagagtctatccagctttttgctttgttttatgtgaaacaatttgatattgtattagttatgacaactttaaaaataggccatatctacaagtttatggagaattatgataaagggggatcagaaaacaatcaaaaacaaagaagcctatgtataaggaacttattcaaaatctaaaacttttctatcatatttcagtaaggacagctgggaccctacccccatttcctgctaccacttcagtttttctttcaatttctcacttaactaagtgttggagtcaaattattttggaactgaaaagaatctggtctgttctttctggttcaagttctaagaaaacataggaggtactgtgttaagggacttgcccagagaagtttctgttctctacccacttatactaagatggagggtgtgtgtgtgtgtgtgtgtgtgtgtgtgtgtatgaatgatcttcatcttcatgaagtctatatctgacactacacacagaaaagcctttgcaaaacagattctaacgctcttaaacagatataaccgtagttagcagaaatgggaatgtagggccagcagttggaaagttaagccagaaacttagatgatttcaatgtttgtcaaggcttgagaaacaatctgttcacacttcctctccccgtcctctaccagacacactcattttttcactattgaggttgtccctacattttgtctacactccaaagaatgaagtagaagaatgaatgaagatattgaaactgtggcctgggatggaccacacttttggtagtgtagcactgatatcttttcagcaagggtagacatttgaactttgtgcttaaaaaaaaataaataaaaaacaccattcccccaccatagaccactaagggtgtgttcagtgctctgagatgtggaagattggttttgtgcgacattgtttccatgtgttttcaggaaagtttaggttaggaaaagggaaagctttctggtcagccttatcatgtgggacagcactataatgagcccaacagagcacagacgcttccccatctcttcttcttgaatggtcagtagctcatttgtttgtgccagatgcttttttttcacccaagaagatctataattcctcaagtaaggtatgtttgtcctttatcggattccagatagttcatgtgtgcatctttatttgcaacttcaagttgttttaaatgaacttgccatatttgtgtgtgcatgtgttatgtatgtatatgtatgtgtgtgtaaaatgtgtgtgtaggtttgtgtgtgtgccagtgcctgcatgtgtgtgatatgtattagtatatgtagacataagtggctgtgcttgtacatgtggaggccaggggagagcatcctgtgtcttcctctattgctgttcacccctccctcccctnnnnnnnnnnnnnnnnnnnntccctccctccctccctccctccctccctccctaattacatgcttacatgtaaattaactcacccattaatattctttcttccttccttccttccttccttccttccttccttccttccttccttccttccttccttccttcctttctttctttctttgtttcttgtgacaaggtctttcactgaactagaagcttactatttcagttagggtacctgaccaataagctcctgggctctgcttgtctctgtcctttaacaatggggttacagatgtgggcacctatacctagcacttacacgggagttggggatttgaaatgaggtcctttgtgatcttactcactaaatcatctcaacaactcttatgggggggggggcgtattctgattgctttaattgttttttttagaagactggctattgccttctgaatcgctctccttcccgtgggctctctcccacctctgcagttttgagagagagagagagagagggagacagagagggagacagagagagacagagagagacagagagagagattcactatgtagccctggctgcaccggaactcactctgtagatcaggatgtcctcagactcagggatttacctgcttctgcctctccagtgctgaaattaaaggtgtgcaccaccatgtctagtgctatctggatatctcttaaattttgctttccttcttgtgtcccatatgcttgtcatatcccataatgttttatttggtaaatgtagtgtttttttcctacaggcaaaggattaaaaatgcttgtgcatcatatttatacatcttttattgttctaaaatagttactttctccttcatgttgccagtgtcaggagaagtcccttgaaaattagggattccatcatacttacttaaaaaaatttaatttgttttatatcatttatttattcttccatccatcgttcggtctgccggcctatgtgcctatctctgtctgtctgtctgtctgtctatctatctatctatctatctatctatctatctatctatctatctgcttatctaattattttgtgtgtatgtgttatgtgtcatggcatgattatggaggtcaaggtacaacatgtgaaagttggctccctacttccaccatgtaagctccgggaattgaacttatgcagccaggcttagcatgtgacctttctcactgagttgtctcaccagctcacactcacttttgaatgcactatgtacacaatacaagagtgtttattatctgtctttgttaaattatattgttttgctttgcagtaaattctagcataggtctcccatgttcctgcagagcatgcttttatttatggcatgtcaccccgagtgttaaagcgtttcaagaaatttgggatgatttggactttcccattgcgagcatgtcttccctcaggtctcctgcacctctgagagacaatctttcagaaatggctgcattttgaataaacagcctttatgcacttatacactaaatatgaagtgtgttttgcttatctaaaaactgcagccatttaaggcctgttcagagtagctgatgaaggaacagactatacctcagccctgacagctttcattggaagtatgattgtgtaaacaccattccattttgaattttctctttccattttaaataacagacaaacaaagaaaaactttacccattttgggtggactgcaccattaagagtgaagaccaagaaataatcagaatattgagttgtaggaaatttgtttaaaactattatcacgaagtcctaacttcctaaaccacatatgttgagagcacaacagtgaacaaagcaaataacaaatttcaagacaaaaagaagaccacaaccaaacaacccatatatgtattagacaggatctgtgctgtgagtctaatttttcacaacatgcagttttctctccctatttcttgagtaattttataaaatcatttggacatgagatgcaaggagacagaggaaggggagaagaaaattacacccagatttagaaacataaggttggtgttaaaggtcactacattatcggcagtgattccagaatcattgaattaaatgtgttgatcagtcacttcgcacagccaaggctttgaaaagaaatcaaactattttactggtttctggatctgtgcaattctttttactaatctttaaagttagcatacaaaggaaaggggttcattatgacattttcacaggtactgtactttcactgtactttgttatctttctgtctatctgtctatctatttatctatctatctatctatctatctatctatctatctatctatctatctatcaatctatccatttatccgcccacccacccacccattcatttagtttttacttattcactttatattctgctcactgacctcctcccattcacctcctcctataatccttccctccatcccacccctcttctcctgagagcagctgagctctcctggatatctccccaccttggcacatcaagtctctgggggggggtaggcacatcccctcccactgaggccagacaaggcagcccagctagaagaacacagcccaggaacagccaacagcttttggtatgtccccccctctagttgtttggaacccacatgaagaccaagctgcacatctactatgtaactgcagtgaggcctatgtccagaccatgtatgctctttggttggtggttcagtctctgagagccccaagaggccaggttagtttactctgttggtctttctgtggagttcctatcccctttggggcctgcagtccttcaccctgttcttccatgagagttcccaagctctgtcaactgtttccctgtggatgtctacattggtttgagtcagctgctgggtggaggacagccatgctagattcctttgtgcttgcctatgagatgggtctcaagttgggctgattattgtttggccattccctcagtccctgctccattccccttccctttattctttatcttcctctcccgttgtcttccctcacctccccagctcctcctctctggtccttttcctcagacagtcctccctctgatttcaggtcacaggtattctgttactctcctttctatcacctctctgttcagcgcaagaaaagaattgataataaaacagtatcactaaatctggaaaggaagatgacataaaatttctttccaatgatgcaattcatcagaagagtgggtcttgaggccatcagcaaaaacagtacaatatgtagggtctaaacatgtttttttttttttttttactgattttactgattacttttattcaaatgtatgaaaataagaagtcagtgactcacagatcagtgagtctcagctatgacactgtgtagcagagaaaaggaaccgcgtggtgtgcgttatttgattatttgaattgaagtcagtaggattaggatgatgatgagaaaaatagtggcctatcataattttaaaacactcaaatgtaaattgctctataggaaaactcttttaagaatgtcaaattattattattattattttggtgtttatccaatatcaagagacagatttgtttcatttgccttctaaagtttttttttttttcatctattgcccaacttctcctgcactgaactgaatcaaaataaacacagttctcggcttgtctgagtgtctttcctttttcaaaggcttcctttcatccgcccctcgtgcttgtcttcttcctaagctttgcctcggatgttcatggtgttttcctgcgagtagcatccctactcatttgattcttgagctggagttgctttcgatatgtccgttcctaagagcttcaggcttgcactatgaagcactattggttacgaagcactattggtgattctgactatcttcttccaccattatgacttggagacctctttaagcttctatgtcacattccacttcattgggattgactgcagttgagtgactgtcacagcctttctttcagttatccattcaatccatgacattcaatttcccatactttacatctcaaactaattggagatgagcaaccttatatacatcacagttttgtgtgggagaaatactttatctttgagccagaaagcatatggaaggaggcagtatagtatgcagattctgtaagggacccctcacatttgctgcctagagagcccgtataacttcacagtcctcagtcatagctgaggcttctggtttctacctccttgttgttccctaacacacaacactcttttacttttgttttcaccagagtaaaacaaaaaattattctatgacatatcaggattccaaggaatttccaacttattttgttttataatttagtaattgaatttccaagcatcagattgtttgctgtatattggtggatacaaaaagtattggttgttcaaaggatgataggttttaggggaggaagttctggcattcaaaacctgctgtcagggcttaggtggggaccactacagcctccatttctcattagcctgaaactttggagaaatctgttctgcttttgtttctgggatagtggggcagaagagcagttgtgtaggctaggtgggggggggggtgcttgaggagcagcagatattttcaaaactactgccatccattggaaagccattcctaatcctaacccaagtcatcatttgacatcatagacagcaaagcagagatattaagtagactgtgagattccaccagctcttatgcacacaagagtgcagtggacatgagggatggaagtcagtgcattctgttgacggatgaccctgcttctcactgagccactgaggaaaattgtagaagggaaactgtaggggtatctagtactattctgattttccttaattacctgccatggatctaacatttaggactctgtctaaattctttgaagggaatatacataaatgggttgtagaaacctttttgttaggacagactgtataaagcaaaagccttcaaattctttttaaatgacttctttcagatgccaaagatgttgattttgtttgagtttttagcttccccacttagcgctctctctctctctctctctctctctctctctctctctctctctctctctctcagagctcttttgttttcttcttctttgactacatatctcagtttatgctccaccctgactctgcagttgcaaccatttccaagctgaaccccaatgcttactcacagcataactcactctgttggttctttggtgagacgtttgttgggatgtagattggtctgcacacacagacctttgtgagtagtgcctgtatgtttgtgatgcatttgtctagggccatttctgccaaaggaaaagcaagaccagttgatggagcccgtgattaggttatttatttctttacttttagagttacaaagttctgtcctctgttggaagtctatcaatcttacagttatcttggttgttaaatacaatgagaactgtttacaagatttccagaagagaagacaggatgcaagaataaagagcttctgctatgagctaaagccacatatctcaaagatgtgcttagactgatatagatagaagataagcagatgctgagtcaaacctggtcaagcctggaatagttctgaagagaattttccccctctagtcaaagcttaaatatttttcccaatttttttattagatattttgtttatttacatttcaaatgctatccctaaagtcctccataccctccccctgccccctccctgctctcctacccacccactcccacttcttggccctggtgttcccctgtcctggggcatatacagttggtaagaccaaggggcctctctttccactgatggccgactaggtcatcttttgctacatatgcagttagagacataagctctgggggtactggttagttcatattgttgttccacctatagggttgcagacccctttagctcctagggtactttctctagctcctccattgggggccctgtgttccatccaatagctgactgtaagcatacacttctgtgtttgccaggcactggcatagcctcacaagagacagctatatcagggtcctttcagcaaaatcttgctggtgtatgcaatggtgtctatatttggaggctgattatgggatggatctccaggtgcagcagtctctagatggtccatcctttcgtctcagctccaaactttgtctctgtaattacttccatgggtgttttgttcccaattctaagaaggggtgaagtatccacactttggtcttcgttcttcttgagtttcatgtgttttgcaaattgtatcttgggtattctaagtttctgggttaatatccacttaccagtgagtacatatcatgtgagttcttttgtgattgggttacctcacaggatgatatcctccaggtccatccatttgcctaggaatttcataaattcattctttttaatagctgagtagtactccattgtgtaaatgtaccccattttggaaaaaagacagcatattcaacaaatggtgctggcacaaatggaggtcatcctgtagaagaatgcaaattgatccattcttatcaccttgtactaaggtcaagtctaagtggatcaaggaactccacataaaaccagagacactgaaatttatagaggagaaagtggggaaaagcctcgaagatttaggcacaggggaaaaattcctgaagcaatggcttgttctgtaagatagagaatcgacaaaagagacctcataaaattgcaaagcttctgtaaggaaaagacactgtcaataagacaaaaaggtcaccaacagattgggaaaggatctttacctatcctaaatcagataggggactaatatccaatatatacaaagtttaaatcttatccctgtgttcaaatcttatttaggagcaggctgggctaggatgtttgcttcaccctcatgggtttacatgagaggaagtcacagaacactgtgtgtctccctgttagctgtagtgactccatcttttagtaaacatgatctgatttgcatccttggatgtgggaaagcaaagaaggagagctgagctgtgggttttccagccatcacatgacctgttacaattcatgattccatgagtattatccttttaatctttacctctgaactattagcactattatcattttgatcagagaggagaggtctgatgactctctcagcaagtatagttttacaggtggctgtctaagtgcaggtgtccactggtataacggctcttggtaccacaggagagatgggtcactgctgtgagaacaattccattttccttccaatgaaataaagtagaagtcagttgtaattcctaaagggcagtttaacattctgtatgagcagaagttatgtagcataattgctacttctaaagtgtgagtccctttaaattccattaaccattggctgactgcattggattttgtcattctaagtcagggcttgaaaaattgtgacaaaatggtcagcacctgcaagcaaaatgagcaagcacacaatcatgccctatccacatagcgatgtagcattgtctgtcagtatgatttgggcaaactttagcagaaatagctatgtatgtatgtatgtatgtatgtatgtatgtatgtatgtatgtatgattgtaatttattacatttttatttattatattagttattaattgtgattaaagtggaaggatgtctcttaatgtttttgaatttctgatagccagtggcattgaactcttattttttcttcacgtagctgtggagtcatgtatttctttgcttgaacaaacaaattcaggtaatttgttcatttccaatttgattcgattcttggttgagcattttaaattctttatgtgttctgaatgtaatctcttgtcagatggaagcagttcaggttctatagctcccatcactgttggcttgcagggatttctaccgttcctcttgttgcctctgctttacagagcctcacccaggccattgcctgtgtcaaggtcttcaagtgtctctgctctgacttccagttgtttcacagtctcaggcttcaagcttagtgcttacaaactgttttctgttgatttgggcataggctgggagaaagaaatgaagtttggttcttctgcatatgcatattgaggttccccaggtttttttttttaattaggtacccaggtttgtttattgtgtatactctctaatgtatttgtgtgtgtgtatgtgtgtgtgtgtgtgtgtgtgtgtgagtgagcatgtgtgcacataactcagtgagtgagtgattgtatgactgtataagtgtgtataagtgtgtatgtctgtgtgtgtgcatgtgcatgagtgagtatggtgtgtgtgtgtgtgtgtgtgtgtgtgtgtgcacatgtacatgagtgagcatgtatgcatgtgcctcagtgagtgagtgagtgattgtgtgagtagttatgtgattgtgtaagtatgtgggtgtgtgagtgtgtgtgtgtgtgtgtatatgtgagtgttttagctcccttgggtatagacattttctatagatatatgaacttatttctgaagtctctactctggtcccccggtgtgcatgtcagaatttatgtagtacctatgttgttgtggctactgctgtcctgtagtgtatattacaacctctcattgtatttggctccagcttttgatttttttttaattctcaagatgcttttaaatcatggggtatagtgtgctttcttatgaattagaggaaaattttgtttctgttagaatggcagaattgtgatagaagcttcaagacagttctatattttgttgagtcatatggacatcatagcaggattaattgctttaattcacacacatgtaagatctttccatctgagcatgtatatcttccaacagttattcatctgccttttacagtttccattgtagaggtcatttattctctgagattaatttgctcccaggtatttgatattttcaacagctattataaatgagcttgctttatgattcttttctcagcaagttcattatagcacataaaattactcatatttctatattgggtttatttcctgaaactaccaaatttggctatcagacctgataatcttctgatggtgtctttcaattatggtttctaaacaggataatctgattctctttttgtctggatatcatatttctttcctttatccaattgctctgactaagaatgtgccgtgctctgtggatcacgtgagctgcatgtgttatccagattttataggaaacagtttcaatttttccctcccaactcactatgattttgctctgagaccattgtgtgtggactttttatgttgagttcatttgttctctttcgttgtttatctcggatgcttctttgatgaatgttgatgagagcgctggatgatcggtccattgatggaaatgagatgttgatgtccacagcagtcgctatagtataacctctttctttagatataacaatatttatttatttttttttgcacattgagtattttattgtattttattttttccgagacagggtttctctgtgtagccctggctgtcctgagactcactctgtagaccaggctggccttgaactcagaaatctgccttcctctgcctcccaagtgctgggattaaaggcgtgcaccaccgccgccaccaccactgcccagctttattttaatttttgagacagggttactctatgtaatccctttatgagatattctagcattagttagaagtacatgttacatcccccactgagtggattcccctcattagcccatagataccacctctctgtgactttctaccatttttgatttaaggtctgcttgctaagtatagccattgttgctcgctcacatgctccatctcagcccgtgtctgtaacttactgtgaaacagtaagttagttctacttgtaagcagcacattgttgggtcctgccttttacttcacttaggcaatatttttttttcctttggggcttctgatgtgtttgcatccaaggttattagcattatgtatagaactatttgtgtcattttctttgttttctggtttcaaatggccatgttgtagtctttggctctgggctttatctctgttgttttctgtgtgagtgagattcgattctttctaacttttatgtaactgctcttctagagagttttagtcttttgcatcttctcagagtggtacccatcattatttgctctttcactttcaggtgtggcttcccttgagcatcatcccgttaagggtgctttagcaatgatggattctctaatttttcctttggactttggtctcgtacattgtttagctcacctttgttctcccataacatttctcagagcaatagtcgaagttaacaatttttcccttctaacatttaatatggtgtcatattcccttacagtctattagttttctgctgagaaatctcccataaatttaatagtggtgaccttaaatgtgagtgaatgcttttatgtttttagaatctggaagtttggctgtgaaatgcaacagctaggatgtgtttgagtcaaatctatttcttgggctttctgggtctcctctgtgtctgtaactctccaagattaaggaaattatcagctttttctttgtcactatggaagtttcattttctattttctttattaagataaggtctcatgtagcccagcatggctttgaactcactatgtaaccaagggtgacctcaaacttctgatccttccgtttctgccctttgcttctggagtaccagataatgtgccaccatgtcctgttttacgcagtgctgggagaacaaagccagggctttatccattctagggacacattctactaactgagccacattccccatctctaactggaagtcacctaagactgaaagtcatcatattcttgagctacagcactcctggataagcacccagaggactctgaacccaccactgagagactcacccatccatgaatgttgatacaccactcaccatagctgagtaatgaaactattctcaatgtctactgatagatgaatgggtaaagaatgtgttacttatattcaatgggatcttagtcagccgtaaagaaaaatgaaatcatggcatattcaggaaaatggatgggtctgggactcatttgttatgggaatgggctttctgttctttactttccttccttacctcccggaagcttcataatttggccatttattcacttacacatgtctcataagtcttagaaactttctttgttctttctaatgatctttctcttttatttctgcggtgtaatagtggtactccaaaagctctgtctttaggttcagacatttttctgcttgatctagcttgttcttgaggctctggttcatctcttttatttgacttttttcatttttcatgtccgaggtttagaattggttccttttgatgaattcttactcatttcattaattgattttcctgtttcaaagaattatttaaattatcttgtatgtcattgattgtccttggaatcattcttttgagttcttgctcaggcaatttttcctattttcctttccctggagtcttgttggagaacaattgcactctttttgatctatcctgttaccttgcagtttcatactccatgtttcctcctgctgacatttgcatttctaggggatcagttctattgtaagtggtgcagcaatgtccatggatgggcaagtatctcagtggtggatttagagtcctctggtgcatagtaggagtgatgtagctcaggaatatggtgattttcagtcttagataacctccgtactagagatggggaatgtgcctccactactgagtgattttcatatttgaagaatttctttcctttcctttcctttcctttcctttcctttcctttcctttcctttcctttcctttcctttcctttcctttcctttcctttccttttccgttagactatattggctttggttcaagttgacccttacagctatggtctccaaacaacttcttcaattgcaataaatggctgtgagcacaattcactggaagcagggcatgaagcctgttgttctctgcagggctgccaggtggggctattctagcagccaaggagggtatggtacacagagcagtggaggaaaggtgcttacctagtggagtcaggcaacatttgtgtaatgtagcacaggaacaaaatgtgaggaccttgtgtcaatttttgtggaccatgttccagtgaacccaggctagaaggtccctgggcatgtgtggtatggttcccatggtaaagggagcaaggctcgtgtgtagtacagagtgcatctgttaagcctccagtgatggtatgtaggtggagccatccttggagagagtgtgcttcatgaccacagctcctcagtcatctaaagcagtgtaataggatgccctccccaaagactcagtgagacttcaagattgctcggcagcaaaaattcagggtgtcagtgttagctgttaaggggtctcctgtgtatcttttcattgtggtagaacgttccaaatataaactggtcttgccctgggaaatggggcagttgataataggctttggaccctgttttactcaaatgtctgccctcgtgccccacagtacttctgtttcatctgctctgcattccatctctttctggtgagtgaatacgctgtttgaatagtatctgttcttcccctgccccttcagctcttcctttctttagagccacttctgttgccactagctagccatcttgttgttggctttcttctaccattaacaatggaaagcctttatggcaagtagaggcttgctccttgatcctgtgtttactttatatgttctagccatatctaaaacatgtatctgtcccagacaccagcttaggaattcttctaggggtcacacttgtttatgagccatttttcttgtttgtgttgattgaaatttctctgaaagtgtaaaatctttcaactggtataccaatttcttatggtctcttctgacttcacttactttcaactgttcacaattattatctttcttttggggggggtggaatttagtatttgttgattaatctctacttcctattgtccatttttaaaatgttgcatggaagtaacatgaggagagaaaagaaaggaagcacagttatgtggtacaccatttgtatgaactaaatatacaatgcagcagttatcgatactgacaggctctgaaggacatgatgtgactgtttgcatctctagataggcagctattattgatgataattcccctttgtccttaggggatatgttctggggcccagggcattctggaaatagtgataagtgcaaatactgcacacctgttttctcctatacatccaaatcatgatgtttcattcataaactagagatagtaagattttagcaataataataataataatcacaaagaacaattataataatccattggattgggatgtgaccactctaaaatacatctttttttcttcgtacctttacttttcaactaatgaagtatcttatgacttctctttggaaaaacctgaatttgcagagtcattattattgtatttggggcccattattaagtaaaataatggttgctagaatatacacactgccgaactaaagtggctgatttgctaaccgagagtgagactgtctgggtagcatgtagagtgtatagactcgtgtagaatttgaatatcctgatcagggcatggggttcacatcactgtggtagatgaagcagggtggcaagaactttcacgtttagaatgatagacgactttcaacgtttgagttgtgtattctagaatttgtcattttatagtttttgatcatgcttgaccatttgaaactggagaaagcacaatattcgataaggggatgtgactggaccagtaactaaagtctctactgatgtgaaacatactgaaaagaatcatggtaattgaaattactatggtagtgcatggtagtgcatatggaaaccatttataaccaggaagtactctctctctctctgcctctctgctttgctatgtaagtaaagataactatcagcaggaagttttagcagcagtgattaaaacatggcttaatattttactgtctttacatatcctactacagatcacaaatttctagtgctacccaataagatttgcataaataatggcttgcatattttgagttcattgtgtggggacatcgtttaaggcaaaatgaaatccttaatcatagacaatggtgtgattgatctgtgacacagaaatgaaacaggcttttctcttccagttttatgtatggagaactgaccgacaagaagaccattgagaaagtcaggcagacttttgacaactacgagtcaaactgttttgaagttcttctgtacaaaaaaaaccgtaggtatttttgttaccaataagatgacctaggtctttctaaattttagtttgggaagtggtagctaagcaacaaggtagagaagattacaatgcttcattactgctcttggtgttgggggagaggttgctggtgaaattagattgaaaaattaatgatggttttacccttgaaaagatcctcttgaagaatggaaacaaacatggtgtgtttcattctactttcacaaattaattttaatttttagttagtgaaaaatatattatatggatgaatgttttgcttgcatgtgtgcatgtgtaccatgtgcgtgcctggtgcctgccaaggtcagacggtatcaggtctcctgggactggatcacagatggttgtgagccaccatgtggatgttggtaactgaactcagatcttctgcaaaggcaaaggagctcttaactgctaagccatctctccagtcccacattgttattttaaacattacagtgtttcatatttattggatacaaagtgaccctattacttaggagtgctatgtgaatacttaaatcaaacaaggaacactcaacatttcaaatatttactttttgtgataagaatattggaaattgctctcttggcaactctggtgtctgcagtttgctgttattattcaccgtattcatcatgctgtgcaatacatctcacacctagacatcgtgctgtgtacgatgatttttttattcctttaacattgttgcaaataccacaaactctctctccccccactctgtgtgtgcatgtgtgtattgtatatgcatgtgtatacgtgtatatatatttgtgtattgtataggtatgtatatggggtacacagattgtggaggccagtggaggacattagatgtcttcctccctttcctcctgtattccctggagaccagatctcttacttgagtttcttactttccaggtagactaactagtctgtgaaccgcagtcatccttctgtctctgtcttttccttttctcccagtgctgtggtgattcacacacagagccgtgcttggctttttgtgtgggatccatgcaggtccttatgcttgctcagcagacattcctacccactgagccatctccccagcccaagaaattcttttaaagacggaacagtattcacttcatatacgtacttcattgttttatccatttatgtattgatggacattcagatcaataataaattggttcctgtgaattgtagtgcaatgaatgcaagtgtgcatgttttgtagatttcaaatcttttgggtaaatacccagctgtgggactgttacaccatatggtggctttgttttaaaaattttaaattaattccagagtagggttttttgtagtgtctgtgctaatgtatgttcataaatacattattagaggagtcccttcttgcggttactacacaaatatcagtgaggtggatatatggttatttgttgtcagtctttacaaatatatgctttacatagacttgaactgtttcctgtttaagcgtgatgggcataggcgttatccccaggacaggacagtcacatctggtaaatatctgctgatattgtgaattgttctctaggattagaattgtacacagtctgttgctacttatttcatcacatagaacctcatggtacagcccctatttgggaaaaataaccaaccaacgaaccagccaaccaccactacatgcacatcctcaacaatcaagtcttctatttaacttgatggctcctttgcatggtcccatgaactttgtttctttttgctgctttctcaaatgtcttcctcctcctccttctcttctccttcttttctttcttcttcctcttcttccttcttctccttcttcttcttcttgatatgtagagtcccttcatagtccttaatcaagaagccatctctaaatgacatctgaatgcaaaggaagaactattttctccaatgtagtctctcactgggtatattgactacacttaggacaaggcccatgctctgcagtagatggcctacatgaaacannnnnnnnnnnnnnnnnnnnnnnnnnnnnnnnnnnnnnnnnnnnnnnnnnnnnnnnnnnnnnnnnnnnnnnnnnnnnnnnnnnnnnnnnnnnnnnnnnnnnnnnnnnnnnnnnnnnnngggtgggtatgaaggtggggtgggtatgaaggtggggtgggtatgaaggtggggtgggtatgaaaggtggggagaagctgagaagagttgggagaagagaaactgagatcagaatatattgtaagaagaatttatttccaataaacatctatatgtgtatgtgtgtatgtgtgtgcatatgctttcatgttaagtgacagcagtaactatatacatcttcagtggttgctatggtttttttaagtgtgggagacatcctcagtagaacatgctggttctaggttcgttgtatgttggatttcatggtgcgcagtttatccttccctttccttcgatctgttattctttatggaatacatggaattaaaatcagattttcttttttatcactagacccacgaaaggataacagcccccatggacattgcttcacagaagtgcatttggcaatggaatcattttctggttttacttatcgaaacgttcaacaatttatcttgaatttttagaaccaaggccaaaaagatatttctgtctgaagtcacactcagctgccagtgtgtcacacagaaagccatcagttctgaatgatcagttcttcctgctacgcaggctatacacattttcttggtcttcccttcaggctcaaatatttatttatgattcataggatgctcaaatgcccaagctcccttcattttcacagagatatttctagtctttagatgacttagatatatggcccaagtttagcaaataattgaagatgacttaccctcacatttaagtagaattaacaaatatttgctcaattttcagactttgtagccaagtccatagtttgagggtgtcaaaactacttcaatgggattctatttttttaaatttatttttaaacatatggaaaataatttgaaatttacatttttacaattctccttctaggatagttatggtttgaaatgatgtgacttttgttcacctctgcccgatctctttaaaaaaattttttttattaggtatttttctcatttatatttccaatgctatcccaaaagtcccccataccctcccccctcaactcccctaaccacctactcccacttcttggccctggcgttcccctgtactgaggcatataaagtttgcacgcccaatgggcctctctttccactgatggccgaccaggccatcttttggtacatatgcagctagagtcaagagctccggggtactggttaattcataatgttgttccatctatagggttgcagttccctttagctccttgggtactttctctagctcctccaatgggagccctgtgatccatccaatagttgactgtgagcatccacttctgtgtttgctaggccccggcatagtctcacaagagacagctatatcagggtcctttcagcaaaatcttgctatgtatgcaatggtgtcagagtttggaggccgaatatgggatggatccctggatatggcagtctctagatggtccatcctttcgtctcagctccaaactttgtctctgtaactccttccatgggtgttttgttcccaattctaagaagtctgcccgatctcttaagggaactgagtattgctatatgaacatctgtatacagctggtaggagacaggccctgctaccctgtagaaagctcctgttctcccctgtgtgctctttgcatctgtctttaattttgattttcctttaataagaaggatgagtattatcaatgcattagggtagaacacaagcattttagccagatttaaaggaatctcacaagtggtcatctcaaacagcttttacacatcaactacaaaaagagtgttgtgtgactttgaaaaatgttagatggggaaattgatatatcttctgaaggctggggaatgcctgaatgccaatccttgtccccaagactttcatcacataattaagttacagtaaacagcattttgcaaatggggcagttgaagtttctgatttactcagtcaaggttgacatttcagcttgtaacctttttaaaatttcttcccatttagtgtcctattaaaaggaggcatttcctattctggggaaagtttatctttggggacaaagacagaatctgtctatgttgctagtgcccagtgcccacgcctggtgcccaagccctgctctgggtgttgggaagaatacactctgtccatccatctcagactccttgtctgagcccattctggggaaagtctgagcctatgagctgaaaaaaattctaccttgatatttggaaacagcttttcagacagccctgtctctgccagaattccaaagtggctgtttcggtaggaaggcatgactgtggcatcagctcttcttgtccagatttctagcaggcccaggaaaaagaaaaggattttcaatgctttttttctttgtttataaccctctctacctctagctcaccaagttggaacagccacaggccatgaacacagcagtgtctggcagtggttatttgtaaaactgtatatcactcacagttcccagacacgctgtgtaagacgagagcaggaaacagggaggaagcctggctgggagatgatgggtttgtttccaagtttccttctcattctgcaatcatctcagaaagggctgtgtcctcctatggacctgttagagccacagagcctcaatggccggagttgaacattatcttataaatctctctgcagtggtctgggttctggagcctgctgagggactcaactcatctggtgtaaatggcaagttagcccttccatgacttaggtagattcctcaggtttagcaggtaatttaagagcactattattacagtgaccatttagacagaattgacagtggcattaggtgacccaggtttggatccaggtatgaaggaggttgttacttggttttcatgggggaccactaagatgctctaacttctcagctgcatcagctacacataacctcttctgcccctaagcatggacgatttgggggcttttattgctcttttgcttgataaaaatctgatggaaaatgaacttatttacttactatgtttttttattgtgatagaatgttctttcagtgtgctgctgctgtgtggataattattcccttgaggtatttttcatgccttcatctagtccattgttgcaatttatttgtcaattccgaggtctgtccagaccctgagctttaaaactgtgaaaccctcatccctctggagagcgcagtagctgtttcttgaagaatgatgtggcgcagttgagcctccaggggcaggaggcagtggctcattaagacaccggagattcttaagccctgaacacacatgctgctttactttacctttgatgattgccctaaaagtttcaggtagcactcagtgtacagtaagtatcaagtattggtgatgtctcctgtgaccaaggacacagccatcaaagcgtcacctaagtccaccccatggaagagagggccttgggacagaagcagcgtttgagatgctcttctgggagtcaagtttgtcagggtggtaggtgttgctgctgcagctaattggaaactcttgtcaaggtgacaagaccagagaagcatgtgggagtgatcacacttgatgagtttgtcagaggccccaggacacagacctaaaggtgatgctggtataactttcggagcaagactgcctttgtgtgcacaagttgggaagagatcctgtacttttccttaaaatgttcatatttggggctaaaaatacactcattaagtctgaacaattggtagctgatagagagttaaacagttttcttttgttgctttagattgagatttaattcaaggccttatgcatacaagatagcatacatatgcatacattccatcagtgaactacatccccagctcttgttaaatttttaattttgttctcaattatttatgagacagagtatttctaagttgcccagtaaactctttagctcactttgtagtagagaccattcttgaatctgtgatcctcctgcctcagcctcctcagtatatataaagcctgattataggcctgaaccagcagctctggttaaagcattgtttttagtattgtaacaaaactgctgttttggtgctgaagtaagggaagagatggtagagtcatggaagctaacccttgctgtggccctgacacccctctgtcctctttctccctctttctcccctacaggtacccctgtttggttttacatgcaaatcgcaccaataagaaatgaacacgagaaggtggtcttgttcctgtgtacattcaaggacattacactgttcaaacagcctatagaggatgactcaacgaaaggtaaggtccaaaacagagtttttgtacctaagaattcggtggccttttatctgcctctttctcctccttctcctcctcctcttaaaacaccaaatctatgtcacatccacatataataacctaactttaagttgaaatatatcattaataaagcatgtcttctgacaacttaagtattaacaattaaaataagtccaactggaataaaataaatacattaacaaaaatccaatgaattgtacctattatcacatgtatggctgcctcaaagccagtagtatcccaggagctaatactgatagcaagaattcactgtgaagtacaaagggctgatgacagacagacagacagacaaagaaaaactggaatttttatgcattcagaaaatgtagctagagaaatctgaaagcctgccaaatttcagcattacacacattgacttgctttctaatagatttggtgatgtttttaaaatccaggtttaattttgccccctattatatataaccacatcccgggcaagatgtacatctattgtctccatgagcttcctgtacaggcacagcacttaggcaaagattgagtcaattatcttacaaatgtgttaatcttcaaaaataggcaataaaagtgcagaacctaaagaacagtctagatcgtgttcatatggctcagcttgtggatgggaacaggtacatgttcctgatatagaaacacttctgcaagagcagacacatctcaacccaggtctccattcaacataggagataagtcttctcctaaggcccctcatagtgcacagtggaagtgggaggaagttggggttcttggagctcttcacccttttgtccaatcaagggggatagggcaagaaaaatgggtggtgcaaatttatttttgaaacagtttcttaataaaatattttgagtttgctagacccatggactgttgagtaaactcagacatcaaatgctgagttagctagctggtggctgtcctcccttcatcccaaactgcctgtgtactgaggaaaccaccctgactgtgaaataaaaaatgggagacacgggtgtctacagcatattttctctccctgcctccctctcctgctgtatcttcctatggacttagttttctctacaattgtcctagtaaagtgtagggagaaattccatagagcatggttaattcgggagcagcctgattggcacttcaacaccctgtacctagggagctttagagtgaagggaattacacatagccagggctgatttcgctgaggtcctaccagagagctattgataatttgatggagttttgttcaaccaactgagccttactggctgattacattcagtttacttatcagcttctatttatgcagctgtatgttctcttgagtggaagttgtaacatttgtcgtaaagagagtggctggctcaatgcaagcctccccaagtggagcattattgacagcagcatccagaggcgcagctatggaaacctagagcactctttattctctccgatgtaatttattcccaatttattttcttcatttgggtttaaattagaagatggtgtcatataaatggagactttaaattcatttagaaataggttttataaaatggtatttttaagaacctcttaggagaccaaaagggaatgcttgcctttatgcagttggcaaatgttcctttcccttccttctgaaaaataaaaaataaaaaaaaccccagcacagagctttaagctttccaactgcaaccataattacagaaaatgacattaatttatcccttgcaggtgagtctaaatacataatattgtatctattcacatttttgttagtaccaaattaaaaggagaagctttatcctgtgccaggcattgaaaatatgactgaacaaattaatttgtacatgtctctgaaattctagactctatgaagtcattttctggaagatcaagtaaaatatctaatttagggcctagataacacacatactctctctttctgtctctctgtctctctgttccccccccccccccttttgtatgagccacgcaaacctgcagctcagtattacatcatttcagccattcaaatgctggaattccaagcatgcaccatcacaaccagctagtattacctttaaaatcttaaaacatacttctaaccatctttgtacttaatgttgatttctttgaaactttgtggtgcttcagacaaaggctagaaaacatatttttcctccattgtatatggaacactcatcagaatataccatattctgagacataccttttttttttttttttttttttttttttaccaatttgaacaaatatatacctttgagaatgtatcctagaccataatggaatcaaattagaactcaattactaaaagatgcatggaaaattccccaacaatttggaagttgaggaacacatttctaaataatatatgagtcaaaaaatcttaagtaaaaatattctgaactgaatcaaaatttagctctttcaaatttgtggaagagagtaaaggcaagacttagaggaaaatatgtaatgttaaatgtacatctgatgaaagaaaatgacttaaaaaaacaacaacccagtaacctagtttccatcttaagaagctagaaaaagaagagaacgttaaaccaaagcaagcagaggacaagatcctgaaccatacgggagaaatcattgaaaaactggacaacattgtagaaaaacccatcaaaactcaaagctaactcttacaatgaaagtatcattacagttaacctgcagctctgataaccaagagaaaagagggaagacacaaattgccagtgcagaaaatgaaaggtctatacccacttatcctgtggctactaaagcctagacaacgatcaccccgtggtcaccattgatgacttatgagaaataatagaccattctcatgaaacagaattttttttgttttgttttgtttttgagacagggtttctctgtacagctctggctgtcctggaattcactctgtataccaggctggcctcaaactcagaaatccacctcctctgcctcccaagtgaggggattaaaggtgtgcgccaccgctgcccggcttgaaacagaaaatcttaatgcctcatcactattaaatactcgagcagtaaagagtaattgacccaaaccaagggaatagaaagtacaaatagtttcatcaggagaccctaataaactccttttccttcttcaggattttacacacgtatatatgatagccaccattcccctctttcacactccccacccctccccccaaatgccttcctcgataaatgggtcattctaatcagcctcccaaagcatcaaggttcaaggcacatgtgggaagaagaggaagaaagaacacaagagctgagggatgggaagagggctttgatctgctgctgtgtggacatggctgttgtacacatgcatccataacgttgctggggctgcctgcatgtcctctaggtctcttccagaatgcagaaggtactgctctgataccaaacccaagaaagacagtacagaaaaggaaatgatagatgagtgtcccactctcaacatgatagtccacaaaactgaatccataaagtattggaggaattatgcatgacaattaaaggggctctatcttcaaaaagcaatcctccaaatctgtcctatcagtgaggtggctaaaaaacaaacaaacaaacaaacaaacaaaacaaacaagcaagcaaacaaacaaacaaacaaaaagaaacccacatggtcccttcagttggcatagaaaaagcatttgaaaaattgaaaactcacttataaaaagcctttgaaaaaaattcaacattcattcatgatttaaaatccccggaaaagcatgactgggcgatgatcttccatgttctcataaggaacagctgtgaatgtctgtgcaacctgtgactaacagtgaaccctatctttggtgaggtgcttaaaacattaaagataaaatagtcgatatgtgattgataacctgaaacatttttcaagtgaattttgaagtcttcacatagttagctttgagtgaagagtttttatatcctatttttacccccaagtatgcatatatttatattagaggcatgtttccctcgacttaccctatgtaatttatgacacagttgaagctgcccaaggaaatgcaaagcttctgcatcattttgacctgctgaaccttaatggtaattagtaactttgtatttatggaacctggaagttggcagcattttgccatgaattggggggggggcatatgcaggtacttaaagagctgacttatctctgaaataaatgcttctccattctcctatcatcatgttcatcactctgcatccccatgtaaagtaccagagtgcttgtaagacagtctcttttgagttcaactatctatttttataaattatttttgagtaaccccagatagattgattgttgaacaatgatttcaataagtatgcaaacaaaaatcctgggaacattattggtataaaatatctttttctagtgccagaaattctagaagttgaggtaatttcaaaataatttttgttctgaggctcctgtatgccttttctatagctaacagattactgaaaaagcattgcgtaatgcagctatgaacgctgcatatgaacaactctctattattcatgtgaactgtacatttaacatgaaaaattcaaaagacatgaaatatttataccattaagtcatcatcctaccatatctttgaagctagtgatataggaataggagaacatttttggaagctttgtaaaatggtgtatgtttttatttttaaagataaagaagaaattaaacctttcggataaatagggcctgcaatttcattataatgactacaatatcaaaatgatttaggttaagaacattgaataaaaaatagcgatgttgcctttgatccagcctttggcctcacagtaacttaacacaaactttttcatgacctctataggactatcctcatctgttaactttacttttatctgttttattttgccaaccacaagttgaactgagaatatttctggggatataggagtgtccccttttcttatattccagtggggaagacaaacaaaatagtagaagctttcctccaagtgctcctgtgttcttggtgatcagctgagcataagcactgtaaaggacacaagagaggtgttgagagagtgaagcagggattagacaggagagacacagggcagcatcgaggtcctctgaggctcctggtctagaatttcacttgtgtccgtgtccctcattttgttctctacttttgtctagtcagaggaatgcagatgagaagtatgtaaaaagttgggtttctctgaagctcagttttgattaggtacaaggggaagaatcttcaaaaggagtattgattagaaaaggacctctctcctttgaagatctgcctaatttattggtttgcattcatatcgatctcctatttatattgccaatcaccccttaaccccacccaagaaactcagacaaatggttgaaagacttgaaggaacagactctgaactttgtttctgaatcagattagacaatgactatggtggttatggctgcagtaattgagggagctctgcttatagctaagcctatatccatcacagtttcatcctgaattattttgattttgtccgtctgatatcaacagtgaatcatgatgaattatgacaataaggaacggcagcaaacctaccaggctctatgttcgccattgctcattgcactaattgtgaagtttatgttaatagatccattttactgcggaagagcctaatactcaggctgatatcaaccctcatgtttttcatattgcccatgctgtccccacttctgcaggagggaattcactggcaggcatagtcaccttaattccctgttcctaagcataggcctcaggagggtggtgtatttatttctttctggcagagttgtgctcttaaaaccaaccaaatgtcctgatgctaattccacagggtgaagtggccttgttacgttttgtacctcgtattttgatgttggaagatttgttcagacaatccatcaaccgtatctgatactttatctatcccaaaatgcaaattaaagcccaggaggtccacgctgttgattatcttatgtgtcctaaagatcattatccaaatctctgcccactgatactgtacagaattttcaaaccgagttccaaactgctaagataattaccgtgtgaaacaccctctgccaagcagtcatgacacctttttgccaataatgaggtaaaaaaaaaattctcccagaataaaaataacatcaaaaaagtaacctgcttgcaaaaccaatgcttttctttagagaggagacggcagaagaaataggagtaattatgccaggccgtctcgttggctgagagcaaaattgtttacctaagctttttccttatagattggaatcttgtgttgcagcccaatagattgatttaactgcctctgtgacttcctttcatttttaagattaggcagtccatgacaaagaggttaattgcaacccaatagagctaaactaatgttttattaagaaggagttggcagcccgagcttttaggagaacaaatgttctcataatgtcatgaacaacttacagtgcaagcatcccactcctcatagccaactgtctgttcagattaccccatatcgaccacgtctaagtaacatcagcgaattgctgagctgtcaggcgcacagttaggtttctgtagagaggtgggtggatgcagtcctggggagaagtgagaaatgctgatgagtctttttgctttgacctagacagtgtgattgtgtgacttttcccaaagtttgaccgtaacgttggggttggggagatatcaaatagactcacgtagtcactgatggaggaggcagatccagagcacaaagggatagacggaagaaaactcaacatggcgtggtttacagtagcggggaaatctacagacttcttgagcatgtgtccgtgtagcatatgcactgtcaaggagacacaagtgcctaattcttagcgatgatggggagcaggccagaggtgcccttgtgggttggtgggaagccacggagggagggaaacttcaggttgttgtgtttggtgtggcttttgtttcaggtgaagtgtgtggataggtggtgggaggaaggaggtatagaagtcttcagagaaatgccgatgttagagcattagagcagaggattgtgagagggccctggtcagggctcaaggtgggcagtgcttcctgctcttcctctgatgtacatatgaaaggaacatcacacctcggcttggctttggtgctccaccttctggggcttgctgacagcaaactcctacaggatggctccgtgacaattgcccttgactttggtttctctatgccagaactggcccctcatctagccctgccttttttctcagctagtggtcctcaggttctttctgaagagtaggaacactctttaccttctctgctccagagtttgttagatagatattgacacccactgaaagctgagcctagctcctttgttgcattttcattgtatctaaggcaagtgatgtgctaatctctgtttaacttttttcactcagtgtttcacttattcaaccgaaatgtaattagtgccctttacaagttacgttgatcagactatatatagttgtgcagacacatagaaaccagtatttaaattaggaactactgtttccttactatgaaatgcagcagcaagagtaagtgacaatagctttcatggttgaatttttccttcctcacatgccttattgttggcatggttgtaggagaagagtgaattctagcattctgaaggtttgccctcttgctcagtttattgcaaacattcctcttgtatatctcctttgtttccagatttttttttctaggcagaactttattgtgtatacagaatgcaaatgggtttctcttttgaccctactcagatctacagagatctcacatcatcttttttagaaatataagccttgaggggaaaaaaaagatgagctgggaagtttctagaaatagcctatgcaactataatacccagttgatgtaaggtgaggaattatcagatatagtttagcatgctgatgactgaaatagttacagtcatctaagggcatccttattatttacacacaacaccaccccccccatgaccaaggcccactataggaacacataaatgggctttagtctccaataaaattggattagtcagttgccttttgttaacctacctacagctttagtgccaccatgaagagatgaactttagtttacccaaagtaatctacaacagcattgatgttgccactgtcacatgatgtgtatgctatggtgtatgaaggagggcattgcaagtggctgtaggaagcttccagaatgaagtaatccttcaattgagtctgaactgccattagccaaatagaattctagacaggtaggatgagggtaataaagcaaagagtggggtattatagtatgtaaaaggaactctgggaggcttaactatcgtttgaatttgttttttttttaaattaattttctgttggtttagtaaggttggaaacagtaagaggagatgtcaggcgatagatatagtgtaaatccttgtggtcgaaagctaaatgtcctctcttccaaggacataccatgctatcctggaagtctccaaggttgatctgaaagactgaaataggggaatgtgtgctctgatctgtgttttagaaagaattttagcagcatgtggacttgttctcagggggttgtcacctgactgcaatggcagatgctgtatggtctgacatgtaaggttggaaggcattcattttggaaggtatatattcataaattataaactagaaagcttagaagtgtgtgtgtgtgtgtgtgtgtttgtatgggtggcgttgggtttagaaagttagaaatagcaccagataattcatcaagatcagggacatatggtagatttaggatcggcaacacagaaagaaggtaatgatgagatgacttttggacatgttgggaaccagatgtctacagaatatcttagaaaagcatggccaatggcagagatatgtgtgggtctagcacacagaagagaaattgaggtttgttatagagaatttaagtcaattctttaggttgatgctataatttctggagagctgatggtgtctttgttgccttattgtgagactggaacgttgtacagaactttgggtttcacgcaatgctgccttcaacttgactttaaattctagtcactaggataaggtctgctactaaggaagaaaacagggctttccatcaacacatgccagcttacttctgactgtctgtgaacgcacagaaggagcagaattggtagaagcagttctaagcctgaacaactagtctaatgactcatagtaaagtccagtgttacctgtacgctgcgatttgacaggcattagccttctgcaggcccagagtttcttcagtttagtgaatcatctgaaatttcatcaagttcaccccttttgaccagctgtagttttcacttttaaggaattgtttgggaactatcccatcaatgagtaatactgcagaaatgctgaaatgggtttaaacaaatctttaatagagacgagcttttgatttagctagagaaaagatagttgagatagggccagaatatggctggtttttctctgtttgctcacatctcattggtatttctttgaaattaatgattttaataatggcaatttgagtccccagaagaaattttcttcccattaaattcacattcctttttcccaaaagcaacttctctttctgaaaatatgattagggctttagatattccaagcataacttttttagatatcactgcagttgttaatgagagaaataacatttgttatgctacaaggaaagtagaatgtgtgatatgaaccataatatgggagagtggttggaattgagctatttctcctgtacatcactgtgtacagaagaactgttttcattaaggtggtggtagccactctaacaaacaataataatgtagtaatgttatgtgttattttttctaataaggaaaaaaatgatttgacacaggagaaggatatttcttgtttatgtaataattcaaagcaagtggccctggctggcatccttttgcacagccatccagtggctttgccttccccttaggccttaccagttgcatccagctggtagaagggggaggactccttgataccaacttgcttttgaaatagagatacagatgtggcatcatgtttttgcttacagtccattagtgagatatagggacttggaacacacagatgcatggggtgctgagaaaggagttgctggccaggcagctggtttcccttaacaaactcatgcaaagcaaaggaacacaaaggtttttaaacctagtatctaccttgactactgggactgcataatagatctgagaaaggcacagatgttacaaaataccacagatattagaatgtacctcattttagccacacttcaaacatattatgggtgtttacttaaggataaaactgacacttctcagtttttctggatagagtggctacaatcctttgacattctgagagaattcatttccaactcattgtatatgaataactaaaactctcttttcatcttttgaaggttggacgaagtttgcccgattgacacgggctttgacaaatagccgaagtgttttacagcagcttacaccaatgaataaaacagagacagtccacaagcattcaagactagctgaagtaagtatgagaaagactttgttttcaaggtagtggcattgatacacttttccccaaattactcaatataagcaaaattgttagtgattatctatctatctatttatctatctatctatctctctatctatctatctatctatctatctatctacctacctacctacctacctacctacctacctacctacctaactatttatctatctacctatctgttgcgggaaatattaaaaaagaataatttcataaccaattgataatgataaaagctgcctacctagattagacaaattatcccaattattctatcctttatgatatcataactacctgtggttatttaaaaccacaagggatcagtatcttcttactgtctgtttaccttcatcttggcttctccctctctcttctctgagtcactctctgtccctgcaactctttgctctgcctcccctttccctgtccaatcacaggcttcctgctgcattaatattataatgtaattggagcttggaaaatcttgccacacctatctatttgtaaaactgtagaaatttgaaatatttctttttgttctcactaacttttgcatggagatgtagttcatgctatattatgtgatgcttagagagtgtatgatttaattgaacaaatgggacagagcatccatccatccatccatccatccatccatccatccatccatccatccttcattcatttgtgtgtgtgtgtgtgtgtgagtgtgtgtgtgagtaagacattaattgannnnnnnnnnnnnnnnnnnnnnnnnnnnnnnnnnnnnnnnnnnnnnnnnnnnnnnnnnnnnnnnnnnnnnnnnnnnnnnnnnnnnnnnnnnnnnnnnnnnnnnnnnnnnnnnnnnnnnnnnnnnnnnnnnnnnnnnnnnnnnnnnnnnnnnnnnnnnnnnnnnnnnnnnnnnnnnnnnnnnnnnnnnnnnnnnnnnnnnnnnnnnnnnnnnnnnnnnnnnnnnnnnnnnnnnnnnnnnnnnnnnnnnnnnnnnnnnnnnnnnnnnnnnnnnnnnnnnnnnnnnnnnnnnnnnnnnnnnnnnnnnnnnnnnnnnnnnnnnnnnnnnnnnnnnnnnnnnnnnnnnnnnnnnnnnnnnnnnnnnnnnnnnnnnnnnnnnnnnnnnnnnnnnnnnnnnnnnnnnnnnnnnnnnnnnnnnnnnnnnnnnnnnnnnnnnnnnnnnnnnnnnnnnnnnnnnnnnnnnnnnnnnnnnnnnnnnnnnnnnnnnnnnnnnnnnnnnnnnnnnnnnnnnnnnnnnnnnnnnnnnnnnnnnnnnnnnnnnnnnnnnnnnnnnnnnnnnnnnnnnnnnnnnnnnnnnnnnnnnnnnnnnnnnnnnnnnnnnnnnnnnnnnnnnnnnnnnnnnnnnnnnnnnnnnnnnnnnnnnnnnnnnnnnnnnnnnnnnnnnnnnnnnnnnnnnnnnnnnnnnnnnnnnnnnnnnnnnnnnnnnnnnnnnnnnnnnnnnnnnnnnnnnnnnnnnnnnnnnnnnnnnnnnnnnnnnnnnnnnnccccctcccttctcccctcctcctttcccttctcttctctttctctctcttccttcctcttccttcctttcttattttctttcttttttattttctttctttcttattttctttctttcttattttctttcttttttattttctttctttctttctttctttctttctttctttctttctttctttctttctttctctctttctctctttctttctttcctcagtagctgttatcatgcagaaggaagagcactttgtggtatagccatgcttaaataggatatgaatacaatattaagtaattctgttcatacagaacaaagacgaccggcagctggctcacattcgaatccagccaggtggagtttccttttcaagagagctccttactaagtacaacagtgctctgtaccaagtacaacagtgatccttactaagtattccttagcaagcactgcttccttgctaagggtctgagcttgcttctgcgtgtgctgaggtattctaagcagataccctgctggcccctttctctaccttatccccctactagaatgaagggtctgtaggagggaacagcctgaaccacaaccactccaggatgttttcctgtgagcttttgcatttcatcccatcattgcatggccatttcagggagtttttccactctcattcttttcatttggctttcccttttcttttgtttttgacttttgatttttttttttaaatcagtcagtgaattgggattcataaaaccaaatccaatgcaaaactgctttctattaggtctgaggtttgctgctttacagaaggcagaagttgccagactgtcaaatgagatttcctccatggtcatgcagaggggctagggggaatgtgcccttggatttccaaaactagatccaaaagaaacaccaagtgggcgcaggagtgttgtcttttcagttatatgaaagtactaaaacaatttgctcgaggcagtttcctctggaattttcacttttccaagacacataaattggatctccttttcacctgatcaagaattggagtggattctaggatgaaagattctgtccccataaaagcagttaataaattgcccacatgcaccggtatctgactgattaccttcaacttatgttgggtagggataaatactgtcacctctctgtcagggggccagactgccttagcccaggtagcacttagatcttcaggtggaaacagtgtgtattgatgcaaaatcaaattcagaaatgttactgtattctcataccgatctaagagaaaggaagatggtagacagagctgtcactcactgccttatagaggagtacaatgcagagatcaggtagaagacctggcttcctatgtccaaggtcaaaatcccaacaggtgtgcatcgtttcctgtgtcctacccttcccccactcctccactggcctctctcccatgcccttctcctccactggcctctctcccatgcccctctcctccactggcctctctcccatgccctactcttccactggcctttctccctctatttatttactcctcctcctcctccttctcttcctcctcctcctcctcctcttgctcccctccctctggagcatctctcctttgctaatcctgtctgactagctaggattgaaatggaaaaaggagaaaaagataccatgtgagcgctacactggtcacctggaaaagataaaatataggctttctcaaaacccacttaaggccagtgccatgattttcagaggtgaggtgtctaggtgcgaatacaccacacttcacgaaaccttttcagaagattctagtgtgagccagatttaaaacacagtggattaccggtagagatataactagagaaggtgaagatacagatgacggcaaaggaagcattttccatctcttcccccctaccacccccagtggaactgtagctgatgctggctggaaggtaagagagaagccataattacgcaaggttctttacctcaagcactccatctcaacatggtgctcactttcctgctaggataaatggttagtaagtaatttaagaccttagggataaaatatacccagggctccgagaatgtaggtagatacataaaatagccttaaaatagtgctaacagccccaagttaaaaatcataagtatgatatacaactatagaaaatactagtagcatttttaatgttgaaaatagccagatacctagtttttaaagtaagtttgatgtatgagaaactttagaatactcttccagactttaaaaggtacatgaatatgcaagcacacacacacacacacacacacacacacccctatgtgtgtgttatggaataaacaataaagctatacagttatatgctaatgcttaccttcgattattcatgcattcaaatgtttgatgcatttatcactttgactcctccctcctggcttgtttgtttgtttggtttttttttttagaagcactgaatagtgattgtataagttagttaagaaaccccattgcgccgggcgtggtggtgcacgcctttaatcccagcactcggaaggcagaggcaggcagatttctgagttcgaggccagcctggtctacagagtgagttccaggacagtcaggactatacagagaaaccctatctcaaaaaaaaaaaaaaagagagaaaaaaggaaagaaagaaagaaagaaagaaagaaagaaagaaagaaagaaagaaagaaagagaaaaagaaaccccattgctacagtctttggcacacacattacccttaatggcattaatgtaagagatggaaattttggatatgcttcctcaacttgtttcacagttcccagagtccagcaggcaatctaaaccctgtcttgaggtctccacttttggcccttgctggggtcatctgcttttctccttctcttgctttaattagaccccacagagtaagttaaggtttatataaacttgctctgatagttttccatttgttaaagaggtacagagagctaaaccttatactatataatatttagtactttattttgttttccaaaggaagcttgcactggataagaaacacaatgctcattttatatcctggttttagagagaaaaagggaaaatgggctgtatcactccccagttctgtcctgttagccaccaggacagtgagcttgctgagcaaatccagcgagactgccaacatcgaggccattggttcagggagaccattagaagcaaaaggatgttttctaaggtgtttaatatgtgtgaacaatgaatgacagtcagtcacccgagtaactatggagcagtcagtgaaagtcacatggttcttgtcaggcttgcccagtacataagcaggagcatctgaggtgctgtgccactggagagccaggcggatggaccagtaatcagatcaactgttgagtagttgcactcacacatgggtccttcgagcaaactttggggcagttcggaaaagggaatggaaacaatacagaatgattgtcctaaaactgacaatcatgtgactcggtctgtgattggggcatccagcaggtgtgcagtcacagctgtcttcagaggcgtcccaactgtttataaacactgttgctttcttttaggtgcttcagctgggatcagacatccttcctcagtacaaacaagaagcgccaaagacgccaccacatatcatcttacactattgtgcttttaaaactacttgggattgggtgattttaattcttaccttctacaccgccatcatggttccttacaatgtttctttcaaaacaaagcagaacaatatcgcctggctggtgctggacagtgtggtggacgtgatttttctggtggacattgttttaaattttcacacgacttttgtggggccgggtggagaggtcatttctgacccgaagcttataaggatgaactatctgaaaacttggtttgtgattgatctgctgtcttgtttaccttatgacatcatcaatgcctttgaaaatgtggatgaggtaagtttttttggttttgtttttggggtattggagatcagatgttttgaaaacagtcgagttaaaaggatcgcaaggatgacaaaatgtctttttcagtttcccttttgcaaacccacaatattattaagcatgtgccataatcgttttgttttgtttttttttttaaattaatttgtgcctgtgttttcctccaagactttaggctgaactgatgaattgctagataaatggctatggttgaaagttgtgattggaggaagacaggaggaagaggcaggtagaggaggagcaggaggaagggagggtagtgcagggggaggaggaggaagagggaaagaaagaaaagcaggtgaaagagcagggggaggagggggagaaggttcattggagaggttacaacaatggtgctcttagagtcaaatgtagttcacaaaccaggtgatgggtttagggcacagaaatacattttctctgaaagacagcagctttgaagacttcatgcctttacaaacctagtgactttttaaacttaagtcacacatggtagctgtcttaagagttaacctaaaaaccaacatatcttccaacagtttttgagttgttgcaattttgattcatgcttttgctttcaattcattataaatacagatataggtagaaagtgtatttgatgacttgtgatgtctggcctcactcagcgttctggtcttatggtgtttgtgaaaagaggaatatttagaatgtgtcataccttaaaggatcccttcgttcacagctccttctctcaaagttaagggtggatgactcaaaaattactgctccaagcggggaggatgcaatcaataataaaacataggccaggcagtataaaggatagctttttaaaatgttttaacaatgataacgctgccatgttgctttccctaaaaaccctacagtgtccctgttagatcactcaattggaaagttcattgcactgttgtggctctgtgtgtactgggagtagactcaacattttcttcatcgactttcccgtaaattttcttttaatacaacaatcagtcacgtggggatttgaatgaagttgacctcacataagtagagaagtatggtagggcagagccctggggtattggaggaggtttgggaagatgttgaactaagactacaaaattctattcattcagaagaggtcagctcaaaagatctattgtgccatgtgataacacaattagaaatatactctattcttaaaaagtcctgaatgagtggattgataagagagagagagagagagagagagagagagagagagagagggagagggagagggagagggagagggagagggagagagagattatttaaacgtgtatcactacaacaaaatacctagacagattacttatgaaggcaatattctgctcatagtttttgaggatcaagaacaagatttaacagccccatttctttgggtgtctgattaaaaaaaccaaaacatagatgtgagcatgtggtggcacatgctgccacaccttatactagaaatatacagagagggtataggcagggccccacaagccattgtaagaccacattcccaggtgacttcagggcttccccaaggccctatctcctaaatgcctgcagcttaaccctagggaagaagcctgtaaagatgggtctctgggggatggtccacatgcaaaccatagcagggactaaatcttctcaccgagttcccacttatttcaagctcagaactcagaggtctcaccttggtcccttgaagctggccacagtgtgaacatggtggcaagcaacacatgaggagatcaagccccttcagctttaactctgtacagctagttgctaacatcagacaacacactgctgaacacagttgtctgaaggtggctatgttgtgggtctgatgtactgtcacattgaagacacatttcccaaaggtgctctcagcctaagtatggagggagggaggtctgtcattaaaagggacttatttttgatgttgattgtttacttttgagatcgtgttttaattcttctttctctttcttctctccaaacccttccatatatctatctcactttccatcagattcatggcttttcctttccacccacggttattgcatattgcgggcatatgtatgtatttggatgactttcattctggccttctctctttctgcgctgcattttgagctctcctttaccaaattttccattaactttttgattgatgccatatctctgtagtgtctagaggctccacccccaacttcctgtccttcatcctctatatcctccagacatttattgtagtcaaattcttgcacaaggactctggcttggcacctgttccttccaggacctggacagaccaagcaatgtgcagggatgcagtgccatacactggtcaagagagtgaaaataagtcaaggctctgtgaagaacagtaggcggtaacttattttaaatagaataagctttagaggaaaacatttaaattgtttaggtgatttatttattaataatttatttccatgctatcaaggaacacatctgtccacctttcctctggcaattcaactttaggcttcatctttgctttctcatcttggaagctgagctttcagactcctttcctgcttgctacattgccattaacttattctcataaaggtagcacatccctttggttcaataaacattgccaacatgtgtatagccaacagacttgccgtcactgaggtgtccagcatcctgtagtagccttttcttctctgccctttctttctcccaaaggttgctcatttctgtgtagttactatcaggtatttaaccttcaagtttccactccttgattaaatgtcttttcactataccaatgcaagagatatttattcaacttcagggacttaaacaaatgtctcttcactatccttccattcgagagattggttagctgtctcatactttgtcttgaaataattttccttcagaattttcaaaatatgatatttactgtgttctacctttcaatggctccttttaagaaacttgaaactattagtttctgatcctttacacgtgacctgttttctctttgtagaggcttaatgtatctcctgcaaggatagatactggtttagatactgtccagtttagatactgtctgatgacgcgccttagaatagggcctctttcatacgtcttcatagatatcgatggaatgcccttctttgatctcaaaaatcatgaattctgccgtgataatttctttttatgataaatctccctcctttctgtctttctctgttttctcccctctggagcactttttgtttaatgtgttgaacaaaccctgtaatttccttgtttattctaagcagctttccaagccatcatctctatgctgtggtttctggggatggctttatcagtattttctaactctctttgaccataatgatgcctttttgcctgacactaatgcagctaaatttgcttttgcatcacttgtgtgcacttggcgtgtgcattgctatatttaatgttctgtaattgtagactattacattcaatgtatattttataaagactagatagatgctgagagttgtcacactatgcagcttaatttcttcatatttactgtgattaaatgcattctgacttatttagagcatcatattttccatttttcatgctttccctgtctttcttttttgtgctgcctccttgataatttatcctcttctgtatagactgaggtctgaagtttccctcaatacattggaccctttctaatgggctgaatatatatccctgctaacccatgattcttgtatttttatatcagcaactgacttaaatccctaaagcttgtgagactctttacctttctctcaaataacacaaggacttctgttcattttctttataatttcaaacatctattcattttgttattttatgtgcatgagtgttttgcctgcatgtacacatgtatactagtatattgtgtggacctggtacttgtggtcaaaagaggacatcagatgtcatggaactggtattgcagatggttgtgagccaccatgtggagcctgggaattgaacccaggtcctctgcaaaagcatatatgctcttaagtgttgaaccatctttctagcccttcttcactttctttaaatttaatatattatactttggttccacattgttcttagctctctcctttaattatgttattctcccacttcattgtcaatacaatctatgtgtccacttgtttctttgcttgcatggtatttaatgcattcttggcgttcttctgcttcagttcttgaagagttggctctttgttaaccacttattacataacatcccaggaaggttttttttgcatccatctcaacacttctaattaataccttcatatttcatctccacttgtgtgcatccatgtgcattaatgtggttaaagttattccaattttattattagtcttcgaatggcctggactcttctgcctagcacagggcatgctttgttgcgacagggtggcttttcctcagtcttgccttgagtttcttacaagatggttgcaaagactaagtgtgaaagatactaatgcgtttcacttgaaaacttctaccagcccgagaggctgttgttactttatttgttgggtttcctgtgtatagtttcattgtaaatcctgaggtggtgaacaatatgtccctatggtacttctttgttggatggatgcacagggattacatgaagttttactaactcttagtgatttctacaatgatgtaaagatggaagaggaatcacaccagcaagtatagcctagggaataagagactataagtctgggaatcacactttaatccttcattcctgtacatgtacagaataactgaaagcagcttaatattactctattttcaagatctttgatattctatctgaagataattcgatttactaggaatttgtaaactggatacatgctttttagagaaaactacaaggcaagaaagacagaacctattacagaaagcttttggtctgagaataggaaaaatgtatgtcctagaaatcataaaatggaggataaaaaattctctcatgtgtcctaagagtagaatatagctcatttgcaatgtgcatttgaaccagcatggaggtctagcgtggggacatctcaggggagcaggtgggtaaagtacataagaaagattgggccggcaggcaatgcgctggtcagttgcaagggggctggaggggtaagatgatgctggtgagatgatgctggtgagatgatggtgggtatctggctgcatggtaagcctgaaagatgagtccgagcaaagcagaactaggcaaatgattatcacgcacggatgctgcaggcaaaatagatgaatcagcaatggctaagtggaagtagataagagttctaatttttggaaacgtctcttaaaacagtgtctgaattattatttgttcataattatgcttgtcaaagtgccacccacatgttacctcacacatttaaaattgtgatttttatctctcattatcagaataagaactgagactccagaagagggtaatcgagcttgtagatgttaatgagttttgtcagactagaacctctctgtcccttttgccatttcagatccaagaatagtaatagtagacaccattatttaaacaattgacttgctatcatgttttaaatgaaaatagatcatcgaaggcaaaaaatgggaggattaggaaggtgtgcaatgcagtttcttttgtgttatttcttctaccattcacccctagtaatcatcgtacatggctctgggctgtatgaggttactctttgtacaggtgtggtgtgctttgtgtgctgagcaatcctccctgtgcctcttctccttcctcatgatttctccctattttcttagacagtttgtttctacttttgaatcctctgaacataaacgattttatgtatgtgtatgaaataaaggaagcataaataagaggaaacacgcgctattgtctataagatggctcaattaagtttatggctatttccaatgattctagtttcccctaaaggatataactttgttctttatagctgaatcacatttcacgtgtgcacacaccacattttctgtatccagtcctctgtgcttgagtgtctgtgctgattttgtaacttggtactgtgactagtgataacggaatgaacatttatgtacgagtttctctgtgacatattgagttgggctcttttgggtatagcttggtcatatgggaggtctatttttattttcttgaggaaacttcatgctgatttccatagtggactagctacttcctattccaccagcagagtgaaagctttccttttgtccacactctcatagcatttgttgttacttatatttttgatgactggccttctaagtggaatgacacgaatctcagtgttgttttaattatttctctgatggctaatgagactgaatattttttcaaatgtttattggttatttgttctctatcttttgagacctgtctatttccttagcagatttattgatttctttttgtttagctctatctatctatctatctatctatctatctatctatctatctatctgtgtgtgtatgtgtatatgtgtgtgtgtgtgtccccaatgctagtccctagtaatatgcatagctagccaaaatttgctccatccagtacctgacttcttcagtttattaattttttttatttactgagtagaagtttcatattttgaggttccatttgttagttgttggccttatttatggagtacctggagctttattaagaaagtccttgtctatgtgtgagtcttgcagtgctttgtgtaatgtttctttaaaagttttcatgttttaactcaattgttaatgcctttgcagtatctggagttgagttttgaatagggtgaaagatagggatctagttcattcttctataaatggagatacagcttttgttaacactggctgttaaagaggctctgctttccaatgtatttttttgtatctttgtcaaaaattatatgtaatgcaaaagagctaaggatcaaggcagtctatcgtgagattgtgtttcctagtaacatcagaaagaagctacctacacacataatatttcaccaacatgaccacccaaatatgaacaaaacaagatcagcaatgaacatggcacactgcatgggaaaagcccacaaggcctcaatataccaaaagaacaaccggcaacagaagaaatctggaaacaggaaaggtagacttccccagggaagagcattggttattcagtgtcaaattcatccctaaaaacatacatacaaggaacattataaggacagagtagactgtatttagaaacacacagacacacacacacagacacagacacacacgcacacacacacacacacacacacacacacacacacacacacacagacacacacacacacacacacaattttaaaaggccatgaatttgaaggggaggagtgaggaatatatgggagggttttgtgggaggaaaggaaagggagaaaagttgcaattaaattataattctagaattaaaaaaatcatagggcggtagctatggcggtttatatatggatcctttactacctacacttccaattttatgtaaggaccactctggtttttactatggttctctagtttcatttgaaatcagaatagtggtacctctagcattattctttgtccttaggattgctttttttttattggcatcttttgtgcctacatatgaattttaagattattcttctgtttctttaagaaatggtattggaatttaatagggattttatagactggcaaatttgtttaacttaagttagtggccttgctcactttattccaaacagattggtaaattataagtaacaggaatttcctttttggttccagtggctggaagcagggggcaaaggagctgtcatgggggtggtgagggtcttatgtctcacatgcagaagatgggagacactgacttaaatatgtgacattaattattcctgagatggagcactcagggactaaatgtttccccttaagtatccttcctcaacaatgatgcattgagggacatgcttcagcctgtgtcttgtagtagacaaagctatctaaagctctgagaggtgctcagccctttttgcagtttcccaatggacaacaccatatctatattcagccttaagacattgctgattgtaatcagcacccacttggataggtctctcatgtttcctggcttttacctggttatgctttgagtgacctttggatttctagcaagacagacttcataagccatgtcctcttaaccatggactaaaagcatgaactaaaacaatctttctctctgagatagtcagtgtattgtattgtgttagcaaccggtaatagatcgagacatctatgttaccctgctacccaagctttatgctttctgttttttttttattgactatgaccaagcgatttctttttggccttacagatgaatattcgttgttcttactctattaccatttgttgaaaacactgttacaatgttctatttggttccctttgttaaaaattagctgagtaattattgcacgtgggttatttgttatgtatttctaggttacgtgttctgctgtattcatctgtttgtctagtcttttgccaatcctataatctcttgattgctgtagctttacagtaagccttataatgtgctagcatcaatccaccctttgactttgttgtttttcttcaatagtatcctggatattctgttttacttctccaaatagatttcagaattattttgtttatttccactaaaaatttgctgtaatgtaattgaaatgttgttttattaatagctcaaataaggaagaattagtatgaatgttatatcgagtgttattattcataaacatgcgatatatcttcatttttctatccttttgtgtgtgtgtctggcatatgtgtttatgcatgttcacaaatgtgcaggcataaatgtacatgcaagcatgcgtgcatatgtgtgtgcttgtgtgtgagcatgctttttccagttagaggttgtcactggtgtcattctctgtttatttccactttatgttttgaagaagaattctgtctcttggtttagctcagaagcttctttgactagtccagctagccctcttgcttctttgactagaccagctagccatcttgttgcaaacagagattcgctgtctctgctttgtgagtgctggagttagggacgtatggtggtcaggagtataattagctccttgatattaactttatttcctttacttcaaaaatgtattgtttttccttttttcttgtcttattgaattagttgagatttctattatgatgtcacacaaaagcatagagaggggaggcacatctatcttgttcctgatcttagagaaaaaattcctagtttttcactgttgggtataatatttgttgtaaggctttctttagatagccatttttaattgaagacatgtaaatattcttagtttgctgattttgtcacaggcattttctgcattcattgatacaatcatgaaaatcccctttctttaatatgttttttggccttcaaattttgaattagctttgcaatcttgacatgattctacttagtcacagtgaatactattttattttacattgttagatccaattttctgatgtattgtttagggttttgcatttatatctacaagagacattagtctacagttttcttataatctctttagttgtgctgtcagtgtaatgctggtctcacgatgtgccaggcgtgttctggagaaatctctctgttctcattttctggatggtgtagagagctggaggagttcctttgttgaatttctgagaagattcagttctgagcccacctaggcacgctgccttctcaatttagatgttcttcctattcattaattgtatttaatagatatattcctatttagatccctattttatagagaaatattattagagatattcccacttcttatgcggattttagcagatgatataattcataaatttttcttatctcattaaaattatcaagtttattgccatagagttatacataatatttttagatatatttgggacttttttgagattttatatttgtaatggtgttacctacattgtgtctccttccccttttctctccttctcttttccccttttcttgctctttcttctcattggcctagaaacttactatattggtcttttgaaaaaccatcgttgggacttattgattatgttgactttcttgtcttcaagtacatggctttcagatacacacacacacacacatatgtgctttactctatctgtgacttaatttgctcttgcagttttggctaaggtggcagtttggaacactggcatcggaatctttctcctgttaaagcacgctcacttttctctgagtaactgccacgctccactcatggcgtcagggcatcttctcattctttgatacctcaaaataggcttaattcccctgaaaattttcctttggcatagataacatttccaaatatgctatttaattttctggtattgagagattagatactgatttctagtccagtttaatcctcttgtcatccacgttgtttcatttctgctgcttttaacaactattaagtgtcccaataatgacttgtattttatatttatattttgatgagtcatggattcatggtttgcccactgtgatcttccatttccgtgaagaattgaaattgtacaaagatctttaaacatcagagggttaggcactttgctagcttctgaatgtatagaaggaagaccttgtgcttgccaaaggcagagacactttctaactgaacatcttggattttcaattcctgcctaactgccattcaatttctacattgttgctgttctgctgaggtttcatagtttatcatgtttgcttggattgcccatttcttgttattaatagaagtgaagggtcaggaggaaatgtctcacagataagaaaggattccttgccttttgggtactgtgctcacatctctgatcagttccatcctatggataggctcatcttcacatgtaggaaatattccagtttgattggccaaatctgccattccttcacatgtgtttagcgattgattcctttggggtataggtgggacttcctactgagcaaacaaagcatcgcaaggcatctatctagtaaaaggtgatcatggtacagtctcaggatggaaaagctctcaaattctagctttagagaaaaatgacttgtaaacttctcttcttagagaaaaaaagattggacagagtgaaacttaaaggggagaaaagagttgaagggtggtgtcatccttgggttccaaattgccatatggtgagtatggtctaagacattagattctattccttgtgtttactggttgggtaatacacagatttaatgattaacattcttcttgtatctgaaattgaacaatgttgcaggcctgtattattttgcatgagttttccactgagacaaagcggtctgtctgctgagggaattagctcggagagaataggaaataacaagtaacgaggcgcctttatttgatttttctgcttacataagaagacacttttgtctgttctgatgttcattcatgatgaatgcttcctgtctttgagctctggggcatgattctaaaataagggcaaaggagagctggaatacattgctctctgcatgctgtgtgtggaaattgcacgttaactgtgtccatgcttgtgtagaagttgttcttgtcttttgtgcagcactcattcccatgcttgaggatatttttcctctatggatctagtgggaagaaatacctgccttcacttaatttcatgatgcttcctctttcccataatattcaggaatctataggaatatgttcattgctctcatcgctgtcttcatccttaagaagttttgtttaagctggctatggtggtgcacaactttaatcctagcacttctgggaggcagagtaggagaaggaggagcaggaacaggaggagcagcagcgggtggaggaagagatgtggggagggcaggcaagcagatctccgagtttgagtaaagcttgctttccacagggagttccagggcagtcagttgcacagggagatcctgcctaaacaaacaaacaaacacataaataaataaataaataaataaataaagctttgtttattagacattgtgaagagtgaataagtcacttccctttcttcatgagactttgactttggtaaaccttcttcctttgtcgctctagggatcaatgaaggaaatttatctgtgttccttggaagtaaaaaagaggttaaacagaagggtcagcctggtgacctcccagagactgagccactaaccaaagaggataagcctatgcaatatggtccaaccacatatgtagcagagggctgccttctctggcctcagtggaagagaacgcacctaatcctatagagatttgatgcaccagggtagtgggggtacagggtgggtcacctctcagaggtaaaggggaggtgggggggggaagaatttcaagggaaagtaggagggggcagcatttggactgtaaatatgtaaattaataataataaagaatggtcagtatttttatttgaactacaagaaactttcaatcaactctacttacccagatgaggttgctaaggtgtaaagggcgttccatgcatgctgcaactctgatatatccatgtgagacaactacatgggattattgcttttaaaggcattgggtttggttagctagccagtcacgaggctctcactagttgcatgctcttaaatcgctaccacatcctgccaataagacaaagcagacatgactttattactgatcagaggtaagggagaaacttgccttatgaagtgtgggctgtgtcactaggtggataaacaaagacagaactgttgagcagtgcaaatgtgcttcagggttggagtttctaagctggggcaggttatagtgctctgctaagttgggtaatgcttaaagagatgatgcaatgcttcagcgttagtggcagcagcaaagcgaagatgattatttatttttggccccagggaatgattttgggctttgtacatgctgagcatgagctctactgctgagatagacacagttccaagatgtgagttttgaatcaaagggatgaaaggatcttaggagaacaagctgtctgctgatgctctctcctgatgaattatgggtctttggtaatgtgcaataacaggaaaacaagaatttggggcaggatgtcttgggaaataggatacagaggtagaggataaagtcatgcgaatggagacagacataaattcagttatgtgtcaaacggaatgcttggggggagggtaggttcagatctcgtggctttaagtcaaggtagctccagggttcctttctcatatatgacttgtctgtggtgggacgatggggcacaaggagagattccacaggtttctatgaggtcaaatcccacagaagaggcttgttttagcaatgagcagtaattgatatttgcacactttctgcgactgatggtaactatggcagtcctgtgagttgacttggtatattggtcagtactgtgggcacaaatacggattttactttgccttctttggtaggaatatctatcttcttctcccctttgctctcttctttctctcatttcatttttctttcctcctctcctccccattctctctctttctcctgcgtcctctcccctctgactaggtattttaggctagttcagagtcactgcgcatcccgacgtggcctgagtttaacagtcttcctctctcaagcttctgggtgctgggaatatagcgatgtgacgtcatgcctgacctaagacaatatgtgtttgtgtttaggtcagtgtgccaactaaacattagctctcttcagatactcttattgctgcacaaggaattatattaagttttgattggccttcctctaacgattttgtttgattttatagctattgaaattgttctagccactcaaaatagtatttttatcaattctttgagaattgcacacaatgtattttaaccatatttgctacttactccttccctaagtcttctgagatcaaccccgtacctcctcctcaccacctctttctaaaattgtattttattttagtaatctaaggaatccaatctgtatttctcttatattcatgactgtggtggcatcaactgtagtgtagtcagcctgctaagagtcacacccttaaagaaccaattttccttcctcccgaaaccgtttcctgtcggtagcttccctttggggtggggcttgtgattcccctccctcttccattgttcccaccgttactgaggaggtatagatatcagggactgggcaacactattttcttataattccaagtttttaggccaactagactatacatctaatgaatctgtttgaattttagaatctattgtatttcatggtcagtactaaaatctaaaaattaaaattaataggaatatgtctaattaatgacaatgttttctatattggcaaaaccgattatttttaggagatacacaatatctatgttagcatagatgataggtttataccactaacattgttcatgtttctgggatgtataactaataataattgtttaaagtgacttcagggatgttatggtacatttagaaataaatgacccaaggaggacttttgtttctctattgaagtcatccttttggtgtaggaacaaaaacacatcttctttatttaatccatcaacatgcttccaattatctaagttcccttttactctaactgatagggatcttgcagtgggtgagcttgcaattcctcctgtcttcattgaaatagttaagagaacttgtttcagacattactaataagaacaaagaattctttattcaggactattggagagaggttgttgcaatggaggtaggagaatgaagtcaatttgctgagacaaatcctcggaaggtaggtcagtaggccacccgtgcttactgatgtttatcagagttgggactaaggtctggataatagagaggggtctgtctttttactatgtcttcagaaatattcctcaaatccccgatcaaatagtttgtggtttataaaacaggtaaggggttaaaaaattacatattaaaggactacagaaagaatatttcactggatgttttcaatggcaaatatgctctaaagaaagggaagtcaggggcttggaattgagatgaagcctgcctaaagagtaacctagttaaggacattttggttagtttatattctggtgagagaaaaccacagtgaacaaaatggaaaatttaaacagtatatatgcatatattatatagataatgacttgagtgcttagaagttaaaccacgtaggaaggtatgttatggttaaatatagctgttaaatgatattatctgactttaagtgataggcagtttaaatataaggatgacattgttttagagcatagaaaagagaataattattaatctggctcactcagtattgtcctcaagtttttcctcttctctctgtttccaggaatgttacgtttgtttgtttttgttttgttgctgttgtttttatagctctagataagatgatcatttggattagtgtatttgataaaggaaatcaccttcccctaggtggaagagtctctttcagtaattaagaacccaaatggaacaaagatggaacaaaagaggaattccttttcctcctcctctccctcctctcccccttcccacctcttcctcctcctcctccatcttcttctcctccttcctcttctttgttctcttctgctttaatcacttgattgggtctttcatccattttgtcttgcttcgatatggggactaataaagcagctttgattcttagtcctcagacttggattcaattatactgttgactctcctggaccttagctttgcagatgctatcacctggggctgtgaaacccttataatcatgtgagctgatttctcaaacctctttcttgacatagatataaataggggtctctctatggctgtccatatgtcttgtgattgatgtgataccttatacacctgtattttttctctctttatactgtctctatttctacctctatctgtaggtctcctattggttctgcttccctggaacactctgggtcatacactgtcctagttttcttctccattgctgaggtaaaaccctgacccagagcaaactgagataaaaggatttatatgttgtatgctttcacgtcacagtcaaggtagggcatgaactcaagtaggatcccaggcaggaagcatggtagaaagccatttactcatttgctggccatggcttgctcagcttgctttcttatgcaacccagggccacgagaccagggattctcccttccacctggtctgagccatctctcatcaatcccaaaaatgcctcacagacttgactacagggcagcccagtgaaaacagttcctcatttgaggttctctctttcctggtaattctagtttgtggcaagtggataaaactaataggcacacacacttaatgttcccctttctcatttgtttacatagctaattgcaattgcttcaacatttttctgtttcaaatttcattgcctgttactttattctgacagcatttcttggactaattatgagtgctataatgcaagtgtcccagcttctttgatgaaaggaatagctaagaaaggtctcaaaagcaatgatacttaagcccagacctgaaagataagtagaagtttgtcaggcaaaagaagcagttggtaggttagagacactgttttaaacagtaagcttgaagatcccctaggagaaagagaatatgaaatttttgaaggaagaaaaaaagtcctttatgaacagagtacagagagcaggaggcagctgcagattgcgactggggagatgggctaaagcaggctgtgctacagagtttagatttgattataaaggctacaaaatgtatccaagaaggagttccaagtgtcctccaactttgcttgattgtaactataatgtgtagagaaagtagagattttagttaacatatctctttgtatgttgcatattttggtcaggccttgtatttgctgttgacccagtcgttacttttttttttttaaaggcctcttctgtaatggaaagcattaaaaaattaatacattattggtgctaaatggaaacattccccccattaacctgttgtctatctttctgtcgatttgtctatttgtctgtctatctatctatctatctatctatctatctatctatctatctatcaatctatctatgcaagtcattgtgattcagtaagaatacaaattggctaaagcaggtgtcatgcacaagccatttaaattcagatcccctactgaaggatgttgctaatgcttggagtaattaggagaatttccctctggagttcttggtagcatgagtcagagaagaaagttctgaatagaaaggaggcaatagaatttgttatctgggttagaggttcacataacaaatgtagtttgcaattttctctcagtcttcaaattgcactctgcaaaaggaaatggaaatggactatgtagtcactcatgtataaaatctatttagaataagagcccagtacttaagaaacagagcttattgtttatgtgatttctatccatttgtctgatatagtctacctggaaaattaaatatctattcattatttattacagtatcaatggtggaggagttagaaactattatgagagacatctacttactattttattcttttattactgtactatttttgacaagcattcgagtgcctactatgtggcaaaataatacaggatgtcttgtggataaaagaatggacaaaatatgatgggtcccgacaaccacaaatacaaatataatgatgaaaatgtatagttacctttgaaatgacttggtctggataagaaaggagaggttacctctgaggagaagaaagccgtcttctgtgctgagctgtaatgtcttaatagacagggacagggaaggatcatagaacatcttctagagcaaatgacaaatacagagtccttgtgtttgagggagctggtatagtccaaggataagaagcaaggtggttaggggacagaagagtgtagattgaagttggagtgataagcatgagctaagttatgtatgtgcaaagcttggaataatgaaaagctatgatgatgagctgccagtcattttgacgatgaaatttttgtttaaataatgttcacaacagattgaacgcattcaaatcaatgccttgaagcatcttgtagttaaagaagagagaggctcatactgtggtgacagtggggatggagaagagtagacatttgagagatatttaggggttagaaccacgcaatttaaggtagattgggtgtaagaaatattaacaaaaaatgtcacgggtacttcttggtgtctgatttcttaatcaaaaaacatctttaagacagcaaaggggtatgttatcatttttactgagaatcaggacaggaactcaagcagggctgaaacctggaaacaggagctaatgctgagaccatggaaggatgctgtttactggcttgcttcccctggtgtgctcagcctgctttcttatagaacccaggaccaccagcccagggatggatggcacaaccatcatggtctgaaacctttcctattgatcgctaattggaaaatgccttacagctggatttcacggaggcattttctcaactaaggctccttcctctctgatgactctaacttgtgtcacgttgacacgcaaaaccagtcagtacagcgctgtgtaaaaagagaaagatttctgagggttgagagatggggggaagtatctgttgtgtgactgggattgaactactgttgcatcttgtacctgcaaccactgaactcaatagagactaggttgtgatctgatggaagggtttttgaggtcaagattattgagtctgtagtggatgcagtgcacttcagattgtgttcataaggcatgggtatctgagaagtgggaaagttgctgcagttaagttggcagatgatctctgattttgttttattgaaagagctgtttgccttggtaccacttaaagtaatgatgggattttcagtaagattggatttcagattactttaaagatatttgcagacatgcctttgcattccctgttatggagaatttattgttatgaatccatgtaaagtatgatagaacgtactttataatgtaatagacaaacaatacttaacaattacatattcaatattattttaatttgcaactccatatcttacctacttcgttattttggttaaaatctatcgtgccagatagatatttatattctcttctgcacttcaagtatgacttttttacttataactggtgagtctggggtttaattgagtagttatgatttgggttgctttgggcttattttagtcaagttcacccatatatcagtagctggctgcttagttcactggagctgatgatgcaaacggctgctttttcttctcctccaaaagcttgtttagtgttcttcgcatagagggcttctaagaacaggagtagaactgttaaagagatttgtgatccaggtttggaactgacatagaatcattcatatcacattctgctgggcaaagcaagccagaaggctggctcagatgtgagagctctgaaataaatcctatctgttaatgggagggttatgaattactttgaagagggaatctgatacaataagaggagaaataatcccagctgtggtttgaaaaaaaaaattggtctgtcacaaaattttgtgttgcaagatggcaaggtgaaaagccatgtaacaggatgctatgcttcaatatctgctcctttgcattatcttaattgtcatgagaccctaggagacgcaagtcctttgattattcttcttacgttcacacaacaaggaaaggaagaaagcagtaagggatattggctgagttccatgcctactttagtgaatgctaaaacagctgaatggattgatgagtgtttatgcggctttatcattgatagaacttcttaatgtggccatccacaaaccaagggtggagtttctagcacaggatttatcttgctctaggatgttccttgctctcctgtgccctggtggtcttgtgaaggaaggaaattggcagggatggggaaggagatgagaagcctgagagtccagccatttaaccctactgccttctattacacatttgctgtgtttgatatttttttccaccagaagagccccagggattcatgctgtgagatctcagaggttagagtaaggtaaaaagccatggggtgcagaggagggcacaaaaggcctgcaaagtttggagagaaatgaagcagaaaatgaaagaacacagagctctggtggaaaatagagaatcaagaaattgttgttaaaagtatgggtagaataagagatgtttttgaagataggtctgtaaaagtatccagtattatcagaggagtgaaaagaaagttaccagtgaagtaagtccaatttgtgtcccattgtgaaggtcataggaatgaaccataatattagaaaatactgttttagatacagactttggctaatcctgctctctagtaataggatgagtgaggaatcactcatcagaacctgttcctggtgatattttagcattacaggcaagaccttggggtcttctgattttctttaagagaagcacatcaacattaggtaaacagctcatggaacttcacaaggcaaacttctcatcactacgccttccccaacaatgaaagctcatctccttccttctaaacccatagggtaatttatcttcttttttgaactccacacacatggaatcgtactgtatatactcttgggtgatttgattttgcttaatatgacatttttacacttattcctgttaagtataattctagtttagttttagattgtattctactgaatgaagatagtatcccttatccattctacagggataaacatttggctttaggtcattccgagtatttatttgtaacgaggatgtgagattcattttgatacaaagtaatggagaatttctgaacaaaaccaacttagttatttatttattaactttggataacagtttctgattagatagaacaacaataaattgaacaccgaaggcaagctcaaaggtgaagtttggcatgacttttggtagcggaaaggtctgatgcactattgctatgtacaaaaaacaatgggaaatgacccagagtgtagacaaaaatggtcatgtggtggtcaaagcccagcagaagagagtgtgtttaattgtatacggcgatgaggcctcaagaatgtgctcagttcaggagtttagtaagattcatatcgttgggactttgtgggatgtgatggggtacagaccagaagactgcaaagcacgtggttgttgtggagaatgtgttaagtagcttagcgtctgggcctgggtgatgctcacactgcttgcttgctgtgacctggaagcctctctgctctcctgtgagcaacaaaggccagaatcccactactgtaaagtgaaatgacttgtcacatgtctggcgactatgtaccgccatagagcatcctctgtgactcctgctgtgatggagtcctgccaagggagcttagacatgtcatcttcattcttttctatagagaatgaccctcctacaagccagcttgcaggttagtgtagtgctctcggcagactgagtttcaaataagcaaagtatttgaagccacattgctattttgttcttaaatccttctttggtagctatgtgaacttttgaaatgactgagcttttctggaccatgttttcatgatccttatcacatagagttgtttctgagaataaatgaattcacatatagaaaagttcaagaacagaacctggcatgtggcgagtacatggtattatcatctagactctctttttgaagcagcagtgaatgatcccacattttccccggccgagtgcacggagtccatagccatggctgttgaagtctttggtacatcagtctgtgcatgtcagcccaactacgtgccaggatgctcaggttaggtttccaaagaatgagctcaccctcagtcgtggcctgtgtatgggaatgtagctgtgtcctgtccattctccatttcttcagtttcttccccatttcccaaagtctatgggtttttagttctttcccagcagttctctggtaaaccccgtgtcctttgaatatgtggcctggtcagtgtagacatagtgagaatttctctttcctattcattttctgaactctatttatgcaatgtaaagttataatcgttgtttcttctccacattatgctgtcaaatcagtttgttagctataaccaaagcacctagatctatacccacatttgactaatcttaaagttactccttcatttaaggactgcattgtctgcttaatgtagtttcaactgccagattggtagctgtcactagatgtactgctcaaggagtttctagtttcctggcatgtcatgcatggaaacagatttgaactaaagtgtgattgtgataattgctttactagagatgtgcaaagaacgtttggtaacacaaagctaaagacccagttctcagtggggagagaaggcaagagcagaacagtaaggatagcggaggagagaatctttgccatgacacaagatcccagccattaagaaaatggaaggaaaggattagctaagtagcaggaatgacccaattgcaatgttgtatgacacagcctgggatcatgttcactgcagtgagcagttcctgtagtggactagcaatcacagagaggagtagctggggtagattaggacaaggtcatcaaggttcacaatgttataatacaaaaggaatatttaatcctatgaatagtaagctagtagaaaatggcttaaggtcagaaggagacatgattagacagatgtaagttttaaaaatcctatgctggtagcttatagtgtctgatttgggacttgtaggaagtgtgaagtggttgtttgcaccacacaagtgtaacaaatatagcaacaatgactaacacagaacaaaacgtggaactaagaccaaggtatggccataggagcaaaaagaaagaaacattttgatagatttgtaatctgggtaaatgtcattcttgggtgctttgagtgatgagtagcccagggcttgatctgtcagaaagaggaaagaatcaagactcatagagcagattggtaaccgtgatgtgcattacaggacagggggttacaggacaatgggcttgggagaagtgaagcatccctgtgccttaaacaccattggaatctgtggggcagtcacatagaaatgcatagcaggcctttgcctcttgttcaagaaactcatgtgtgatttctgttgagcgttctgcaaagaggtattggggatcatcaattcctagtcataagaccaacgaacccttaaaaggtctagaagcatgcatgatgggactcccagaccatgaaagaaatgtgaagggtggcctcagaagatcattttgcaaagtgtgccagctggggaattggttgaaaataagttaaaaagaaaaaggtggccatggaaccaaatctaagttcacaaagcccatgcactacttaggttgggccaggcaagtggcctcacagcagttgtgcttcaggctggcctggttccttttggatgaatcctctcctcctcttcccagtagattccaattcgtacattctaccaagggtttgtggcaatttattagttcaaacggggtaatgatatctcctctgattttccttctgtttttaatggggaagaatgcaagcagaaattggctatgcagcatttaaagagaagccccactatttttcataaattcaggctacctagaaaacagcattcatgcagcatttacctttttaaaaattgaactctgagttttcatgcatttcaattatgaattcctttaaagcagaggtaagacatatttatctcaatgttcccagccctcagcacagagccccagcatccagaagtgctctgcaaactcctatttcctttcttctttaccgttatgcatctccatagttgagtaagcttagtttcctgagttctcttgaatcttcttactttatataacattgatgtcactgtgtaatgcctatttggcttcttaattttattcatcttccctccctccctatctccccctccctcttttctttccctctatctccttctctcctcttctcccctcccctcccctctccctccctacctccnnnnnnnnnnnnnnnnnnnnnnnnnnnntccttccctccctccttccttccttccttccttccttccttccttccttccttccttccttccttctttttctttcatgtgtttatatgtacatgtttgtgtatgtgtggaggaattgctcctcttcaaacactatccaccttattttcatcttatatattatttttgagacagggtcccctaccagagactggatccttctgtttcttcctccctggtgctgggaatacaagcatgtgccaccaggtctgacctctttttcagggtctccagggattaagctcaggttcttcatactagagaagcaagcactttgtaggctgagttgtctcctgagcctcacttctatgtcttttaactacttaaggtttggcatcttatgtttactctgactgttcaagtggaagggaatttattttatgacctggcatctgagagctggtaagtgaaatccaagcctaaaaagagccaggtggggatgaaaccaccagaatggactgccacttctcatggctccagtcacctctgcatcttgtgttcttctagtttttctttctcttcaaaatctccatgataataagcatctaaaacatgtaatagagcagatgaattctgaaactttttttttctgttttaattgtcaagaatttcaccattctgtgcatagaatcttgttgatgtcatatctgtcccaccctgtcagtcagtccttctgtcggtcagagtaggttaggatggttgctttgcctgccatctaggaaacatctacatgaggaggccatggccctcacttgatttgcaggtgagagcacccacctcattgctttagttttcctctgttttgcaacctgtctaagggatacatttcctgccccttcatcccttcaccctactccccaggtaacctcatatgcttccagaaacctgactatgggatctttcttgactttgagaagtttatcaacaaaaatgtgaatgtcttgctgctctttctttggatgccttctgtaggactgcaactagagaatggggggaatttggagtctttgtaccaactctaggtttagctcggttcattcaggtagttcaggacacagagggaataaggatgatggttgcttcttgcccccatatgcaccgaagcgcttcttgttttctcgctagtcaaacggggtttccttattcagaaggtttccaggttttacctattagagagtaaggaataaatggaaacttatagcaaaaagaaagaaagggcccaggtttactatctctttatctgtaccctatgcagaacacagttgaaaattatacttctcttagagtgaacagttcttaactgatggagatgcttcagctagtaaatttcaaaaacattctatttctgggtgggatggaatttgcattttaaagaaaaatatttatcattgtttcatttctttgcttgcttaggatctgtatgttttggtatatgactgggtggtcagatttgtaaaagcagcccattaagttgttcctattgtcatttaattttttttttcgtttgtacagggaatcagcagtctcttcagctctttaaaggtggtgcgccttttacgcctgggccgtgttgctaggaaactggaccattacctggaatatggagcagcggtccttgtgctcctggtatgtgtgtttggactggtggctcactggctggcttgcatctggtacagcattggagactatgaggtcattgatgaagtcaccaacaccattcaaatagacagctggctctaccagttggccttgagcattgggaccccatatcgctacaatacgagtgcagggatctgggaaggaggacccagcaaggactccctgtatgtgtcctccctctacttcaccatgacgagccttacaaccataggatttggaaacatagctccgaccacagacgtggagaagatgttctcagtggccatgatgatggtcggctgtaagtatcttttttctttctctattaaaaccaattttagtctttacagttttttttttcttcttacctctgaactctgattggattgaaatgatctttctcttaaggaaggttttaattgaaatcatttgcaattggtttacttttgattcatccctagggaataaaaatgcaaggaatgtattttactctttgggatgcattagcacatgaaaaactgtgtgtggggagtgatagaaaactcagattgggaagtctgcgatttgattccatgcatgttgttgtacctggcagctctggagaaagaactagctctggtatctagacaggaggtgtctggcacattctgtaggttttgttggcagttggattcctaaaaaagcagatgggatatatatataagaccgtaagttagaaaatattttagtcaataactgaatttctgaattaaagtggacttcaggatacagtttgatgtattttttttattttaatttttttataatgaagttagcactgtagtcagttgagtttgtgacaaagaatgaaagggttggtgagctgaaagcctgcagcagtgacagagtccaagactcagtgtgcgtgcctgactacagtgacttgacaatgctcttgaaagcagaatgccctttcaaagagctaaagaccatgtgctttgcccccacgttctgactgaatgacagcagagttccagacatgaaagatgttcaaactttagatgctgttttaaaatgtctcgaaggaaagtttccaggcatctccaccttcaagctgacctagatgactcactgaagcccagttcagccaccaaaagtaacttcaagattgtgctgaagacgtgatcagccttgacacgttttataagccttgaagtcattattgctggtgttttgtgtagtaatttagtataagccttcttctcctcctccttttttgaggctccaaattatagagctttagatgtgaacattcatgaaaaagattcagagtctaggccaatgattctcaatcttcctaatgctgcatatctgatatgtgaaccctgtgaggcttgcgacccacaggttgagaaccactagtcaagacattcatgcctcagagagtccagaagctactggtgttatgaaatataatatagcacggaggtacctggcaggctcatggcaaggtaggcccctgagcaattatgttatgcaataaatctgctataaaggaggtttactaggggaagggagaggagcgagggcctggagaaggggtagacaaagggacatgtagacagacagatagatgggagtagagccatgagggtagagatgaggtagggaggcagacaaggacagaaaggggaaagagagaatgtggaaacagagaaagagagagaaaatgtgggaacagagagagggaactggagtggcaggcagtccttttgtaagcagcccacacttggaggcaggagccagatgatgatggaagctgttgctagttccctgagagaagccttgtggagtaacctgaagctaacaattgaaacactagtgttagcaagtgtttagttccctactttagttattatgtattcagccacagagacaagagtacccaagttctgagggtggattagggcttcagtaagatctaagagtagaatgcaagtgttgcctcttctaagggcctttgggagggaggcatattctatacacaaagagatagatccatggtgattcatttaatgggtactcatatcaaaaaggtatttgggcaatagtgtgataaataaaatgttctgtcacatgtagaattcagcactatgctgcttttaacatttatgaaaggcatgttacctgatacagtctagaactggctaacctttctgaggatattacaaatggactagaaattgcagtggttgtgcagagaggggctctatttgctttgtcttgatttccttcttttattcctggaatatggtatcagaatctacagtatatgttttgccacaggtgttgattcttgtcattgtcgttgcagggaagattcagagttgggagttgtggatagaggtccgtgtagtgtgcttgcatagcatgaaaggccctgatcattcttagcgacagcactgtggtggtggcttacacgagatgtcccctgtagtcttgggcattggaacactttgttccctcattgatagtgggaagtttaggagacatggccatgttggggcaagtgtgtcacaggagatggcctttgagagttgcgccatttctacctagctcttcttgcttcctacctgtgcttcaaaacaagagctatcagattcccgctcctccttctgtgcttctgccccaccaccgtggagtctaaccttctggaactatgaccccattccttccatgtgatgctctgctcatggtgttttattactgtgataggaaagtaattgatacaagccctcaaagcaaaacaaagcagaaaaagactcataactgtcttaacaccacaaagaccttctccatgcaattacggccctcccccaaccctccccagtctcttcaaactaacaatctattctacctctttattattttgtgattttaagataataaagataaaataaaaatgaaatcatgtaaaatgcaacttttaaaagttgccttttaagttccagttatacctttgagataaatgtgaatggaatttgtcaatagctttcttctgggttgcattttgtggtttggaccactgctgtttaaccattcatctgttttagaacaccttaattaaattaaacattctaattgtttatgttccctaagacatctccattgtgtgtattcactgttgatgctgtgttatgtgaggatacctcaccacaactgtatgcttttcagcgaacataacccttcacagccttctccctcctcccctcccattagggtcctttattctcttagacagatttcctctgcttttatgacatgtacacatatatgattttatataactatatgaaacccaaggctgtaaatgagggaagacactaagtatttgtctgagtcttgcttaatttaattaaagagaatatctcaattgtacttatttttcttcacataaaacacttttctcttcctgtctctctcacatatggacagtcttcataccatgttttctttgcccgtccttctgttttggggcagctaccttggttgcataacttacctatcattaagaatgtttcatgaatcagtaaacaatcgcagagctttccctttctccttccaagagactgcatgaccctgtggactgcccgtacctctgcctactatgaagatttcccttcactgatatctttcagggttgtcccagaaacagttgtaacactgcagctgccaatttttgtgtggtgattgcataaccttgagaaccatcagtaaaacaagccctagtcttctcttcctcactcaccatggggcacatgaacttacaggtgcactcctggcagcagacagcattggttgtaacaggagtagaaaccatagacaactttttcatatgacttgcttgtgccttcagaacctgcttgggtctgatcatgtatagaccagttgcatttgataattgattactactgtgaacatgctactttatagcttgatgggtcagataaaatcaagcccatgatgggcagatcaggtttcagtaattcactgtcaaatgttctatttctactaaggcccagtagcaggccatgagctgtctatcaaaagggagaagagttgtttgcagatgatggtagaaccttccttcaaaatcccaaatgtctcttctatgattcacctgtagaggcctaccaaaacctccaaacagcatccctatctgccactgataccccaggtaccactggatttactgcatcatatggtccaagtggtagagcatcctgtgcagcagccttgacctgttgataagccttctattcccggcccactcaaatctaacagctttctgagccacttggcatatgggccagggtaacacacccaagtgaggaatgtattgtctccagaatccttataggcccactaaacatcatgcttctttcctggtggtaggacggactaagtacaataacttatctttcacttgggaaggaatgtctctgcatgtgccatatactggactactggacttaagtatttcaccaaggtagaaggtccttcaagattaattggattgtgtgtgtgtgtgttaccaatggatttacagtcattgatatctcctgttcacttggtccaattagtataatgtagtcagtataatgaaccaatgtgaaatttgtagaagaaagagacaagcaaagttttttccaactaagttataacacagggctggaaagttaacatatccttaggaaaaactgtaatggtgtaatgctggccttgccaactaaaaacaagttgcttttggtggcctttatggacaggtacagagaaaaaggcatttgctagatccatagattcatgcataccatgtaccaggagatgtgttaatctgctcaagtaaggataccacatctggtataaatgctgtaattagagtcactacttgattgagctttcaatgttcaactgttattctccatgatccatctgtctcgatggctagataaaaatgttaatgggaaatgtatcgggagccatcacccctgtatctttcaagttcttgatggttgcactaatttctacagttcctccaggaatgtgataacattttttttcattcaatttactcttctccttgaaagagaaaattctaaaggtttccagttagcctctccaactgtaatagccatcactccacgggacagggaaccaatgtgagaattctgccaaattctaagtgtacctatcccaattatacattctgatatgcaggtgggtttgagatttatcaacttggattcctttagaatgtttctactttgaaggaattacagataaaggtgcttggatgtatgcagttatagttttgcatgaacctaagttcttaattctctgtaataatgcctaggatcacaagtaagtacatatttcaatattaaagaatttgccagtctctttttcaagaagggtagcctagaatatcatttcctaacataatcaaagtaaaataaaaacaatgtagaagtgtaaacacattcttatttcctttgttcatcaagctacaacttcctatctaagaccaaatcaatgttgtccgtagcttggaccattgaagtagttccctatattttttcttccatagctattcttatcctagaatctgtctagactctagaagctagagtaccccctttaaaagtaaaaacacagcaccattccttagcacagatatcgctagtggatataaaacaaagactaaattgcttactgtttccacatacatgtagaaatgtatttcattttacttttatttgttctttgagaatttaatataaaatttgataatatttacccctccaaacctcccagatcaaccacattccctactctgatgtctattcttggttatcaagttgactccatctggaattaacccaagtggcaggatacacctttgagagacttttcttaattaaatcatctgaagtgggaagactcacttctaatccaaatctcttgaactggaaacatacacctttgatacaaatcttttgaggtgggaagatccacctttcatctgggccacaccttctgcttccagcctctataaagggattggaagaaggaggcttgctctttttgcctgcttgtttcggctctccctgacaagtccattccttcactggcatgcgatcctgctcctttaggattctggcatctactgaagacctgctgagacatccagcctaatggactgagcaactattagattcttggactctctgtttgtagacagtcatttttggactatttggactgtagcctgtaagccattttattaaatcaatttattaaataaattttgtagtgtatcatccatgctacgatgtgatattggtgatacagctgttgttgagtcatttctgctcctctaaatgatagctcctttatattcctgtaagtaactccaataaaatccattgattcaccaagttagactgtggtggtatccatacatatcatcagttctctatctaggttaagtaggtgtttgtacccatctgttcgtacctctgttggaaattctcacacaatttcatttgggttttcaaaatgccattgattcatagttgattttattttatttttctatgttatgtgtggctgactatatctgcaagatctagatttcctaccctcttgttttcagtccctgattagttttaagcctggccaccttcttccttgagtttctgctatctcatttcagtgcatgaatagacatcttttcatctattctggtacttagcatcttcgtgccaattggctttacatttctgtttaagcctctgtgtgagtccagcttctatagccagactgttccaaggaaatgtattttaatattcttcttagttctgcagtctgtagtgcttttgtggcatatttcccttcagataaacttagagggttataaaagtctttcagactcatgaagtggtataccttgaacagttccaggctttattacacatgtatgtacagaatataaaatatgaacactgcagatgtttgtaatcttgttttttcttcatttaatactactaaggaaactaagcaaaaatattccactgctggtatcagaattgagtatgttctgtccatccatcatggacaagaatttaaagnnnnnnnnnnnnnnnnnnnnccttcccctccccctccccttcctctccctcctctctctccccatccccctctccctccctctcccccctccccctctccctgagagtgtttatctttccatctctttctttctctttctttgatgtgcatgtgtgtgtgtgtttgcatgtgttgtgttttgtgtttattgtgcttgttttattgtggggagagcctcttaaaattttaatgtgatgcaacaatatttagagattttagtggtagctaatccagtttctccatttgagtccttttatccttttgtggtgttttcttttctgattcttatgttcttaccatcgaatgctaagttgcatgttgactttgtctaataatttaaccatatgatcttttgtgagtgagtaccagagaaatctttaaggagaaattatgaatgtaatttagttttccttgggagaatgtaaacacaaatcttttcatctcatatatggcactgaggactgcctaaaggaatgattgctctcatgtctggtttgagattgtttgagttaattatagcagcactagtgactcaaagacagcatctttttcactagaaatcccatctttgtatgtgcgctgattccagaaaactgcagctctgcatctcagtgctcatcttgcagacaacgtctttgaagagtctactttctccagaaatttcgtactgcctttataacctttgaaaggaccttataaatcttgtaacttcctgagtttctcaagtgagtttcatgaacttcctgcaccttctaagtttcctgagcttcctgaatcttagactctgtcctctttccacaaaggctgtttcaatttagtggaaatagttatgtagttttggcccattcctaaggtatctcagctaattcccatgtctctaggataataatgcatctctgttatctgctattggggaagtttttaaacttaaaactcattcaattctaggcttgcccaacgtggaaaatctatttgttcagcctgaattgattttttttttgttcttctcaatatatgttttcattcatacttttatgacttcaaattgtctctttgtagttttggcatatttcccatctggagtgacatctatagttctgggagtagctattaccttaacaatttagtcaggtcttttccagtgttccacatctgtgtatttgtgaatgaatctgacattttgttcgcattcatgaaactcactctcaaaggctgttagtgctgttagtatcacagcagttcagttctccagcggttgttgagaataacagatttgtttttgttaaatcaagaggtgggtaatctctttgctaatttgctcagtaaatacttaatgatgctttcgtgaaatggtttctaatccacttaatttacataatcttgttattgaatcctaataattttccattttctaaagatcagcagactgtctaattttgcagctattcataaaacaccttagtacactgataatttgttttgatggttataaaacaacaggatctgagtgtagatttttgttttctaatgtgattatcctcttaatgtatttttatgaatcttcttctaaagattcatcaagaaagcaatttacattattactaaattatcatataacttacattttagcttaatataaccatcacaaagaactctatatttgcctctttattacaattttataaaacagagaaacacgaatagaaagtgagttacagatgactcttgttcataaatagtatttttctccttgtgcatatttgcatatgtataattgtattaattgtccattgaatatatttttaagtttacagatataatgcatcaaagggctaccaggttggattttgagcattcattttatttaaaacattacttattctttctactattgtttgattaagtttcagattgaggtagcttaactcatatgaaatgtaacagtgagaatttattctgcttcagggagctttgagaagctaagaaaagcaagactgaaagccatgaacataaataaattgttgaggtttaattggcaggcaagaaacccagttaataatgatgatagtgtgtacagttttccaaaatggtatcattgacggtcacttaaacactctagaagctttttgtaatggacaagaacagtttacaatcaagcaggaaaatggtttggaagatttattagaatggcaagcccacctgccaatgggatgtatatgatgggaaatttgactttccatgtaggtagtaagggttactggggtgtgttcggtcacacagtagtcatcatcagagaccagctccacacatccttatcaatagttggtgagctcactcatcatctctgtacaattcatactatgagtcaagtgaggttatggactttgtccttgacatatcctcacttggaaaaaaacatcaactgagcatagagactaagagaatatacattaattgagtacaaaggcctgagggaccatcttacagtcttcaagtctctgtgtgttttaattaatttttcaaatgttaagtgcaagaattgaatgatggtatttccatcactttttttttttaaatgctgacatcctagcgtaccttctcatggtaataccactgttcattgggtggggcacatgattctgtgaaaaggagatggcatcacaaagagtgccattgctctatggagaaaagaagtgtcttctatgcaacaagctgaataaagagatgagaggaaaggttgtcagggggatatcatgaaggtaagaaaacatgcttttgcagtgtatttggaaagggaaatgtttttccacatacaaatgaggcactgggaagattgaaatgtacttgacttggggcacaaaagacattttcacatgcacctgtggagacctatgaggttacctgacctagatggattcacagaacgactttaaagtgagttattgttctattccaatattaaggacattcttccaccaaccgtcatgtaacaattgagttagctcaggtgtaacattaactgctgtgttacacggtctcctgagcctgctctcgaggtgtaggagggaaatggagtgtgaacatgctcattttcacttgggtttcctgcttagccagatggggagagctttaagcttggtgtttattttggaaactgggccagttctttatgttcgctctacccttgcctgtgagaaagatttttgcttttatcttctctttcctttaagaaaatgagtatcccatgaggtgacacattttgtgaagctcacagttcatagttctaggtagttcttttatggttaatactttcagatgtagtccagtggtttaaaaaaagaccatgtgaggtgcattcttgtccccatctccttatcaaaatagaactgctctttgcaggaatgttctttcatatcctgtttcttttgatgccaaatcacatttccacaaggcctgctagaatatgtaaagcttttttccagaaaacagcaagaaatgttcttaatggtctattaagaagcttgggtggggttgagatccaggactcaggaatggaattgtgaattactaagagttctttagtccatttgggactacagtagctgttataaagcactggtatgtggctgccaatagaagcttcttggcccccagtgagcttgttaatattcagtgagcttttcagaacgtcagagagaagtactgcacctctctctctctctctctctctctctctctctctctctctctctctctctctctcccacctcatctctaccttcctactgatcacaatgtccatctcttcctccacttccagcttatctctgtagaccaggatccaagactttgtaggaatgaacaagagactgagctcccagctacagtgtctgttccttttgttgttgtttagttgaaaacattgcctttcagtggatagctgtgttcactgagacaatgttgagtgtgtaaatgaaatgatatagtataacttagaatatgttgccaaggagagagagagagagagagagagagagagagagagagagagagagagagaggaaatactttggctttttggtagaaacttgagtggaaagcagatgtgtctagagagaaagaagggaaaataagatatcaaaaggcttttcctcatttcaggagggctttgactattatcctaaaaggtctgggataagcaaaagaatttggttcttctgtgtggaagattagttcaagaagacaatgggtattggcaatgaaaccacctaataagctgttgtggtagctcaggatgacatgatgaggtgtgacctgtatggaggatgtctaaatgtagagttggcatgttttgctgttgttaaagggtcacatagtaactgttttagggtttactaatgataccatcatctccattattgtattgctggaatgtccatagaaaacacggaaatgaatgaatacaatccaactttgaacaggtggcagactaagcagttcactgcttgtgagagactgtagacttctgaggctggaaacctgcgttcaaatgtttcatcatctcttataagaatttataccagctttctaaggtatgggccatgaccctgtgactgaatgtaaggtacatggaaatttggtatcagtaaaaggtttgggaatgtgcaaagatcaaacgttaattaaatcagttgcagaagggctcagaggtgttttggcagtgcttgctaatgctgcactgcagttctggttctgaacagacagcaaatactctctgaaccctgcaccactaatgggtcctgcatactacatagaaaattgttattttttatgacttattgtcagtaaatattcattttgcatatctattttatatgcccacattcttggggttgcataaaaatacctgagcaaaaaggagaaacaagtggagaaagtttaagaagcttggggataagccttcacccataagatgtagagaacacaccctgtcttgtcttgcagagttatttgggatatccatttgggagagcctatgaaaaattcctaagacggattttaaatttgtagttgatgatgaattgagtgtgtggggtactagagaagagtctaaaaggatgcatagatttctacaaattcagccagatgagctataaagcacatttatgaggcagaagagaaggaattggcagaatgatgctgcagccagaggagatacctcaggtcctcaggctggagggcttggttgggccattggaatgtgctgtgggctttcagagacctgagccacggagaggtggctctaggagtcattgcctatagaaagtaatgggtgttcagacaggagggacatgaagcttagttgggaaaggagagtctcgaagtgtgtaaagaagagagggaacatatgcttaaaaattttctcttgggttataaactaaaattgagcaggagagaactttttactcagaaaagaggtatattttctcattacatgattatttattgatttccagtgagttcaatttgacctctaaggagctgtgcacgtctcaggacagactgacctgggaggcaaggggttgttttttgagaaaagaagcctcatagggtcctcatacaggtgtcatcaagagtcaattgacagataattttagtattgcataaaatattatttttcatagattggaagacttataaatgtacatatgagtatatttagtgctagttaaaataaatatcacagcctttatgctagagtttcaaaatagttttgctgtgcttagagaaggattttccttgagatgctttctaagccaacttctaagtcactggcagccagggatgcagtgctaccgttgggttgtgtgtgtaggaaatatgatctttatgtgatgaaaactacattcagtttgtcttttgagaaatgctggggacatcacaaattctctttgaaggtacagctgccctttcagaagcagtttcaacagctgccttttggactctaccacctttaaagctgaatttttatttcagaacggccagcattcataatttgtagaaccctaatctggaaacattaccaatttgaagtagttgggaaagaaaaaccccttcattggtatctggagtcgggtatagactcctcctcagagagtttgttagaggatttgtacttctggccatgttttcttgttttgagagggacttgagtttgtctaccaggttcctcagagacctgacacctattttatagctgggtttcttcaatgtctttctttatgagttcctaactgagaacagacacctttcttctgtcctcaagtaagttccttcaacccttactgcgtggcatcctcagacttccccatctggatgctcctttctcatctattctaggactcctagcagcagctggaattaggggcaaacgaggtaggtgctcctgaggcctatgtttatcagcattacccttttcaggctcctcccactcggattcgctcttattcactctttctagctcccccaaacctatgaccacccttctttgccttagttggtgataagatggtagctcttacagatggagtttttaaaaattatttcacttttgaaccttctcatacagtctgtgtgtgtgtgtgtgtgtgtgtgtgcatgcatgtgtgagtgtgtgtctgtatgcatgtgtgaatatgtgtgtgtgtgtgtttgtgtgtgtgtgtgagggagggagagagagagagagagagagagagagagaggtataggatagcttttattctgagtcaaatacaaaggaagacttcttgttctttgttatcattgtcttctccttcttcatctgtttcttcatctgcttgttcttccttctnnnnnnnnnnnnnnnnnnnntgtgaatatgtgtgtgtgtgtgtttgtgtgtgtgtgtgaggggagggagagagagagagagagagagagagagagagagagagagagagagagagagagaggtataggatagcttttattctgagtcaaatacaaaggaagacttcttgttctttgttatcattgtcttctccttcttcatctgtttcttcatctgcttgttcttccttctccttctctttctcctcctgctccttctgttcctcctgttcctgttcctgctcctcctcctcctcttcattctcctcttttcccttcttcttttgagatagggtcttgctatgatgtccttgaaccctttatgctcctgccagagccctgaatagtggcatgattttcctatgttctctaactatcactctaatgctgtgtgaaaaaaaatctgtaagggttaaagggtggaagagagcatgatgttcaatagttaaggtaagagatgatggtggtagttggaaatgattcgattgcagacttgtagttgaggcttgtaaatgggatggggctagggagagaagaattcacttttaattcactggtgtacgcagctactgtactgagccaaaggtgctcttttgtaatgtcgtgtggactgttacatatatggctctagaggttagtaaagtgagccaaagtgtggttagatatgctttgtagttggtttctccctacaataagtgctttcatttgattctgctctttggcacctcatccatctcttcatccccatctctacctctagtccggagacatgattttgcctcctcaatccatggaaaagcacacatccatgtgaataaacacccagccttgcatcctccgtctcatgcacctgcccagtcttccatgttcatgcttcctaaaggcttggcttcctgggtccatttactttctgttgggagcgaacctctttccctgtcctgcagcttctcttttttgacaggcttcctagacacgttctccccatcgtgtgaccctttagcgattttcacccttctctgttgcctccttacccacttcccttgatagttctctgtgttgccggattgcctttctccaaaatgtcgaaaactgtgatattggaaacgaatcattgacagaccaagggcagctgccctgagagcctgaacagtttttctcacagttgctacttagtgagaagagctggctctcaggtatttctctgatgatatggtctgatagttctacaattagaaatcctactttgtatgtccttgatgacagaagggcctctgaaactcttttccccaaacagatgtaattctctatctattactagttccttgtcacaataaagcagaaacatacaatgagatcactcaagaaggtggaggaaacacacgagcctggggtgtgccctttgggtgggacaggaaggagctaaggctgctcagtgataccaacaaggaaaagacggttcagactcctttattcctaattctttggtggaaaattaagaaaggcttgataatttacagtgctttgtctgcaacttactaccctgcagtctatgttccctagtcagacggatgttcctgtcacatcagatctcattatcttgttaaagtctgtaactgggtcctttcatttttttgtgtgagtgtttattacttgcctctccaattaagataggagtcacaaagtcagagaaattgtacagtccagatctgttcctcaggagtgacaggaacattattttggaagagatgagtgaatttgatactccatatttgaaaagtggcccaaaccacacagctccataatagtggtttccaatgtatggaccatgaatggagaagcagaaatccacgtctgatttcaggttttttatgaacagaggttcgtccatgtcctctgcctccttttgtttttcaaagcaccctcaacagcactgtctacctgttcttttttgttggctctttaagggattcatacagcatgttttgatcatatgcaataacaaattttatccaattcatcctgcttcctacccagttctgtgtgacttaaaaaaattcaagagccaatttgtgataccccaatattcttgagtatgtcctctactggaggaccatcaacttgccagggctataatcttagagaaaactgtctttcccagtaactaaccattaccaatagctccaaggcactgaggtgatactgtgttcccaacacctctctcgctgctaggatttgttctggcttgggcttgcacaggttttgaacatgctgtcacagctgttgagttcatatgtgtaactggtttgttgtgtgcagaagatgttatcttgtccccaccactctaggctctcacactctttccacctcttctgcaatatctctgagcactccaagttccctctagggctgacagttctgcagccatttatttttggaaccttgggtaattgtaggccactgacagtcacattctctctctctctctctctctctctctctctctctctctgtttgtgccacacacatgtgccacatcacacatgtagaggttagagcacagtctctgcagctgggtttcactttctaccttgtttgagtcggagtcttgtttttgcgtgtccaaacattctcctgtcctcttttcccatctggccatgagaatgctgggcttatgggtgtgtaccataacatcagactttttgtgggttctgaacccagatttccatgattgtgaggtgagtgcttttcctactaagcaatctctgtggtcatgcaggctgctctctatgtaattttccattattctgacttcctagccttctgcatagcaaataggatatactctttgtttttggatttccttcaacctgctttgggtctctgctgtcatctcccagacttgtattttactctctctgcctccttccatttttggggggggggggagtgggagaaagagctaagattttagcaatgaataatagaacaagaacaatagcaaagttattttctatctcaagggcctggcacttaaaaaaataattcatgctttcaggataactgttttggccctaggctttaagatgtctcatccaaaacccaaagccaagctagtcttttcattcttagcagcagctatactgatcattgaaaaatagctgtcagtttccacaccaatcatagaaaaccgactatcaatttcaacgacaggaaacagagtggcaattagggaggcctagggagtataagaggaaacattcctgtgtttcttctccttaaccacaactaaatctggacattaatgaaaattttattattttattttatttatttttgctcattagcaatggaaaaacactactggagaatttaaatggtttgcaaacaattacctgtgtcacaaatacagtttagacaggggctcttgcaggccagattggctttcaactcactctgtagccagggtgatggtaatcctctggccttcaattctgaggtgctatgagtacaggtatatgctaccacatctggttcataccgcgttggtgatggagcccaggccttgcatggtaggcaagtactctattaactcagctctattccaagccccttgagtttagttattcagtttgactattctcttcaagaaaggggaacttaaggtcagcatgatttcaatactgacttttagaagcacaaatatgcttacttatttatttctggttaagtgaagagccataaccatatatgtgtattttaaagaaactttaatcacaacaaaatcacattcatttatccaaggagagatctccatggcttctgatgtttgagcccagctttcctgtgatgaagggaatctacttgatattttcatcatttagagtagttcctagagaaaataagggaagtgatgggatttggttgatatgaaaaggacacaactgagagaaacaggaagaaaccagacacatagaatggggaggggaatccaggtattttgtagccctgtgatttacctgattcttttcttttactcttttcttttaatcttaattctataattcagagtatttgcatgcatgaaaaattaatttaaggggaaatactagagctatagaagttggtcaggaggggatgaaatgttacttgaaggagtaattgttaataatgtgcacttgtatatctaaaaatatcatagtgaaacccattagtttgtaccattagtatatcctaatagaatttgtttttaaatcaaagtaacatgttcccatttaaagagcaagtaagtggatagtaagatttattttgaagaatagaaattatattttctacacatattttcctatttcccagagtgctttaatgaaatttctgggtttttttggggggggtacttattatctatattattagaggaattattttggtgtcaacactgtctgttggtgtctgtctctgaagaattaaattatagtattttttccttttctccatgtcttacatttccatttttacctttcttatgtattctggttataattgtgatccagtcacaatgttgctttcattattactgctatctaaacaccttttacaaccaaaccatgtggtgtactctgatcatgtcccagaacaacactgagttctctctaggctaataattgtcattaacttcttttctttgttttccatgtgcttcctttaattccatcattaaagtttcctcctgtacgtaatttgaaatctcagggcaatcagctggacagttgtagctttgctttttggtttgtatctttcctctcactttatccagcctagactcttgtctatagactgaacacacagctctcagactggtactgccattatggtctccagggtcattttgccttctcttttgtgaatcctttatatgttagatttagtttttctctgatattacatcatgccttaagctcatctcccaaatcacatcttttcctaaccccatatattatatggattaatattgtaagataaaaattatactttaggttgtactattggcctaaccttttcaggttatgtttgagaattaaagaaaggtatgatctttaccagcattatggataaagctggatcaaaatatcttcaatttcttaaacttaggatttgatttattctctatagaatacaagacagcaataaaagaacaggaataaatccattcttagtaatacagctaaactgaagacaattgggcctaaatttcctctctttaatggacaattcatgcctttagttcctgactttaattgacagcattctgtatctgtgagtgactcagcacatcactatttagattttattggcaaatcatagatgacatttcagtttggacttagacaaatatattgtcagatttgaatattgtatctgagctcgattttagttaaaaagcacttggattcctatgaagttgtcccctgtgaacactgctatgtcagcatcactgttaaaatctttggcttgacttatacacccaaaaatagatgtatggactgtggggtctacttaattggagaggatgaaacacgaagtgtcttcttgttgtaccaggaatttttctgttgttagaacttggcctattgaaatgaaagcagaaaaagtctgacaagtcaaagttaccatgattggtagtaaaaggaaaaatttgaaaatattatgattgtattctgtttctgtggtataaactgaaaactcatacgcaggggtagaagatgacacagtgggaattaaacatggtaatgaatctagggtaagcagtgctcatgactattccaatctgtagatgatgagctattgaagtctctgagaataaaattacatgatctggcatgttgaaaagagtcagactgatcattgcattgaccctaagttctacagtgacaaggtcagatggggaagacaatctagggaggttagtgaagtagttgtagtgagatgtcatgatttcttgacccaacaaagtagcaatggtgagaagtggttggacactagttatgttatgaatatagagccaacgagacttgttaacacatgaaatatggggttaaaaatatttgtgtgtgtgtgtgtgcacgcgcgcgcgtgcgcgtgcacacgagtgtttgtatatgtgttataaacatgcaactatcacagatgttagggaactatcgtatttcctagagctacagctaggtggttgtcttcagtctcatatgagtgctaggtatcaaaaccagatcctttgcaagagaacaagtgctgttaactgctaagtcaactctccagcccctagatgtagggttttaaagtgatggagaaattaatgatgaccacgacatttgcttggcctacatacatctaaggaagaggaagaatctcagagattctggagggattgatgtggtgaaatgaggggctaagttttgaaaaggcatattaagtttgagatgctggttaggcatataactacagtaatctagtagctctttctaatgatgaatctaggtttcaggaacagctcctgggatagtaacagatttggaaatggtgtggtggtgatttaaaagtcaaaggagttgttgcagcctcctcatgatagaggataaatagaaaagaatctcttgtgacttcccatagctagcagttggcaggcagagaacaaataaggaaatggaacacgaagggagcattcagaagtcaaaaggttctgtgggaggaaggtgcactggaggccagcaaagaggcatttgcaataggggatgtgtgatcagttgaaggtcaagcaggacaggatctatagaagttgatattctgcaaggagtgggatggtcatcagtgactttgtgcagatctggtataatcccgaggaccaaagctcttgccgacttaccagttacttcatttgtaaagtggggtaacacttacttcatcaaattattgtgcaaactaaataaattaatccatacaaaatgcttagaacagtgcctgacaaaaggtttgttgcttttggaaatgagtcttcaagtactcattcgctgtctgtcaagatctcagtgagggcacagagctaattaggaacctatctaccttattgaacatttaatccacatataatccagtaaagctaccagtgaacctatgaccagagtttaccaaaacagaaggaaatccaaaccatgtctactgactaagcaattttgaagttaccattacatattttctttttttgaaagagagtctcttattgtcatggagtttgtcaattaaactagactgcccagccagtaagcctcagggttccttctgtctatgccaaccccaaactgggattacaattgcatgaccaaatacccagtaattttatatgctttctgtagctcgaacactggttctcctgcttgagagacacgttcgttcatctacggagctatctccccagtacgatttggaatatgattatttattttcccttgttgcctttttttgttttcagctcaggttcatttgtctcttgtcagccatgctaattatgtatgtaatctagtgccaacattattctatgagaaataggtgaaggggagagtgggagatgaggttgcatgttccttgtcacccttcatcattgacccatgccaaagaagcaggtgctagtgattcagttctccccaactccattcatttatcaaagccctttcccttcacataattgtactggagataggcacctttcagaagtaagaaagcttaaatgagcccatgagataaagttcaggcttgatggacctgttgtccttacaagagaaggggaaggggtggtggaggtggagcccagaggtagagcacttggttattatggccaaggcggttccttaatgacaaacaccatgaagaaaataaaacagtgaactggaagagacaccaaggctgtctttatccatctggagcagacatgtgggaaggcagccagccattaaagccagagagaaggctcccattgaaaccctgtttgccggcaccttgacctttgctttccagccttaagaactgtaaaagataaatttctgatgtttaagtggcagaattttgttatggcagcctagatgagacctttcttctgttgccttgacaatcattctgtgaagcatcggtgtcatgtggaacttttcctttcctgttagtcaattcactgtaagcatgggacatttttacatagtcttggatctaatggagcatctttaactgaaaaccctaaataattcctactgcccaagacatcagatccgcagcatggacttttctgcttcttttcattctcccctcctcctttcttctccaccattttccttctaatctgttgacttgcactgtttcctgtggaacgttgactgtaagatatccatccctctgttgctttgccattgttaatgtttgtgaaagtcaaatggccaaaagatcttatcttcctcggtttgttcattgatcccagatgccaagttcttcaaggactcttctagattgtcccaggtcatattttattaatgtgagaattattatatcagaaatatacaagggtttttatttacaatgttgaaacccataattggaaatctgaccgccagttacaggctagttttttttaaaaaggtattgtggccccatgttacagttgatggatctcatttgtcatctaggcacaaaggagatgtgcacttcactggcgatgtggggcaggtgctcatgacaggggcagtaggaaatgattggttactgttttattcatttctcttgtaccgtgaaatgcaaaaaggttatgcatttatacttacacccctatgtaactttatacacattattatatgaatatatatgtaaatatgtactttggactgacacaaatctaatgttgaagaacatttattatgacattcaacaggaaaaatgaaacagtacattttccgagaatttttaaagagcaggaggaagcatttagatgggacattaaatatgcaagctatagtcacacaaaagaaataccatatggtttaatgccatacattggtttgttttaaacctttagaggtttattttcaatttgaaatgagagtgtgccttaattagtcttgaagtgggctagcataacatatgtcttaaacagtcatttacatagtagttttcctttcctttatttatagatttaaattctggtaagccaacaaaatgtagttcacagacaacaggcaaccaaatctttttcactcacttgctaattattttcatatttcattgaagtatggttgacagatagaacatacatttgaaggatattacttgatattttagcacctattatgcatattatatttttcagtaagtgattgtcagaaaaaaatctaattttcatatttatcacagttacactgtatatgggggtaagaaatggggagaatccttcagatctagtttcttagtatatttcaagtataaaagacatggttattaattgtgtttactatgctgcatattgtttctccaagatatattttaatcctgaaagttcatgtcttttgatcaatctccccattttcccacaccctggctttctgtgaccacatgtctactctgtttctacaatgaactgtattgagttcatatataagtgagactatacattgtctttgtgagcttggcttaggtcacttagtgtagaatcctctgagttcttctctcttatttcaaacagcagggtcaaggatgaacccccacccccagtctctttatctgtgtgcaggctagttttatttcaacttgacccaagctgagtcattttggaagagggaacatcaattgagaaacacttccaccttcctgagcaataggcctctggacaagattatagagcattttcttgtttgaagtgagggggtgggtgaggcaatttaccatgggtggtgtcctgtgctgatagtcctgggttctataagaaaataggctgagaaagtcatctggatcaggccagcaagcaacaatgcttcatggcttctgcatcagctcctgccttagtgttcctggcctgacttccctggatgatggactgactacaagtgtaagatgaaataaaccctttcttccccaagttggttttggtcatggtgttttcacagcaatagaaatcccaagtaagacaatcttcttacctttgatggacactgcagttgtttcaatttttggctattgtatataacactacagtaaacatggcagtgcagatatctcgtcaatatgtggatttcatttctatagataaatattcagaaatggtatttctagctgtatggcagtcctatttttttttaattttgtgagggtagtttccataataatgtcatcaattaacattcatcccagcaatatgtaagggtcccttttctccttaccaacacttatgttactaggttttgttgacagatattctactaggtaggagttgacatattgtggttatgatttgcatttctcccataactggtggtgatttcaaacactgctcagccatttgcatttttcttttttgttttctgaaacagggtttttctacagccctggctatcttggaacttgctctgtagactagcatctactcaaatgcaaacactacttctctgtattgtgaaagacaggcttaatttttctttcttgtatttataatagttataggtctttagcacttttttccccctgtagattaatgagtagttttcaagtagcaagagagagaaaaaaaatctctgtgttcctgaaaccttgtttaattatggagcatgccaagcccccatttgaccaattttgttgttgttgttcttggtggttttgtttctcacctaatgtaagcttctccactctgccacaaaatgtgtttcacagttctagaataaggataaaaataaagtaaatgtttgggaggcactgtgagacagctctaggtagagagccacacaaaagtgcacagttactggcaggaatggctaattaattgtgctgcatttaagggatagcatggagcaattaatgcatttaactgcttcattgaaacagaaagctcttttgcagcttgcataacctctttgtataatgagaatgcttcatgaatttataactgactgtgtgacctctgattagggaatctggatatgcaactatctctacatttttattttccagtgtgtaaatccagacctgagctctggactcttcattttgagttcttaggaggagatagggaaaaataggagagtaagattctttttaaaaaatttaactcatttgtatactttgtatttgtaaacccatgatttaatgaatcttattaggcacattgtaatttttatttactgtgagcataatgccaatcatttgtattttaagaaaaaaattgattaagggcaatatcgaatttatctgttttagagttggatgcaatatagtcaaggtccagagagctcaccctggcactagaggagaggtggggatgtaaacaggcagatgctacattacaaggcagctaggaagtgagccccatttctcacacttagcactcttggtatattgtattttctagtcatgagaggttctctttttccgacttatcaaatcgcaaccagaataagttttccagagaccagaaatggaatttcagctttcttctctaaggttgttgacacatgggagctgggatttatcagtattctggctcctgtgtgtgtccctggccttccaccccattcgtcttcaccactggaagcctccagttgccttgccagtttttcccagtgggagtcagaatttgaaagcagggttgagcacagttcatttccccattcatttggctgacttgattggaatgctctctggatgctcttgagtccagcttaaatgcaagccttcggctatgactttacatagggatttgccgatatttttcagagtaattaatactactctgcaaaaggttggtctcttggggctttggttatgaagttcagctttttatccccacaccaactgtcttttctaccttggtactggagagactgtacttacagtaatccctttcagtaaagtacctggttctgagaccagggaaggtgactgtttctctcgtagcatccataggtaaagcatgacagaagttggtgagaacagtgataatcgttgacttactcccaggacattccaggaggactatacatcatctcattttacagtgagcagctaattctctttctagactatcagctaaggatgtaagcccttacaaatactgactcattgtatacccagaataacctcatgagaacagagatgttattattcaggttttgtgggagaacagcacagagacttggcttgaggcaagcacctggctagtaagacgtggaactttaccagttttgttccagtgtagagtgagctgctcagtttaaccttctctgcaggcctacacttttcctgtctgacttcccttttatcctggcacatctgagaatgcatttctaactttctaattcacacagaaaaaggcacacaacaattatatattatcaaaatagcccatctccgggaaatagctatatttgttttataataaaatgaaaacaacttcattgttgttttgggggtataaaaataatatgtgcttgtaaagaggtatggaacaatacataaatgacaaaggaaaaatgatcaggaccagaaacttcattatacaggagcatttgtgtaacaggcttcctggtgtttctcagcgcacacgtgcacatgtgtctaatttttttttgtaggaattcatttgttgtttttaaatctatttccatggctacaatgtaatggggatatatttctgtgacactgggcataagtatacaccatttttaatatatatctttagagaacttttcagttctaatttgcttagaagaggaaaacttgttaaattgtgagttaatttttgtattaaaaaatataatttaaaatcccaactccccaagttaaatacacgagataatgggaaaatcatatatcctctcccctcctttctttctctaattaaaaacccttttatttacttatttttcttttttatcaacacattttcacaccatatattctaataatgccactccaactcttcacagattctccccacctcattagcccaactccatgatatctctctctctctccctctctctcccctctctccctctcccctccctctcaaaagatgaaaagtcaagtaaaacatcaaggtcctttgattatatattgtagttttcaagtgtgtgtgtgtgtgtgtgtgtgtgtgagagagagagagagagagcatgtgagtttctgtgttttcttaatttattttttaagaattatatatataaagattacatttatataattcctttttctcttcaaaatttcctatgccaccctccatgcctcaagttcatggcattatattctttacttattactgttgcacacatacatgcatgcatatatacatacatacatgcatgcatgcatacatacatacattaacacaacctgctgagtccatcatgcatgcataatacatacatacatatatgcatacttgcatacatatattaatacaacttgctgagttcatttaatgttgctcacgtatatgtatatgtatatgtatatgtatgtatatgtatgtatatgtatatgtatatgtatatgtatatgtatatgtatatgtatatgtatttacggcttggcttactgcttggcatgggatgacctatcagaggactcaccccaggagcagactcatgcttccccactccacagttactattactgcctgtagcttttgacctacacatgtgatttcctctgagaggtctctcccgcctacatttccaggtaatcgttatttggtttgcttttgttgtgtgtttaatgtttggtacacagttattttcaagtattatgggttcagacatatcattttgtatacaatttctgtttatatcatgaattgaagagggactggaggtcatgggaggagttggaggaggacagggatggggtggggatgatgtaaatactgtattggtgtatcaaattctcaaaaaggaaaaaaattgaataaataagtaaatgaggtactttagagaaagaaaggaaggtttctatctttgggaccaaccttaacaatgccctctgtatccacatagcagtagcttttttttaatgtggcacagagctggagtgggaagtcatttatatatgtaacaaagttcacaaagaacattgacaaatgctttcctatttagttcaataaataaatttcttggatgaggacaccaggcagaagagactaggtaactcatccgaaatcccacatcttgtgaaattagaatattcgttcagcaatgctgaggccatgctgttagctgtgctcaggcacaagtgcggctgcctggtggaaaaacagagaaaaagaaaggcggagagtaaccccttattgatagaaagattaggaaagaattcttgactgctactacgatccttcttgtagtaatcggattccagttgagtcttttgaaaggaatctcagcggaaaagcagttagatgttaaaagaaaagagcgattggaatgttcaggtattaagaagaatgtggggtatgctttgggcttaagaattaagaggatgatgtccaagtagttaaatgaatttgcgaaaatgggtcaacgaaaaagaacctcaccagaatgcctggtccattttcaggcaggcatattgaacaaattcttttctcatctcatttccagtaaatagtcagagcaagtattaagcgggattttatatgtacaattagaaaggattttatgcttagtattatactggatttgggtgcagataaattcgcagaacactttcagtctttgagtcagccttccctgttaggatagaggggtatatagagaggtttttagcagttatcacatcaataatgaattattagtgcttgtgaggatacagtgatgttttcagaaaagcattgtacttgagagaatgcaacaaaataaaaagatgttcagcttttcatcctctgccaggggtaaatttgaagagggagcagtaggcacggctcctggccttacacagatataaacagaattcaatttcttcaagggaaaaggactgtgtacaacaaggtagcatgtgggagacaagcatattttacttggatggaaaaaaatgaagcattgctattttctaacataccacatttggtattcagacaaattttgaacagtggtgtaagctatgattttcatatttattagtttatatccttatttcattggtatgaacctcaaactctaatttctaacatttctagaagacagtcctcttgactttccacgtgtataacttctgtatgtatctttttggactatctttagcaatcaagtggacaatggcttattgatgtggatcacttggcctctgcagttttccttttcatctgactcccttcctttaccactaaacgaaggcaaactccttcccagcactaagagttcttctggtgagagttctgtctgctgagtcccaacatttatttatctgtgccaacctgctgctgagtggtgcttcattcctctttgattgccaggactatccaagtcctcagatcccattagcgatgtttgctagcctggaggttttcagggcttcatgtggcatcagggcaagcctttctcttccctcaccaatagaaaaacagaaaagatagctcagtggaacaacaaccttggttgttttagtgctctgatgaaatggctccaagactaggggatttccctgaagttaattactcctcacattaggttggttcttcctaataaaatagcacagggaccccaatgtgatgctgatcatttgatgaggtttaaagaatgcatagccagattggaaggctcaagaaatgtcctgtccttttaagtaagctgtgtccttcagtaatatcctgaaatgaaacaattattttaggcatggttgtggttatgaatatgaacatcaaccacagctggcttcatattctgactgagccacttaccatgcaggtgatgttgggatacatactcatttctaaagcgcttttttcatttattatgtggacgttacatatttattataacaggagttagagcaactgttaagtgaggtaagctctatataatgctttcctactatttggtgtcaaatcaagatttgataaaaacttccttacagctttaccaccttctagtagcaccatgagctagggaccaagcctttgatgtatgggttcctaggtaacactcaagatctaaattacagctccactctcaagaataggaaggaatgacctcagaagaatgtacagagtcatgcgatgagttggtggaatttgagaacgtggtatttaaaatgagagaaagagtgcaattcatcttagagaaagttttggtagaactccccatgaagtttgaccagtcacaaagccaactagggatatagattagtattttcctcatatggcttgatcagaacaggggagagccctacctttcagaatgtcatgcctatcaaatgctgttgcctacaataaagcccaatgtgctttttgttttttctcagctcgagatgcaccttgacagatttgggaatgcatgatcttaattaagaaaattcctccctaagtcttgcctgtagataagacttttgtgcattttcttgatattggtgggtctataccagtgaggggtggtgctcctcctggacaagtggtgtagtgttgtctaatgaagcaggtggaataatccctgaggaggaagccaataaacagtacacctccattgcttctgcctcttgcctccaggtatccaccccgacttctttcagtgacgaagtatgaccccagagacagttgtaagatgaaataatcctttcctccccacgttgcttttggtcatggtgttttatcacagtaataggaatcctaacaaagacaccctcccttctaaactaacatattgaggagtaggatattgacttgtgagtttttatggagcacaaatatccatacatatatcaaacatatttattgtataagatatctgcccaagtgatatctgctagataggaagacacttaaatattcctacatacagttccatatttagagatagaatatctaatgtaatggccaggtaactaaatataattttaaaatgttcccgctttttttaaaaaaagaaagaaaatctaacataaagaagagaaaaaggaaacaaagaaaaaatatagtaatcttttatgttcaagctgaaaaaaataacataaatgaaaactgggaaaaacatgacataacctctagactatcatcactctataaaatattattaaattcaggtcaatatctagacttgtatctacaggctggaatgagaatatgaaatattattcttctaaagagaaatagaggcactgggagtgtgtgggctcttattatggcagatatatttttcttctacttgacttatttaatacaggtactgctggaaaattgactattgacttgtgctatttttcttctttacattcatactttattatttgaaaattaaaaccgtcaacaatagtaaatgtcctggtctttctccctcatttctcctgtgtttgttgagcagctatttctcatggagaaaatgaaggcatgcctggcaagaatgtttcttttggatctcatgcgtaatgttcaatgtgggtgtctattgtggtttaagtggtaattgttcctcacaggctcatgtgtgtgattgtggggcttcccagttggtggcagtgttttggggaatgtacttcgggaacatgggaacttgctggctgtggaagagcactagaaggacttgaagggttgcagcacattccatttccagttctgcttttctcttgagcatctaggttatgaggataaggagctttggacacacatcttaccatcatgagctctgccatgccttccctgacaacgtggactgaaaccctgataatgacaaatacagatgtggatgctctcatccaaccattggattgagcatggtgtccccagtggaggagctagggaaaggactgaaggagctaaaggggtttgcaaccccataggaagaacaacaatatgaaccaaccagactcccctagagtttccagtgactaaactaccaaccaaagattacacatggagggacccatggctccagccacatttgtagcagaggatggtcttatctagcatcagtgggaagatgggcccttggtcctgtgaaggtttgatgccccagtgtaggggaatgccagggcagtgaaatgggagtgggagggtgggtgggagagcatcctcatagaagcagggataggggagatgggatagggggtttgcggaagggaaaccgggaagagggataacatttgaaacgtaaataaataaattatccaattaaaaaatgatcccctcttctcttaatgctgttttgatgaattattttgctgtaacaatgaggaaaactacctacctgtacactttctacacttcttgtttgtgttactttgggttatttacttacatttataagctttcacttattgtagatgaaagattaacatctgccttgtaattgtttctgagaactgcaggtgtataccctcagtgtctataggggattagtccctagaactcccttagacacccaaatctgcacatggcctgcctatcaatgtgtccttaaaatcatgtctagattatttatgattaaaaagttgtatcatactatttacagaataatgataagtctgtgagcaatctgacaatcttttagaaagagtgaacatagggtgccatggcctttgagactatgagattgtgtctgccatgttagtagctgaagaagaacaagttgtaggttagtatgactggtggagggcaagggtgaaaagaatgtgtaagcatatgtctgaccaatgatagagaatagccagttgcattggtataacaagagagaatgaatggactgaggcaggcaaactggttatgtgcagtccttgtccttgaacttacattaaggtcacatatacaatcaatacaccacccactaattagtctgtatcttgttatttagtccttggaagaaaaggcaccagggatcacattggtctgtttcatcatcataggaacataactaattaaaattgttttcaccaccaaaggtggccattgttatatccctctcctgctgataccaagatggcatttatatatcttcagggaaatacatacacacacacacacacacacacacacacacacacacacacacacacacacatacacacacacacacacacacacacacacacacacacacacataaataaacatatacatatatgcttttatattcgtataaagaatatttatatctgtgatgggaaacataaggagctttcattgacttccagtggaatatttcaggataactaatccttctggtcacatattatatagcatagtgttccctgcttacctttgttataaagtttatatgatatctttattttctgcatgtttctaattgcctctttgttagaatcttgtttccccaaatccacacattggctgctgtgacatgctgttaaatccttgtgacactctgcctcgatttccttactgtatcttttgcagtttacagaggtttgggcctcctgaaaatgtaaacacatgtaagattacttcagagtgcatcaaccaatgttagagtgactcactgtgactaactcaattgaaatgcttatggaagattactatttttgtagaaggaatatggttaacatctgagagctcattatatatcattagcaattttaattttataataacccttgatggagtccccagttttaagaaaatgcattagtgtatcactcacctaccactgaaaatgcagcccctctcacactgattatccattacaatttctgtggatgtgtttctttttggcactctccatcttaagaacaaagtaggaactaatcacgagttgttctctttttaattttgagattgtaattacaattaattacaacacttctttattccttccctccctctaaaatctttcatctatacatctctccctacttttctttaaattcatggcttcttttttcatcaattgttattgtgtgtgtgcgtgcgtgcatgcgctattaagtccatataatgttacttatccgtgtacgttttcagggctgcacaactacttggtgtgctagggtgctcttccctgcagaagactatctcctcctcacagccttaccccgttgcctgtagttatttgtgtagggctgaggccttctggcctttcccctatgtgatctgccatgtttctcagcatcatccttgttcagctcctgtttaagcagtcatggtcagattttatgggtggggcttctgatgtcactaggagacacaatctcacagcaaagtccctcatcttctagctctcaatatctttctacccctcctctataaagttctctgaggctcaggcgtaagagtcttttgtagatatatccattgggacttgtctctgttgtgatcagaaaaagagaaagagctataagaatatgttctggcagggtgtgggggaagggagcattctggcggacccatgctgaggcatccttttctcctgagggaccagacacacaccagtatagtatagtatagtatagtatagtatagtatagtatagtatagtatagtatggaacagagcttatttagggcatggggaggggagctaagagggtagcagaggcagagaaagtcagagaaggagagaatagagacatagatgtcagccatgaccacatggagagagggggaagggaatggggatagagaggacacaaggggacaagatgcaagagagaggcaagagagccaagagggtaagagagagaggaggggccaagcagccccttttatattgggccaagcctaccttgctgttgccaggtaactgtgggggtggagtttagacacaataccaacagtttccacaactctgaatttttattgcttgtgttttttcaattctttttgagaaattcatacataagttcaatgtttctttgtaaggccctctcctccttgttctccagctctttctgtgtccccatgacaacatctccttccaaattcatgtttgtttctctaattacaaaggcatgtgttctcacacaggaatgtgcacacacgtgtacacatcatgtgcacacatacatacacaagtgtgcatgcatatgtgttcacatatatacacactaacataagctcacaaggaaagaaatcaaagaattttctaattacataccaaaatccaacgtacccttttatattttagtttttccagggtactataattattctaggtggttatataaattgaatttagagagtctctaccaattagacaaaccattgctatattacctaaaaaactggaatcaactgcgaactcctagtctccaaatacagacgtttcatgtttattttagcataaggtctgctgtttatttatgtgactattagtggatcattttacatctaagacccagaggaagggtttgttgttgtctatggcttcatttactttgataaattcgatccctccacttgcctacatatttttactccttacaattttttttaactaaatagtgacttaaaagccatttgcagacattataaaacataatgcagttgttaagggaagaaaaccgcagaggtttcattttgcttttggtgctaatttatattcttagcaggaatttagcctttactggaacgacttgccaatctgtacaacttgaaagaaaattcaccccactaactgtaattatttcagtattaaggatgtgccttagtttccacagttacaaagacatagaacattagtcttatcttttacaatgtagtacttgagcacagagggttacttttctttctatctatctatctatctatctatctatctatctatctatctatctatctatctaacctatagatgcagtagatgtagatgaagatgtagatataagtaacagatattatcaccatataagtgaaagcagagctggcagtctggatcttgaatgaatcctgcagatattctacagcatcaaacacaacaaagatattatttgatttgtagttgttgctatgatgatcttgaaaaattcttgtttgatttgttttgaggtattttgtggtcattttcttgtatgcattttaagatcacctttctagctcattgctaataggagaatttctaattccagtgtgttgatttatgtcctgtcgccttactgaacctagtgctagtattttgctgattccactttggctcctgttaagtgacaatattctcaaatgcttctgctcctctccatcctacactgttttcttctcacatgatcttctttcatttcttggagactctgtagaataggtcagagtagctgtgaaaatgagcatgttttctctttctcaaatgtaaatgacatgtttttttttctctctgtttcctggccactagctgaacagtttactttgcaatgaattccctcctcttccaccagtaaatccatctgagccttaatgcagtgggtgtgtccagtcttggactaaaatctccaaaataaatatttccctttttacactgagtacttcagatatttcactgcagcaacattaaactaagactaagactaagaaagaaatatatgtaagtgtttgcccaaagtacaacaggcacagacctgataggtagagctggggtcgagaaatctacctccagtgaactggagacttctgaccaattgcatataggaaatggaagaaattaagatttttttttgtcctttagtgcatactattttgttattagagtggcaaggagaggcctcatcatgatatttattatcttatgtctatgtgtattttggctgcacatatgcctgtgcaccacagtaatgtcttgcgtctgcagaggctaaaagaaggcagtggatctcctggaaatggaactctaggaatggttttgagcaacactataggtgctgagaatcaaatttgggtcctttgtaagagccacaagtgctcttaattaactattgagctatgtcttcagccccgactgtagtatattctttaaaaatgtggggaactaggtagcccaaactttgtttccatctcacagagagctgcttgcctctgcattagagtactgggactcaagacatgtcacttatgaaggccacagaatcaaagagcaaggagactctaacagactgaatcatcttactcatccagttgaaagtaggtaggagattcttatgggtaagatgtttggtaattcattggaatattgtgttgactctatagtcaaagtaaaaaatctgaaaagaatagcctcaacattctttctcatgtttttagaataatttactttcctagacaaaagtcacatctagaaaaatatttgctcttctttaatatcaacagtaaggtcggggttcctatctgttttacccaggaacattctaactgtttaaactataaggtaagctatttgataaatcttttgctatctttgaaatataaaggctgcagttggaatgtattgtatgactgaagaataaattaaattaaaagaatgtaaaggaaattgtcttagtcaggatttttattcctggacaaaatatcatgaccaagaagcaagttggagagaaaagggtttattcagcttacatttacacattgctgttcatcactgaaagaagtcaggactgaaactcaagcaggtcagggagcaggagctgatgcagaggccatggagggatgttctttactggcttgcttcccctggcttgctcagcctgctctcttatagaacccaagactaccagcccagagatggtcccacctacaagggcctttcccccttaatcactaattgagaaaatgccttacagctggatctcatggaggcatctccccaactgaagctcctttctctgtgataactccagcctgtgtcaagttgacacccaaaaccagccagtacagaaatcatgcaattcatttacagcccaaatattttgcttcatttgaaaaacatctgaaatgaaagatacttgtattcaacaacaaaaaatacacataacaaaaatacatttatttttattttgtaggtgtatagatgacacatgagtgtgtgtgagagagattgagagacagagacagaattagagatatatacagagagaaacaaactgagagacagagagaaacatagtcagaggtagagacatagagtctgtgtgtgagagatacagagacagaaagaccaaaacacacacacacagcgtgtgtctctgtgtgtgtgtgtgtgtgtgttgctgggtttcaaactcaggaccttgcagctgctaggctggtgctgtgtaattagctgtttgcctagcctctcagaggtctttatttttctgtaaggcataggctgttagcagttctactttgtgttaatctgtttgctactctagtcattgatcctgaccttgagaaggcccaaatgggaaggaacatcagaaatgcacctcttctccttgagaagctatttgtgtattcttgttgctcagacttcctgtctaggtgcatgaccctcacattctagaactggaggtgagcccaggggctcacattcctgtgctgcatggccatcttagagctcaggtcccttgctagtttctcagtttagaggttgttatttcctttagtccttgcctgaagttgtcaatgataccatagggtgggagggaataaaaatgcacaataaactagcaaacagcatgaagacaaatcataacagacatttcatttccttctcagataaactgacaggcctcataaaccgggggggggggggggggtaatcgacaagctctatgttgcttgcttttaattactcctgaaacacgcaggatgtgactgggccacactttatgtttccacagagactagaacgttctaagtaaacaagaatttttttagctatgatgcccgactaatctgtctcacttccctgagtccccacatcctacctggaggaaaatgatgacattaggatgaagcaattaaagacagagaccttctgtctagagagacaccgaagaagctggagtttgtaggaagttacagttcaaccacctggaggatgtaagattgtaaaggtacagataataggacgtgaaaatcaatgctgtcttttaaaaaacaatctagggaggaacgagatggcagtgtaaagtgacagaatgtaacaatcaaaaaaattagacacaaggtatttgagaatactttgaggtgggttagatactgagctttttggaaattttaatttatttattttattttatgtgtataaactttttttttcttgaatgtatgtatatgtactgcatatgtgtatgtatatgtactgcatatgtgtatgtatatgtactgcatatgtatctgatgctcagggagctctgaaaaggacatcacactccctggaactgaagttacagagagttgtgagatagcttatgagtagtgggaactgaacacaggtcctcttcaaggacccactgagcattctctttagaccccagagttcatcttaaatccattaaactgtccttacaggtaatgtactagcttataggaaaacaagaatgagatacaatgtcaatgtccccataaaatgagacaaaggataaaaggtcatcttcctataacacaaacaaacaaacaaacaaacaacaaacaacaaatcttaggattggtatgctttagatagtggcaagttaggtggccctttcatgtgagtgatagaccattcacttagtatttgagtttaaatttcaacttgaaaacaaaggagataaactctttgtgttctctttgttcaactaaaggatggttgagttttatgctccccattcaatctttgtttattgtttttaagagaaggtggataattcttatcatcaacagaaactttgaacagtgttgatacaaatgaagaagagcttgtataaaagacttgataaagaggtgctttgagagagaggaacttctttgtttcttttttgctttagctcagttactatctcagactttccatactttatatggtgacgtacagtggcatgaataaatcatatcccaatgagatagattgtaaactcgacgaaatacacacaacacacaagtttgattttactattttctaactgagcatggtgctagacactttgtagattctcaataaagagaacaaatgagaagttgctctcaatgaaggggccagtgaatgaacaaatgaatgaatgaatggacacatttttttttttgatacagaatgatttaaaacaacaacaactcaacaaccaacaatctcttgaggctgaggaaagccatagtcattgcctattgaaagggtttctggtgaggatgggcgatgtcccaaacatgggagagggtgttggaaagagacagatgggtgatggatgtgagtgggcctggtcccagcctcagccttagtctagttttgataactgttcccaggtatttttctcttttatcacacttttaaaagcctatttaaaagcacactggagattccttttgatatagaaagtcaaagtgatcaaagcgtccaggagtagacattgttctttcactctggaaggcaggctcatcattactcttacttcctttgcattggcagttgcttcctctagtgggaagctgggattcactcactgaagataagagagatgccagggattgtcacaacaattgaacacaattggcagtaacttccaacctttggaagttcaagatgctttctcccttcctgtcttccttcctgtcttccttcctgtcttccttcctgtctttcttcctgtcttccttccttccttccttccttccttacttacttgatgctgacagtcacagcgaactgataaaaaaaatcatctagaagtatcagggactgtgtcaggggttctgtgatcagtgagttactttactgtgacaaagaaacggggctgcatctttcatgtggcccgaggaaattgccagaaacaaaatgatcggccacagaggagcagatgactgactctgcttttgaagtcgtcaatgtcatgaaggatgagtactgatgtcatggtagctacaatacaaaaatgattatatcatatgtaattaatgcctttataccacagaccaaattggtatatttttcagaaaatattgattatcagagatcatttcttaagtaaaaaagtatcatacctaaaagagtttnnnnnnnnnnnnnnnnnnnnctccctctccctctccctctccctctccctctccctctctctctctctctctctctctctctctctctctctctctctctctcactttctgtttttattttcattggttattttatttatttacattacaaatgttatcccccttcccagtttcctccccacaaaggccttttctcctcctgcctccacccagcctctatgaaggtgctcccccacctgtccacccacccctgcctcagtgccctagcgttcccctttcctgattaatcaagcctccacaggacctaggggctcccctcccagtgatgcttcttaattgtcccacccttcttcaacccttctcagtgaaggagaagggaataaaggagatttcatcaagggagagaaataagatgaatccaaatgttttccatgttctatggagtgaagtggaggatgtaaaaccgtattcgttctaaaggatccaatgaactgaggcgattaggagacagcccagaaagggaagtagagatagagactacttgtgcagaccacgttatgaagaaggtggtatttttcttagcttagtacaggaaaaatgccatctaaacttggagcaactgtgttgctgacttttcaaggatacctttagttaatcaatggtgagctcaattttgagtttggcaaatagaaagactttctttgtcctctatgacattagtcctgtttgcattaaagtttctttgtatctcatacacagagagcttgaacatgctagctgggtattagaatgggttctagggtttagggaagttgggtatcatcgtgctttagactcacaccctccatttggcttgtgatagggaaaatgacttgaggtgtacatcacagctgaaaactctgttatatagaactccagtgttgggagtatctttagtagccatttagccctcagtaaatcattttggaaaaatataaaatttctttaaaaatactgtttgtaactttgatgacatgctccttctatgatatatataatatatatatatatattatatatataattgaacttctatgaatatttacacacacacacatatatatacatatatatacatacacacacacacacacacacacacacacatatatatatatatatatatatatatatatatatatatatatatatatatgaatgattgggaatgaggggcaggtaacacatatgcttccccatatgaggggcaggtgtagttatgaagaagccattgggttttgggggaatcaggtagagcatatgctgtgattcctctgtgtatgaaagtgtcccagtaggatgagaaaaattaaaatgtctcattaactagaccgattctacatttcatctgcttgtacttctgtcaaaatagtgcacaagcatttcaaaacagctcaattctatgtgggggctccacgcttgtagactctgacagattaatgctactgaatgaaaacatttatagtaatgaaaagagaaaggaagggtaattttaatcctaacatataaaggagtcagtgaggctgaatttattgtatgcccacatgggaacacgtttttgaattgctttcactcttaataaaaattatgacttcagtgtggactacagttgtgacaaattcgtcaggaacagtgtggaaatacttttaaaaaggtttgtttactttattctgtgtgtatgtatgcttgccttcaagatgtatgtgcaccatatgtatgcctggtgcccacagagcccagaaaagggcatcagaccctctggaactggagttagacaaagactatgagcaactgtgtaagtagttgttgggtagcaatccttggtccttggcaagagtaaccagtccctttaaccactaagtagctccccagatttagaatactttttttttataaaatactaaaatttctgtaatatcaataaaccacagtctttaattgtatcctctgtttcagttcttgtgaaactcttttaggtatgatacttttttacttaagaaatgatctctgataatcaatattttctgaaaaatataccaatttggtctgtggtataaaggcattaattacatatgatataatcatttttgtattgtagctaccatgacatcagtactcatccttcatgacattgacgacttcaaaagcagagtcagtcatctgctcctctgtggccgatcattttgtttctggcaatttcctcgggccacatgaaagatgcagccccgtttctttgtcacagtaaagtaactcactgatcacagaacccctgacacagtccctgatacttctagatgattttttttatcagttcgctgtgactgtcagcatcctgtatatggttacataatggcagaaggcaagtataggttgaatagccaacactgttcttgaatctggggttcaaaggcattgagtaaattaaatggggatgtgaaattcttcctgtgtttgctttagctgtctgcttttctagttcttgtcttttccttcagtccagtaaggcaaatgatgtgctgggttgtacctctctttcctagaattgaggaattctatgcctcctatgaacatttgtttgttttaccctaagatttgttggcaaaattgacactgagaatggattggcatatggcatgatatgatatgatgtgtgtgtctctgtgtgtgtgcagtgtttttatatttctgaaaataatttaatgttccttgagataattttaatatgtctatgaataatttgatatttttatatttcttgcaacatgtataaatgttgctagcaatgctggaagttgaaggtctgatttgtaggcaaaggtttgttttgtctgttgtaagtactagttttatttagtttcacatttaactgcatatcagtttctttgaccattaacttttttttccttttttcttagatattttctttatttacatttcaaatgttatcccctttcctagtttcccctccaaaaatcccctatcttctcctccctccctttgcttcccaacctatccactttcacttcctggaccaggcattcccctatactgcccctatactggggcatagaaccttcacaggaccaagggcctctcctcccattgatgaccaactaggccatcctttgctatatatgaagagagggccatgtgtgttttctttgattggtggtttagtcccagggagctctggggttactggttagttcatattgttgttcctcctaggggcctgaaaactccttcagctccttgggtattttctctagctccttcactggggaccttgtgctctgtctaatcgacgactgtgagtatccactactgtattagtcaggcactggcagagcctctcaggagacagctatatcaggctcctgtcagcaagctcttgtttggtatctgcagtagtgtctggttatttataggatagattactatgtggggcagtttctggatggtcattccttcagtctctgctcctaactttgtctctgtaactccttccatgggtattttgttcccccttctaagaaggattgaagtatccacactttggtcttccttcatcttgagtttcatgtgttttactgtatcgctgataagcagtgcatactttaaatataataaactagcccatgtatatatttaaatttactttgtcaacctttgctttttaaaccaaagattttaatccatttatagtagttttccttcccaatatttagatccatatctgtgatcttattttgtgccttcagtgtctaagtttttaagacttcttctttttcagtagtcttcttttctgtattccccttatgctatatgaagttaaatctccatgaatattcctgtcatggtttttctagataccctagtggctaagcttaacagagtctcttgttcatgactatctctattttctcccagggtagcataggaagtttaaaataagatccattcactcccctctgaaatttcatgctgttttcttcattctatttagatttttacctccataaattaggtatcatagtgagcgaaatacaatcaccatgacaactcatccttcacttttgaaaatataatcttggaatttgactctttatgatctataaattatatttatattttcactgtgtgtctctaatgtattcatagatatcttaaaccaagtgtctggtgttgtttattcttcattaatctataattccaggacagtgacatgtcctgagcaggtgcttaataaatacattctgactcattgatttcacatccgattatgctcataagttttcattaaatgagaaaatttagcctccaaatggaaacatttggaggttcttctgctgtggttagcactgatttgtcgtgcctcactggtgtgatactgactcagtggaaactttaattactaagccagtttggcactggaagcagtgggtgaaaagactgataaataaacaatgaggaataaagaaatagtatttttttttgtgcctttgggaatgcagtaagcataatctgcttccaatttttatttgctacttgtccacctaactataccttttagttcttatcatagtcacactttgtagaggaagctctgatacattgtatttctttgccttctgttctatcctataagatcattgtagacctaagattctccacaccctctttctatttatctatcctgttctttctcactatccccgcatctttcaaatgaaaagatgcttcttcttttgttatgcattgaacattcttgctaaattttagtcttgtagtttccctttggtttatctagaaaaaaatgtttcccactcatagaaacttttttcttccctaaccatatctgatagaaaaaatagcttagaaaccaactgaattaacttagaataatgatggagggacccgatattagacttttcttaacttatattgcctgtggtcaaaggttaataggaattacttctacttattttcaagttatttgcttaaaatgttctttagccacatccaagtttattttgatgcaattaaagaaagtaaaagcggaaccattgtattaatagaacagagggattgttatcataaagaacaaacaggtgacaaattggaccaccttttctgctcccttgcagtgaccatttgttaccgtggtcaaattttgaagagaagtgtgctcttctaacctttcagtatctgtttttttagatgtgaggtaaggtgctgagtgagtagagaccttgcctatagatgacattatttacacatattcaaccttcagtcatttataaacttttcattgcaattcttaatgtagttgctggaaccaaaaaagttcactagagtgcttcctagaccccatagagactttaatttgggaaagtgttaaaatgattatgagcagaatgactgcataaacaacaacaacaacaacaacaataacacaagaattcacttgagtagtaatttgtggtgcatgctctgtcaatcgatggacaatgtagctgctccaagtataaaagagatctctggagacctccttctagagctttgaaagacttggagcatagtaggaggatccccagtggagaatgactgcttaggatgtgcaaggccctagattcaatccccagcagcctgtgtttcacacacacacacacacacacacacacacacacacacacacacacacaccacagacttctactaaatattgaaaatatatatactttttctttaaggacattttctaggtaatgggcacatggatatatgttttctcctaatttctagtgttcattggcaatgtattaccccaaagaattttcagatgcagagtagagcttatgtagatgcagggctgatgcagagctatagcaaactggggctcactgagagtttggattggcaaggaggatttgcttgaagctccccacaatttttcttctagactaaaagattactataaggaagagcaaggttcttggaactgtttctacaggctcattccagacttacttgtggcccattgaagacacagtggagagttccaacatttttacttcctggagtgtttaaagtattattatcagttttttttttctgtttatgacttgtccctcagtgttacctttcctcttacaaggatacatttaaaatatgtgtaagtctagtgagaattgcaacagagttcatagaagggagcatttaaaacagatgtcccatgcatgagaagtcgtcgcttagtaatgttggtgaccctttacaagatgtcttctttgagtttgtttgtttgtttggtcttagaaaatgtacatctctgctgtttttactgtttttttccctctaattatatcattagttagctttcttgttgctcatagcattatggtgatgggaacacatggttcgggtttttttttttttttttttttttttttttatacatcatgggcagggaaagagggaaggagagagagagggagagagacagagagagagagagagagagagacagacagacagacagacaacagagacagacagacagacagagacagagagagcatgaacattcagggaaggagaagagaagagagaaataaagaacacagaattacttctgccatctaggtccaacctcctagacattttcaaaaactcccaaattgtatcatctgaaaagcagcagcctcgcagtgtattcaccttttctggaaacattttagacccaaatcactatatttctactagtaagatgacctactaacttgatatacatgatgcatttcaactctttgctccatttttattaaagaagtggtttactttattacagtgatgaggctgaaggagatttttttttgaagtagaaattagatgtagtgtgtgtgtgtgtgtgtgtgtgtgtgtgtgtgtgtgtgtgcacgtgcgtgcacacatatcatgcaatgattcagttatggaggtcagacaacttacagtaattagtcatctccttctactatgtaggtcttgtggatcaaactcagggtgtctctcttagtggcatgtacctttagcccctgaactattcctcaatcactgactgagttggttttgactaataggtttctaggtctgtattactatcttaagggttaaaatttctggccatagggctattacaatctttctataatttcctaggagactgaataaagtacgaccaaggaatatttaataaaatttagagcactttaacattttaaaaatagaaaaaaatttcccttctcacatactcaaagctttaaggcttatttagaactaattgagcatattggaattatgtgttatttataattttattagccgagtctgaaaaccaaagaaagggtaagtgtcaagttcctttccattattagactgtgttatgaatttaaggtcttttgctctattttggagttatcattagaggagattatagggctggctatctacagattcccagctgtgggagagagagccatgcattcatttagagctctaaaaattaaattaagaggagttatctttcgaaacatccaaaaaagtttattgagcttggtgagtttaatttcagtgcatttaatgagagtcaaaggtggattcatttagtgaaggctgttggatgggagcagctatttcatgcagagaaaggaagagtggagaatatcttacaattaacattttgcttctaatatatcagctatacaaaggctattgagagtttgttgaatgttaacacaatgtaaatcattggcagctaacctcaacttccatgtgttgaaaactcagtttaattctgcttttacaaatacagcatcatcttctggaataagaaagttgtattaattcagtggagatatttctaaatatgcagtctcaacgtgaaggggctggggacacacacacacacacatacacacacacacacagacgattatcactcagtcataaaaaagaatgactcttttttttccatttgaattaaatggatggaactggatattatcaccataagcaaaagcaatcaggacatagaaagctgtatgttgcatgcaacttttcttatatctggaaattgaaaaaaaacacataagcaaaaatatgatctgaaagtagagggagtgttgttatggaaggagaagtgcatcaggaggggaggaagagagagaagatagggcaggaagggtgaacaaggagggtagaattaattaaaacactatatatgcacatgcaaaaaagatcatgactcatttgcacacataattaatatgagtaacatcttatggtaataacaaaagagaaccagagaggcaaacaccagggcacagatagcatcagagactccacccccatccccatcagatgctctgtgcagtggatgctctccagatgtctgtgcagcctcccctctaattcttagtagcttcgcctatctcacctatcgctgtctctcactttgctggctgacacttgacctgccattcctagcgttctgctatcctgtccctgagtttctatagggtactctcttggttttcttttgggctcccatgtgatgctctgcttcattaagggagcgtttccacttgtcttgttcagcgtggtgctcttgttgcctggaacagtgctggaagctggcacactcctcattaacagatgttgaacagagcatgtttctatcaattcacttccttctagcactcgcttttgaattaccgtgggtttctaatttgtgtcacctagaagcaggtaccaaacctgcaaaccaagtcccctttttataacagctcatgatgtccactgctgatgctaatgttttctggtgtttcatctactaggacctattagaactggtgcttttgtataaatattctgtaagttactttggcttcttccaaaggaggtgttttctgtgacacctgggttctgttttggtaagaagagatatttctattatgttctaattggattgaggtcctgagtgttttctgaggggcacagacgaaaacggattctgccgattactaacagacattcgtcaatcttaggaagtctaacaacaataacgacgttattttatgggtcaagatatacacacaccctggcttttaaatatcctattccaccatttctcctatgacaaatataatacagttctctgaggggaaccttaaaattctgtaaagatgtctcttatagaaatgtgtgcatgtatgtgtgtgtgtgtatgccctgatttaatgcaagtgcgccacacacacacacacacacacacacacacacacacacacacatacacacacacacacacacacacacacacacacacaattacttttaaatttaataccacagaaagctaaaaatacaggtcatagcatgaaaggaactaaaaaacaaccaccttcccatgcctgtccacctgtaagttgggtggttagagtttcagagaacgtgtctgagacgcaaacatgaactcttttctcatcaagaatgacagagcaaggctaggctttattttaaatctacagtctcaaagatagtaggtgcatgattcacttgtataaatttctttttcctgttcgcttgccccacaatctcctgcatcataagacctattttagtgtgtacagaagtttctatctttgcagttttaactgctagaattagaggacaaattaaaatttagtctttctctccaaagaggacggctacagaacacaaaagcaaataaatcagtccaggcacaaagggacgcttcacgatcctcagagtcttgtttgaaaagtaacaggctatactatttatttattcattcatttatttaactatttatttatttatttaactattcattcattcattcattcattcattcattcattcatgtgtacttgtaatgagtttacttatttgtcaatgaggtttgagtgtgccttcatgtatgtatgacaaagtgaagactttgggtgtcttgatccattgctctctaccttagttttgacagaaggtctctcactgagcctggacagcattgattcggctaggctggaaggccaattgaggtttcagatatgcaatcactttgcctagcttctgcagacatgctggggatccaaatgcaaggagctcgtgcccgtgtaaggggtatttcagcagtggagccatcttcctgttctttgtccatacagttgtatcatgcgttgtataatgctcagtgttattttacatgatgcttcagcttttgattgtagttatgtgtgtgtgtgtatgtgtagtgtatacccaaataaattttgtagcattgataaaaatgaggtttttttcaaaaaatacttttaagttcaccacataggcttcaaacactgactttttattgcatgagccataaaacttctggccttaagtcccaggcagtctttaagttttgttatagtttttggccatactacaatatgtaatgaatacaattctcctccccctttaataaagtctaatgaaaagtgtacaaattgggtaatagatttctggattctccacaaagagtagatgcttaaatgaaattgattaaaggtgtattttatcaaatgtaagtgatgataatagtaagaaaaaacacctcatttcagtaagatatcatgatcacattaggagcaaggggctaatataccattttcccctttaaatgccatttcttcccttttcagagatacaaaattagataaatcaaatctgagattctgtttgatattttattttgtgtagaaatattgtacactcctgaaaattccagcatcccttatcatcagtattgcttccaatttacatatctaaattactgctactcgccttcagcatctgctgctatcttccttgttctagtcttagttccttacttgttataatttttattttgttttctcctcctgtttttagatacagaaatgttgtagtgcttcacacatttccaaagtgttccatgtactcaaaactatcctgtgctatccttgagtcttcagtaggaagcgcacatccagctatgtggacagaagccatgtttcctcataaatgcaggattgatgaaatcattttgcagccaaagagctcaggaacaattcctttcaagcttcaaatcaattttgacagcatgaagaattttatgtagcaaatgaaaaatattcatttgaaattttcaaccactatcagtctttgcctacttccacatacactcacaccaagctccggagcgcctcctgaacaccacaagaggtcctgctgggccaaagcatcatgtggactgtccttaacaggagccggtggctggttgagttcttgagagcatctacccagagaattctgaactcttctagctttgagtgtagacaacatgattcaatataaaaatcagagcacacattcattttccctaaggtattggatttgttgttcaagacacatcatgcctggttgctatatcttgggttgataggatccagaggaacccatgcatgtaattagagatgttttggtacatctgaactaacattgtagtttgaagacgcccatagtagtgtaatctctctctctctctctctctctctctctctctctctctctctctctctctctctctttctctctctctctctctctctccatgtctgtgtctgtgtctgtgtctgtgtgtatactcatgctatgtgtgttttctctctgcaggtgtgacattctcagggagagaagtgttcagagtgagcaaacatgactaatgactgtgagatgtttgtttgcaaacaggcaagagtcagctgtgcagcatccgtagcaaatgtttgcattagggaagtgctgttgagtttggactccaaaggctttccttatagatccaggcctttctttcaacacactttctttagaatttcaacattttatccatgataaattaacatggtaccaacatttttgtgtctgtttatttacttgactacgtgataataaattctgactaaaactaatgcatacgtaggtgacaggcttcatcactcaggcaggacatgccttttcttatagtttttacatttattaatttagtgtgtgtgtgtgtgtgtgtgtgtgtgtgtgtgtgtgtgtgtgtgtgtatacattcacatgcatatgccaatcagcgactacatgggatcaaaggttggacccaggtcatcaggcttggtagcaagtgcctaaactcactgagaattttgttgagcatacttctctccttatttcaagtacttaagtatttatctcctcattctctctgctggaggctgattatgtgaaggcaaaagcattccaagtctccttgttgttcattcattctgtctgacatagtgtctcacaggtattttgaaaatatgtataataaatagatacacattttcactgtttcctcagcatattttaaatagttaaaagttttaagatgtgacatgtagcataattttccattatccaattcttaccttacataatcatgtaaaaacacttgctaaatgagtatttaaactaagccctttaataattatatgtgagtctgagtaacagtgaaataatattagttattatgaacttagaataatttccacagaaagagcagagcaatgggtttagttactgtagttatcccaaaggagttaagaacctcgatgccttgaaggacaaaggacaaaggacaaagttaattcagatctggaaaatgacatttgttttttgttttattttgttttgttttgtttgtttctgattctgttgccatattatatagttttcctttttgtctgtggttgcttgattatatttttaagcatttcaagactcttttccttgcacattgaaatcaaacatgcaactacaataatcactgtagtagttaaactccctctgaggacctgatacatgtgtctattgaagcagaatttttgtttttagagccctgagctcaagattcctggggcttctttgtgagttcccttgtgtaaagctgctcctaaatcacagggtagtcgctcacgcttcccagtgctttccctagaaggctcttaagttatggttggattcggctttaagtgttatccttttgggttacagaattcctgtgaacattttctgtaatttgtatatttagttactcaaacttatgttttcatatcttcactatcagtaattttcacttgactgactgtaagtggactcctggtcttcatgtttgtcttttaccctttgacaaccagacagcccatgcatttgtaagcatctgttatccatgtacaccttgaggctgtgaaaatggccaactggagtgctacttttcagtttttatgattatatactttcataggctgtctcaatttcatttttcatttcatgtgctggttacaaatacagtgtcaacaacactgtattgccaacatcccagtctagaatttagatattcttgacttatatcccatgagcagtagtagctttgtcattaaattaaccctggagagtcaccttaattaattaaaatcatactatgcagagaaaagacttctgtctttcatagaaaatcctgcatttctagggataagtaatagactcattcatttgctagttttccagttcagaaagttgtcccgattgggtcctgcagtgaaatggaggtgcgagaaagacactgagaaagcagaaggcaagcatctgctgtttgtcccctggattgatgagttcagctccagcggaagactgggtactaattaactcattaaacagctcccgctgtgatgcctcaatgtaattttgggttggactgatgtttagagacttaaattctcatcgtagaaacttgcctttgtaaaccactcatggaatgcttagagatatcagaaaaatatcatttgctcatacaatagtaaggaagtgctaccatcctggagtctcttagtatgtagaatagtataagcaccccccctttttttgcttagctgtctaaatgctaatttagttaataaatatgaattaaagtggcatgttttattggtagtacaaacctcagttgactgtgagtttgtatctgtgcccagttctgaagaatttcactgctcagttacaattcacccaggaaacatagccagcatgtattctaatggcaaggctgatgtactaatgcactgttataaaaggaatgaaaactgtcctgaagtgatttattttgtgaattacaatgggttctccagggtacacatcacactctgctttcgaaccatggatacaggagccccagtgtgcagtctactatgcagacttccgcattgtcacagttgagcacctaagtgtcacattaagcacaagtttggttaccatgtatgtggcacattgcttgtgacatttggctgatgttcaattggctatgcatgtgtcacggagcatagctattcagcatgcagctcaatcctggtttggttgcccactatttataccgtcagagagaactcctttcctgagggagatcagtggtcttcatttgatggccaagaggatggtatcaaaaggttcttagtggattctagaagatttcttaaacatgatcatgtgtttaacaccagccttctctgtgtgtggattgtccttatgggtatgtgtgtatatgtgcatgactagaggtcagaggtcagcattggtgtctttctcagtcaattactatccaccttaagttttgagatatggtctctatcagtaaaaatggagctcagccattgggtagactggctgcccagcaagtcccagttttattttcctgtccgtgctccttcggtcctggtattctgggtgaggtctttccttacccgactttcacatgggtgttatgtgtctaacctccggttctcatgtttgtgcggtaaatacttcactgatggctgtgtcaccagctcagctcctaaagtcttgtaagggtgctagagatatagtggactgttaatgtaattgaaacagataatgcatgcacttgatccagagggaaagttttgaaaataatctgagataagtagtagtatcttccatgaaaatctttaagttgtaagcatttagtttcctctaattatatattcatattatttatattacagattatatatatattattctttgaaaatttcataacgtgtacaacttttcttgatcacatccatccatcactctcttcccaccaacttcccccaggacccaccctcatttctttttctcaacttcatgtcttccttttataatttttattacttttaatttttttcacccattgggtccagctaaactgtacgtgaacatgggattatctaccatgttcacataccttccaatggaatacaattctaaagagaagtcagtctccaccctagcagccatcagctgctatcagcttctcaactagggatgggatctcaagaacccctcccaactcaaccctgggatttttaactggcttgttcttgctcaggtctggtgtaggaaaccactgatattttatcattttaatatagattaacctctcagagcctaaacatcataatggagtactactagctaccttcagtacaaatctcgctaaagaaatatggtctattctgtaaactgaattaccctttccacctaagcattttattgagggcttaaaggtgtttctgtactatgccaacacaaacaactgaaaaatgacaaacggatcaggtcaactcatataaaaatatcacagtgttgctcttctgtgtcaaggaaaggtttagtcatagagcgccttcgtcagcctcccagtacagtgcagcctactcaggccatgcttattttccaccttctaagaaaggaccatgtttctgaagtatttttaaatgatcagacattgcaataaatattttattggatattttatttatttacattttaaatgttatctcctttccagatttcctctcgggaaaccccctatcccaccctccctcccactgcttctatgcgactgttaattattcaacaattgataaaaaaggtagagtgtgccacgagaagcctgctactaggatggatttctcaccgttcacttttctgctctcctctgacccactttctgaaattaatactcctcttatttaaggaatattgacacacccttattttactatcatcctaaacatttttatgtagtttttcatcacatagaaagacatgtttttgtgagcctttcttcaggctgtcgggtgccacactattctaaggaacatgcacacacattgagatcagatctcctcagagcctaccaactttgggaaatcaggttctgtttttctatttttgaaattttttttttttttttacatggatggcaggttttcttttttgataaattcttacatttttctttggaaaaattttttttcattcagtcttagacattagtatggaataaagacagaattgtatgcttgtgtgtttgtaaaggaggcaggatttataactctgtcacttaaatgttccactaaacacctgttttcaaatttcatagtcaattctgaagacaatataattacatatagaattgaaaactctccagcaccattcactctgagcccgagtaagaatatgaaaaaagcttttgttgttcactgtctttcttatgtagtcaccatccaaaacattactaaatttcaatagataaatagattcctacttcaaaaatagtaatgtagttaggcaatgttgctgtacttttaataaaaaagtaaaaatacatatttattaagatttccctacgtaagcttttcactaatcttttactaagatttcactaagggaaataatcttgaattcaaatgtctttatgtagcaaaaggtaggcctatcttggttctataaatttaaacataaacacacggggtatattatgatttaaaagctcacagggcattggcgtttgcattgagccaaattacgaacaatatattttctttacccataagtttgtttttttattttgaatttcttctgttttttgctgtgagatgagaataagggttggttccatttcctatggaaaccctgttgtcctggggactgctaggtttgctccatttaactaccttcagatcatctgacacacaagtttggctccattcctgccttctattggattcacttatctgtctaagttatccctggcaatgtcatcctttattgtctaggctttacaaatatttaaatttccctttaaatacttcatggtacttggtttttaagtgtctttgttttctaatttgtcattttaattactttttttgtgttataaaaataaagtcagggaccagcaagatgagtcagtgggtaaaagcccttaccacctgtaaaagtatcttttattcacctgatgtaattgttggcttggaggatcactgtgaataagctcaccctttccagtcctttctaaactctggctggctggttcaactcagctgttctggctcaaactcctctccaaggtaattcaatctgaattctctcagcttcctactgaattgcttcaaattaactctgacaatgtgttctaatcttctggttccttcttactctctggctccaactgcctctgctgaccctcactgaactacatgacctcatgaacaaactccactcccctgcactgcactcactgcactgatccccaactcactgacagaactgactgaattctccctgtactgctcttaaaaagcatttctcctgggtgtatcctatctctgactcatcctgtcaaatctgaaatcattcgtcactttgtctgtccttcaattagataccatggtttgggattaaaggtgcttactgaggctgtgctgcattccagccaggtcacatattcttggaaggtctctggatgtgttcagagcagccaggtggctggattaaaagtcctctacaaccaccacacctcatatcgtaagttgaaccctgggaacccacttggtagaaaggaactgactcctgaaaattgttctctgatctccatctacacagggtgctgaatgtgtatgccctgccccaccctcacaataaataaacaagtaaaacaatcaattaaaaaagaaatcaaactagacctttgttttttctctttgtgtcttacaatgtgactaaatgcatattcactcttaggacttttggtgaatctctgaataatgtgtctttgtacagtcatgctatttacatgtagacactatttcccactttcaattagtatggttgctatagtttccttaaatacttcactataaaatatattgtcatctacaggttttaatagaccacctctaccatcattaagttatttctacccatttctagtcttttctttttttctctttctctttctctctctctctctctctctctctctctctctctctctctcnnnnnnnnnnnnnnnnnnnnnnnnnnnnnnnnnnnnnnnnnnnnnnnnnnnnnnnnnnnnnnnnnnnnnnnnnnnnnnnnnnnnnnnnnnnnnnnnnnnnnnnnnnnnnnnnnnnnnnnnnnnnnnnnnctccctccctccctccctccctccctctctctctctttctttctctctctctttctttctttctttctttctttctttctacattaagactgggtagtatatgtatatcaaggatagattactgtcctaacatgtagcatgggtgagtcttaggttcaagcagagagatggggagcccttttttgaatgttttgtatatattattttatatttatatttataatgtctttaattttctctctaaactaaatgaacattatgttattattttggggtgagggtatttgaaagtggaaacttgacaagactaaataactgtgtgctttcttagagttggatatggattcaactggttcatatctctcatattcttattctcaatggctgcttaaaagacacacatttatgtgcaaggtactagcagatggctattagaagagcttctttttgagtgaatgtatattatatgttcatcaatatataatactgtttatatttgcatcacacatttctagaagcaaatatgtaaaatctctgtcaaaacctgtatttctttataaatgtaagtgcaggaagctaactttaacctgggccccgttcttctttgagtgaatttgtttgttttaaataaaatttatttttctcatcatgtcaaccctcctagtggatcagaagacactgcacagccctcctaaatgctaccatgcaaacccaagctcctggctagaagcagaaaagctgggctctgagtatctgtgaggctatgggcatcagctgacctgtacagaccttacttagcgtctatcagcagaagactggtgacagtcagtcaggtgctgcaaagatcctgagagggttgtcctgtttgagctatgtctgcatgctggctgtgtgtgtgttttgctctaattattattattattattattattattattattattattatcatcatcttggagataaacattgagagggatgtttgagcactgactcgaaacagacaagaaattttattatattattctacaccaaatctttttggaaagcgaacaagtgagtgacatctatgcttccccattgagtaatcatctttctgaaacgtgatgagctaagtgtttctacagctcacagttactgaagtctggtgggcatggtacactaatacatgcttgggttagatttgcatattgttttcatcttcagatacatcatgcaagtttgtttgcctaatgaccaaagcaaccactataaacatgacaaaagctattactttcccttaacaagagacacattccaggccaataaacagtaacagtatgaacagctgccttccacgtgtactcgacactttaaattgccattatttcttatactagtgcaagactaacgtgcctagttataaactcacattttctcactcccttccaactcttctcttcatatcaattcccatgttatttctacatcctctgatagtttggtatgcttgccagtatctctgtcagtgactagagtgtaaattcttggaactttataataagtaacataatacattcttatttattcattgatccttagtcaacatgcataccttcaaatatttgcattatgtaattctattgcttgcatttgtcagagccatctacaaaggaagagttgaattactcatgagggaattgtcattttgattgttgctatgtaatataacgaagcagctcaaaacaagggcagcaggcataaaatgagaccccttgtttacctctgcattaactatggttaggatggcatctgatacaaagaagcgatttcctgtagtgtttgagttaatgaatgattatggcatgaaactgtaaaagaaaaaaaaatgtcttcccataagttaatagacttacagaaaaatgcaaagtctcttctggaagaaaaaagattccttcttcacaagggaggaggagatggggtggatattgtagggataaggaacttgatgggctccaagcactggatgagcagatctgagagatgcttgaataggaagtgcctagggttcagactgtgattcctgtgaacttgcttgtctggttttgataaagctctccctgacttacatagacagagttgctgcccccaaccaaacaactgtgcagcttctaagactaccttgcagccatggaagtatctatgactttcctcagcctttacttctttgtctttgctcacattcaacagagaagcaggattctgttcacttcagtttgtcatttcccaagacccttaacatagctaataggtgacacagtcagatctaaacctcaacctttcaactcatgtctacttttaagacaaacctttcaatgaaacggtgagaactcgcagtgtgttacacaaggaaagactaattgcttcacctggatggaggctttaagctgtgacttgactgttgtgactttgtgtgactcatctgtcatttcatgaaagccacactgaacaactttagaaaatacttaaaaattgcctcactggataccattcttgctcaagtttggtgagagatcctctctccagtaagttcttacagcacaatgtaacaattttgattatgaacaaattatctttttggctattactggatatagtgtcactcattatttaataaaaaacattctccttcctttagcttaattttagatatgagagctataaaagtagacttttgagtagaataaaattaaatgttttaaattgaaaacataaaacgaacatctctaacatccaaatttaaaactttttaagtgccaacatgattttccaagaggaaaatttcacatctaacagcatacaacaggctgcagccaaaacagccatacacagctgaggaaagctgacagaaggagaggttgttctccccagggaagtgcacaccaactggttctctagtaccaaacagtcatccctgagaacatacatacatacatactatggattcaacagggtatattaggcaaatatgtgtatacctatgttcatatatgcatggaacaataattattggaaaaagaggccatgaatttgaaagagagcaaggagggtatggtggaagagtttggaggaaagagagggaaggaagaaatgttgtatttaacttaccatctcaaaagaaaaaaataaaccattccaaacaaaagaaaaaactgcaaatggttttaaaaacaaaaccaatcaaacactccaccatcaccaacataaaaatacaacaacaacaataacaacaacaacgtcaacaacatcaaacaaacaaccccaggccctctaagaatacttgaataaagttattttcaggctgtgtgtaagatgcctatggaatgaatgaattttattttcagacttgggtcttatagaatacatatatacataaaaatttcagatttggaaaagtatgaaatcaaatatttcagatgataggcactccagcttgcttatttttaggggtataactcctcatgtgtcccatctcattctattggcatgtatctactctagaggtatgtttccaatcaaacgattcattagagcatactttcaaatggcaaaggcttaattccttggagggactgacatccgtttgggggcaagttcttcacgtacatttgatctatggagtcaagtcaataaaacacccccttctctgggaaatgcctgagaacgtttgctgaaacattcctctatagaaagtgccaaagaaatctatgaaggctaatattttggtaacatgttctaagcaaatgtctgttttacttaaccaaaatggcaactatgttgaaagcagtatagaaaaagaaatacagcagaatcatggatttcagttgaaagaagtccatattttgtagcaactatgatatcaagcacatgtagccatggacaaaaaaaatcccataatgttaggtttgcacctccacttattaatcctttcctgtttggcccattgcttttgaaccctgacatattgacttgatctgattagatgtcctccacatggcacacatagcatcaaagatggagggtgagagttgagagaggggatgttccactgggcatgtggtggaggtcttgggaggaatgtggagacttgaatgaatttcaattgaaatataagacagagtaatgcaaaaacatcactgtagaaagtacattgttggcctagaggcccaagatccacaaactcagctatcatccattcatctatcagtccatccgtctgtctatctatccatccatctgtccatccatctatccatcatctattcatccatccatccatccatccatccatccacccacccacccacccacccctccatccatccatctatctatctgtccatccatccatccatccatccatccatccatccatccatctactgttgtgggagctaatgtctgaaaatgttatattaagtctaacagatatcacatctcacaggctttcattctggagagggaatctggttttatagacaacaaacagatgcacagtacaatgtcaagtagagatagtgtgtactcccaggaagataaagcaggaggaagcattggcataagtgtgttggacatcagaaagagaaagacagtaactgctgaagcaggggaatactgagaggcagggcatctgagagtcaagtgcacaagatggctagaagatgaactcgattctgtagtttggttttatactccatatggtagaataccctagaaacttctcagcagcctaattatacaaaattgacttggtggaaaagccttgtaccactgttgtattgagaatagacttcttgaagcaaagctgtaagtaaatagccaggtaggaagtctttatagaagtgtaaagagaatagatgggtttgtaaagcatgctctctgggtatggatagaagtgtgaccacattctgattatttcatagaatatcaaatgtaaaaaaagcagcctagtcttcaaatatccaatatcatggaatgtggagggtcaattttggaagagaagaggccagtggtatcaaggaactgcaagaaccacacagagtggcatgaaccatttatattttagccagtctggcttcatggagatcgttgtagcagagctgtgttcatccctcaagcattctgtgtactccagcactttcctagccagcaagtgttggaattgtgttgcaaaaccacctgatcctttcttaggtgatgatgctaaggagcacaaacaaagaatgaaaagcccctggtgagagcaggctggatttctgtgttcctgtttggagcatcatcactgccctgcaagtctgtgtgatcctcccctctgccatagggatatgaaacatgggagtgcttgctcactgataaaccatcacatttgcaggtttctgctttcttgttctagtctcacctatttcttccagttgtcatgtgaccattggcaagaatgtccttaggaagtaattccagtaatacagctgagaaatgtgagtccctaaaatcgctatatagactggaagaagagacagatttctgaagggatgattaacttcttaattttttccagaaagattaagtgggtattatgaaggccactgtataacgtggaacctggtaaatgctggtagtgtatttcttcttcacagcgttaatggcagctgtcagccccagttacccaacttcttcatgtagatgttcagtcttaacctactgtcaggttatgtactacctgacaagagccctgaagatcttttccatcacatgcttattatagctgacactcctgccacagtgatgtgccctgtaggatgagcttggtatgactttcttccatgcatgtcaaaccttggcagtaataatttattgaaaaggtgaacatttggcaccaagagttagacaagaatgaaacctacaagtgtggtaactggtaagaaagaagatatattcaggaatatatctttcagggtttcatgggatatacaggttttcataagatacacagccttcaaaattagaaaggtggagacagatttatctagttaagacctacagtctttgaaactttgaagtattaacctaacaagtatccattggttcaagcaatcataagcaactaagaatcttgctttactcttgttgtccagctcttgatgacttgacagaaggtcaaaatttagggtgggcagaacactcagtttcttaggactaaagtcccagccatttattctacttttccagtttgggggtagtgggattttcttgtcacatgggtatgagttctaatttaatggtgatatagctgtatcctgagaatctctgcccatgcctgacaaatacagaagtggaggctcacagccatccattgcactgagcagagggtccccaaggaaggagctaaagaaagaacccaaggaactgaaggggtttggagttccataggaggaacaacaatatgaaccaaccagtacccccagaactcccagggattaaaccaccaaccaaaggaaggactcaaggcaacaactgcatatgtagtagaggacggccttgtgggacatcaaggggaggagaggcccttggccttgtgaaggctcgatgcctcagtgtaggggaatgccaggacagggaagggggaaagggtgggttagtgagcaggaggggatgggataggggggtttttggagaggaaatgaggaaaggggataaaatttgaaatgtaaataaagaaaatatctaatacaaaagaaaaaataaaacagtccctcgagaatcactctttataagaatcaatcttgttggaaaatgggctaagacattattattcagtcaaggaagggccccatcatgtgtgaagtaatgcacagtacttcaactaccaagggtaagttgatgttaactaatgtgcctggctgtcttagaaaatgcacacatcatggaaaatcttgtcttgcctaaagtaaatttccaccttgtgcagagtatctagaagcacactgaaatgattgtcagaatggattggaaaggcataggtcagcacaaaggaagatattacagactgcaaatgaatgtgcaagaggaggtcagcgatggttcttagctataactgtgctagagtcttgcactgttttgtatcaggactctaacaatggcagcagcctctcacatacccagtataagcacctgcttctcctgcctgttgctttgattgtgaagttgttttccatggaaatctgcaatgtttgtagatttccaatgatcaaaagaggttcccaaaacacagaagtatggaaaaatggtgtctaccatgaggcttcttagtgcttttgatatgctaatattcattgtgatatgctaatgtggattaggactctccaagaaaaagaattaatatgcaatgttaatgaaacttatttgattcagaatccttgttggtttttttgcttttgtttttgttttttaagagaaacatctgttacaatcataagccattattatagtgttccaatagattaaagcttgcagatgttggctgtttcatgaaatcaaatttcttacaccttgatcaactaattttgccttacttaaaaatacttttgctttgccaaatttccttttttcagaatttactctccattttaaactcagaatccacttaattaatctgtatacaggcctagcaaagaaagaacccatggcagtctagcaaagagccttgcgtttgtattttgtactcagtcatatgactataagaagtggactagggaagagtactatattctaggctggaagaagatgccatgatacctttaggaatgacatcaggccaggtggtggtggcacacacctttaatcccagcatttaggaggcagaggcaggcagatttctgagttagacgccagcctggtctacaaagtgagttccaggacagccagggctacacagagaaaccctgtctcagaaaaaaaaacaaaacaaaaaaaaaacaaaaaaaacaaacaaacaaacaaacaaaaacgggttgggggggaatgacatcaggacgtttgagagggagacacagcatcctaaatcatatgaccgtggaggcacttataatgttgatgtccttgcatataaacagggaagtcacaagaattcacatgctacatggcatcctacaaatgggtagattttgtcacagagtgcattccaatgtgtagacaaggagctgaaggccacagaccttgctccttgaatagaaaggactttaggaagtaaaactgaatctggtggaataaatccttaatcccatcattataaggtagatatgaagctgcctccttttcttcccagaagctgccagttgaagtgattagtggtgagggcacctcagaaaggggaggagaggagagcaggatcagaagcagaggaggtagccctgcttgagagaagagggggattggcagggtcagcttaaagttagtaacagtgaggcttgagccagcattttaatgtggatccatttcagtgggaaataaggacagcttatttagttttgacctcattagccctttcagaacactttgccaaatttgttgttatttaatgatcagtttttatattgtgctgggttttttttcatcatatttctgatacattgcttagaacattttaactactctgagggaattcataatcatataaattttataaccaaattgcttcaagtagttgcttaaaggataaaagtatgtgtgtaaaccggcatagccatgcattccccataatgcttagcactgtgtttacacatagcaagcatgcaatgaccatatacttcaatgcattaatcttacctgttggtcaatccaaaaagacctaaatatatttgcaacatctctaaaagtcgatttagaaaaatttggtcatgtacatgtaattaatttagtgcctgtgctcacacaagctagttgtgtatttctcaagataatctaactttgttgtataagttgcttctgttaataatagactttgatgatggctcttgagctttggatattatgaaggatggacgatgcttagcctggttgaagagtttagagaacaagttgactcatgaatcatcttgcttatttcctaatggagtctttgttaggtggcctatgagatcttaatgtgcggtaagataatttgtgcattgtgtccagcaactggagatatagagttatgctttgttatctatacacagataggaaaagctttatacctttcttttgtagtatagcgaggccaatttatttttcattcatttatacttgcagcaaagctgtgacatgattgaagatgaaggtaagggtacagtgtcttgtttccaggagctaagtcagtggggggaagtgacaaggtatcgcacagggaaatacaaggtactgagcatggtagatgaaaatttgtgcccatgtgtagaccatgtttattgcttctttggcataggctacagttatttcttagcctgtgaggacacacagaacatttttaatgggaagaataacataagacttttattttgggtttttcctttggttatatacagtctagactcacaactatctgatgagtgtgaacagctaggaggcccttgtgctgatcatgagaccgtaggatcctagacgctactggaaaggaggccacgagtgtaaagacgggatgctctgtaagaagaatgcaaatgcaaggagaggctttatatggagaaccgacagcaagaggagtggaagtggatctgagggcctggttgtgtccttcatctaggtagttacaaaggttcacatgtggaagctgtgactcgtctgtgttccaccatgtaaaaactctgtaggtgccacgaatgttcggagaatggaattttagaacaacccacctgtctccacagctcccacacggagacctccacttcacccaccccaaatgttatttacccattctgaaaacttgagggttttgtggcttttaatttagaagctaagaggaaaaatgacgacagtttgaaagctctctagacacgggctagtaaccaccccccaccccaacctcagtgctttaacaaaggggctggaagtcactgctcaaacatgtgtttacctgctcctgagttcaatggcctggccttatgcctgacacatggagagactgtctttgcagcccatgtgtagcttcgaagctagttttttgctggaaggtttctaaatacagtgatgatttaataattcagaatataaagtggcagtgggaaactataaatgttaggactgtattattcatgttccctgggcagtttgtactctgagattcactaattagaaatgccattatgccacaagcatatgtatctaattttcttgaatttaattcactgaaaataaaaatcaatcctgattagtgttgatatgtaccctaatgaataagttgccattctcagcgtaagtggggtgaactgtaatttcctttttgtttacaaagctattagctaacttgcttttctgtagtagaaagggctggcttttttttttttttttgaaagtaggaaccataatagacataaaatcttgctgtgtcccagcccagcccagtgaggtcctcatgtcatctcttgacatgtatcatttaaaggatgtacactgtttctggtttgtgtacactctagttcctgagagctcttctttgaaacctgctgttcatgtgagaggactctgagcccctttcaaggatagaagtgccagtgttacctttggttttctgcggagtcgggagagtaattgtgttcagttgcaaccatgaagttgctatgaatgctgggttgaatagctcttgaaactgaagctctggcttgggtcagattcacctccaggatctgttcccggcatttacaataagaatgtaatgaagacgtagggagatagtgtgttagagatgcataaagctcagagcaagcacagcaaaggctgccatcactatgataactctcaggtgtcttgtgctgattctattacgtgtattgtacctgattcttctctaatagtatctatgctttctacctaaaatttaactatacacatggtgcatgcttatcataaaaatcagaacatacaacctaaagttcccaagatcttaaaacttaacattctttaaaagaaaaaccaccatcagtcctattgccttgataacagctgcccagatgttcacaactgtccagatgtccacagatggcccataatttaccaaccaacttgtagttactattctaagtacagctctaaaccactcacccccatgcctcagcaatgtctatgaaaagtgcagatgaaaagggtatttgaccaatatataccaattaagaaagttgagggtgtgatataaaaagctgtgaagcagatgctgtgaggagagctcagggtgaggagaggtatatgaaaaagagatgaaggggcaagagtctgacactaagaaacagctagaggtttttaaagataatgtacattttttatatttatttatttttgtgtgcatctgtgtgtaagagtatttgtgcaggcacatgtgtgtatgtgtgcaggtgaggatacatctgtgtccataattgtggaatccagaagacagccaccagcatagttctcaggaactccatgtacctctttggagatagggaatctcactgggctagagcttacctattagaatggactggcaagtgagcttcacatatcctcctgtatatactcctatatgtgcctatatactcccttgacccagtgatggggttataatctcatggcaccatacccagaatttttctgttaacttttgggaatatgtgctttatccaggtcactcagaggaattcaggtctatgtgcttacaaagcaaacactttgttgattaaaaaaaagaaaaaaaaacccacactagtctaataacctgcagtttttaattcccagttcttttggctgcctgacaattgatacatctagggattatttgcatatgtaaccccttagaagtgatctgaactgatgaaaccaatatattattcagctagctttttaaatcaacattataaaatctataactgtataagcaaatgtggtatactatttcttttaaagtctacacatattgtggtggattagagagaataaagaaaatgggtttacttggcataaaagaaaaagaaaacacaggagagaaaagcaattttggtacttaattttactttctttgattttttttttttagaattcttgtttctaattaaaatctttttttctacttctttctaactcactcttccttctatctctgatataacattagtaaagggtaagtgcaggtttacgactttcttcttaactttagaggcatcttagtgatatagagaccaatgccggttactaggacaattttggtgaagttggttgttataataaagacaagatcagctctaggctagtgaaatctctccaaccttatgctaaaatttgatatggaatagaatgacctctcttctatcccagtttctcttacaagtggaccttgcattcaaatagtttttcatcagcttatattaccttattgaattcctttctcaaaattccagtatctctgaaggttttaaatacttttcgataggcggcacacaacacaaagtatttaatgagagtcacttctaagacacaagaggtacagtgcagattctggctagcatggagcatagactaaatgaagactagagaaagacaatgtctggctcacatgtgaaggtctggagaggtcctatgttaatggttcattgaaaagatgatccaaggaaaacagggacctttagaggtgaggtgggaggagagccattctggcaccagagacttctgaagaagaaccttcgtgttgtatcaaagtgcagccactacagttgctctaatggaccacacaaaacccacacacatcactgatgagtctcattctttaacctctgaaatatcatcaataaaggtgggcttcggggaatttaataggaagcaaataatggttaaaccatgatccccagaattggctttccatgtcagtattttaggtaactccgtctaaggtcagaggtcacatctaagactcataaatggaaggtaattagaaaaaaatcagggttgatgtttgttgcgaataagcacaaaggtgtccataaagaaaagattgttattaagaatttagtgagtgctgcttgacctaagaacaaacaaaatggaatgaatgcagaatgtattttgttccgaaccttccctgacatcatgactttatctgctgccattagcaactcactagtggaggcctctgcagttaattgctcgaatatagatttttctttcctctacaaattattcagttctgaaaaataaactactgatcatatgctttgaatggttataagtttatttgtatacttattattatattattatatttaaaatgtaatctttcaaatttcacattttcaaaaatgtggtttgggataattaagattagtatttaactacaggaagttgtgcatactctttgaagctgataatctcttttttggcatatttcaaatacatgggtttttgagaatatgacataactataacattttctccttcccccttctctcttcaagccctcccatagagcctccccactccacttcaaattcatggcctgttttttttcattaattgttattgcatgcacatatgtatatgtatgcccaatggaaatgatgcatctataaaacattcctgcatctactgcttagggaacaatgtggaagggggcatggaaagatagcaagagctggagaataagggattttgccgtgatattgtgtgtcatagtgaggtcagaagctacatccatagtctcaccagcaggactgcccaaatgtcaacagaacaaagttgataccattgaacattccaaactagacagggaacggcccatggggatctaatcaatcacaaagaactaaagacaatccatcagatttgggagtgaagaggtcttcttccccggggaaaggtaccccaattggttgttcagtgccaaatgttttagccctaagaacataatgtctctttaaactttagtcccagtgtactggctagtatacaatatgtactccattaaaatacagtaaatctaacagctcttacgtgatactgatatttagcattacttatactggcatcattcaattttttcaaaatatttgcatgaatcctttgagaatttcatacatgttatttagatcatatcccctcccaatttcttcattaactcctctgagatctacccaatctgaatctattttttttgcaaaacattaagcactcacttaggactttataagaagaatgggtactttcagtgtttaaagcataaaaccatatttaatgttgaaaagctttgtttacaaaatcactctggcacaatgacatgtaggataagaggcactctaccttcctgtctcaggttctcgccaactgagagctactctgctttattgtggtttaaattattatagttgcatatctaatcagacttagtggcttttaaaaaagaactacaatttattatgtcacgaatctgtgacttatggaggtcctggggacatgaattatttctatttcatttagtattgactggaatgatttgattgggcctgagagagccaccctttaagtggctcacctgaatagctgctatgctgatgcagttacactgtgtgctgtacacacaatcacacttcagtggcctcatctttcataacttgaatacgctgaaaacggatgattagatgtaatcttaaatgttatcataaatgcatgctcatatggatatttaaaattatttggtctaaggtcaaaactgttggctagggttctttattcctctctatgaaaatgtatctaggagactttagcttcctcatgaaatggcaactaaaattttcagagatgtttaaataacgaaaagctagaattaactaatttttcaaggcttgggcctagatattattgtgaagccacagtcaacccatacaattggggtatgacaagatttaaggagaaagggactctgcctctggatgacagggtatccaagtatttatcactatctttaatcatttataattttctctaccgcaatctttttataacggctaaagcaaaaagtaagactttatgtaagacatttattaacacataggccaagattattaaaaccaaagattccaaaattagcagttgtgttttgtctaaaagaccacaaaaattatattaaaaacatacttctgaaattgtcacatatcatgttgtcattattactatggtattgactatctctgctcagagagagaaaaacagtgtgaggtatctccacacagctggagaaggagccatctccatgctgagcatttttggttgctaagtagcaatggggttttccaattcatttattatgtcaatgtgactcggccaaatagaacttttctttttggcaaactgtctcttgtttgtttggttttttatttgtagaatagaatttactagaaaaatattaaacagctgctatatttggggaactgtatgttctttgaggggaaatatagaaatgagggtaaaggaaaagggctatgctcattttgtagactttgcctccccagtgtggaagatgaataattaataaataaacacataaatataaattagaggagagataatgatgcttcagtcagggatcttgagaatactggtgcaagagaatgttcagccagtgtgatcaggggaaaacccctgagaggaatggagttttaagcagaggagaagaggatactggtgaagcaaagggaaaatagatgcttagcggggtagaaaagatgaagcacatggtcatttgtggcaaggagcacatagttgggtattgcttattatttgctcagtctccacatatattttgtggggaattaagttatttacatttcacataattattaagtaatatcttgcttctgtcattttgtggctggttcttcgtttttctaatatctttctccttgtatggtcttctttatcacgcttgagtgattttttttcccctaagaggaggttttgattcctcacttattattattagtctgttattgggttttgctttggctacagtgggacttaaaaaaacaagaacctatttgattaaaaagtaaggctttttgaaatgagagtggtataaacactgatcataaaatgcgccaagaaacaagaggataaagaagagggagaggagagacaaaaaaaaccactgtttatatttacccgtttctcatagtgagttttgatgtcctgttgtaaatctttctatattacctacttcaaatagtaatgtagttattaattttgattgctctgctttttgtgtgcatgctagatgtaactggtttatgtactgtgtttatgtgttaggaagtttttagtttgtgtagctccttttactaatgagttttaaatgtccagtattttcttgctggttagcagcttttctatttgaagaatttagttttcttttccttttttctttggacatgtcaggtagtgattttttttcagcttctgtttgtctgaggatatctttatatctgaaccccagccttactaggtatagtatcctttattgatagcttattttctcctagcacaatggtttgtaaccttctaaatgctgtgaccctgtaatacactttctcatgttgtggtaatccccaaccatacaattattttgttgcaacttcataactgtaattttgttgctgttatgaattgtaatgtaaatatctgagatccaggatatatgatatgcgacccctgtggaggttgctacccacaggttgagaaacattgtctggcatgtgtgacaatctcatcatactacttgtttctagcctatggtgtttctactgaaagtagataattgcaacatgtatgtgcacgtatatatgtgtatatgtttgtgcatatgtgtgcatatatgtctatgtacattatgtgtgtgtgtgtgtgtgtgtgtgtgttgctctcttgcattctcaagaaatttctctttgcattgaaactctgagagttgatttggggatagatttcattgaatcgaatcaagcatggtgaccctggaacccaagtatggtgacattgaccttcatgtaccagtatttttctttcttttcattttgggactgggcagttttctgttactgtcattttgagtgtgcttttctctctttaacaatcaacagactctcttgaataacacaccataagtggctgctcttctaatgctgtctcaaagccactatgaactttttctgattttcattcttttttctttcttctcctttgatagtctgttgtgagtttgctaactgtttattctattatccatttcgtattctgtgtaccttatgttaatgtataagttactacagtcctcttagtcttctttgataaaatattgagttgtttctctatgtttccttgaagtttgcgcaatctccttaaaggctttaaaaaaaaatcccatggctgtgtataaaaactgattactacatagtcagttattggcacttgattttgtcctttatcgttagttgaagatatggctttgtttttgtctgtctcagaagtttagcatcttctttgtggctgcagttatttcagcagtggatgagaacttaggttcaggttagccacaagtctacactggagtactcctgtctctcacgggttggggtgaacccagatacctcatccaaagttatcgttgtgtagtcagaagccacgggattattctgtctctctctggactccatgctgaggggactgttcataagctcccatgagccatccatgctacaatactattgtatccaaactccaaattcatctggggctcatctcaatgcaacctagagtcacagtccatgcaactgctgcctgtggatggtgtattctcgccttgtaaccccttaagctacacagaggtaatgtccagaatacagatatgttttactggggcctcaggtctttgtctggcagcaggacaagtccagaagtggcattagctttggtgtagaaatttaagctctgatggttaactacacataaaggatacgtaattccatgactactgacaagttttaaaacctgggaattattatagaacataattagtgcacagtctcattactgtgtagttattcattatttctttgaaaaaaattcactttgcttgtttcttttctgaaaacatatatttgcatattataaatgattattgtctattaatttgttcatcttgttgctgtttctgtgcttaagtacaacagtgatggacaggggatatcatatctatgattacctttgtttgggatggggtgttgcttttaaataggattattctaacttttaaagacccaatttagaaatatttctacccatttttaattaaaaaccacatatttaaaaaaatcatccttctctgttattcaaatccctaataacaacaaaaaaaataaaaactatgcaaaacaacaacttatgttgtggaattacatgttacactcagaggagaacatctgatttcagagaaacaatgaccatctaccccaaaatatagacaggatcccaagttactttgctagttggattttacattatttatttctgacagaatttggctgtgaaacttcaaaggcacatagctcatgttttcactcaagaagtgatcttttttttttttccttcaagtgcttggaagatgatagaaataatctctgctgctcacacctgttggtgagaagcttctagaattcctgcacttgctacatggtgtttattgaaaaccagagtacagtgccacctgttttcaacagtgtttcctgctcataagaaagtgatggggaagaggtgatgcaggataaagctgtggatgcatgttcagttggggtttgaacccagtgtcttttacaaagtttccccacagtaggtccttgttagcagactgactgggtccagagagaggagagccagtatagtctaggttcatacctaggcagcactcatttccattcataggtccttgtagacaaatcacaaccattgcaaaatgatgggctcaaaacatgtctacgtctttctgtacagacacgagtgtaatgactccatcactctgacagttttatttcagcttttagtttcatccctgcttatctacacaaagttccaaaagtggaactttagtttgtccccatccgtgtatttctgctgttctgtcaaaaaatatttacaaccaaagaagtactccaaaagctgagggagtcagctggaagagaagtgtgcacttctaagtgagacttgattaggcttcccttgggagggtgtagctgggggaacaaaaggccagaaatgctgcaggctggtgggatggcatagtggttaaggcgcttgccacataagcctggtgacctgagttctatcccagagccaatggaaaggtgagaggagagacctaacgccacaaagttgtctctgacctttatacacatggttgtgagtacgtgtacatgcacgctcacacgggcacacacactcaaatacacacacacacacacacacacacacacacacacacatgctaaggcacacatgctaaggcacacacagtaataataataagccaagagaacggggctagagattttaacaaatttataaccttgtgccacttgattctttatgaaatattcatgtcactttcatggatctccatgttgtttggcatggtgaagcccactgagtgcatgactcttgttttgtggtaatctttctagagagcataccaggtaccaagcagtgtagtcaggacttccttcataaatgttaacctctcgaagttaaccaagatatttctgtaacatgatttactgatttagtcaatgtaagtttttttttcacttgagatatctattttatttctattgtttcttttatttcagctcttctttatgcaactatttttggaaatgttaccacaattttccagcaaatgtatgccaacaccaaccgttaccatgagatgctgaataatgttcgagatttcctgaaattatatcaggtcccaaaaggccttagtgaacgagtgatggattatattgtctcaacatggtcaatgtcaaaaggcatcgacacagagaaggtattgtagtttttattatttttattgctattattattattagttatgtttaaacaggatatttagatgtatgtacatttcccattcacaattgccctgtgcaattgctttagaaatgttactatattttttgcaagtgacatttcaatcaatcacatttattgagtgctcagaaggtgcggagtatccaaccattaacaatcaattagtaccagtcatgatattcaatcgagaaaatttagtttctgaatacagctcattgttccattcccctgtgatactctgattaacacttagtaattttctgctaaactctctgagcaagcactctcctaaaagaactgttgtcagttttccctttgacttgctgtccagttaaaaatatcaggggctggggacatggctcagcagttgagagagctttctgctcttgctaccatctggaattatgtttctagtatctatgtctggcagcttacagctgcctgtaactcttgcttcaagagatcacaaccctcttctggcctctgtgggtatctgcatatatatgtgtgtgtgtgtgacttgtgacacacacacacacacacacacattcacacactcatacacacacattttaacaagattgccttatttagtatcaatgggaggggaagcccttggtcctgtggaagcttgatgccccagtgtaagggaggggtgaggcaggagtgggtagatgagggagtaccctcttagaggcaaagtggattgggggataggatgcagggttcccagaggggagaccaggaaaggggacaacatttgaaatgtaaataaataaaataaccattttttcctgtttatgtagccagtctgttagtctatgtctttttattggggaattgagtccattgatattaaagagatattaaggaaaagtaattgttacttcctgttttttattagatattttctttatttacatttcaagtgctatcctgaaagtcccctatatcctctccccaccctgctctgcaacccacccactcctgcttcctggccctggcattctcctgtactggggcatatgatcttcgcaagaccaagggcctctcttcctattgatggcctaataggccatcctctgatatatattcaactagagacacaagctctgtgggctactggttagttcatattgttgttccccctatagggttgcagaccccttcagctccttaggtactttctctagctccttcatttgggctgaagagatggctcagctgttaaagactaggctcataaccaaaaagcattatttttaaaatggaaaaaaaaacccagaatgaaacttccctgttataagtgaaatttttgtattatcttctatcatattttcttctttatttctatcacatgcataagcaatttttaatcttcccttggtttttcattcaagtagtagagacatacctcttccagttattctcatgtctcatttcttggttttgaatgggagctgcttcctccccgcccccatctatcttatccttggacaaagaagaacccaaagttccccattaagagcaaattaaagtctcctcactgtctacatacaaaatatatttttatatacctataaaaatatgggtatatttttctataccatttgattaacataaaatgaaagggatagcaactagagctggcacacaggaagtaagagccaatcctgagttattccacgtgataagcatcagtgaagactggcttttgtagagcacctacttctgacacctgacagtcaaattgcaagagactttccttgccatttttaggtggtatgtgttttttgtcatgtgtgtgcatatgtgtgtgtgtgtgtgtgtgtgtgtgtgtgtgtgagagagagagagagagagagagagagagagagagagagagagagagagagtcacctagttaaatgaccacagaagaaaaatcaattaaagtatatttcttcgcaacttgattaatattcattgatatgtggctagtgggaaaacatgcacagaacctttgccacagagacaaaaaggcaaaatcacaaacactgttaaggatgttgaagaaaggaagcatttatatactgttgcaatgggaattagtgcaatggctattgagcacaggatattgcttcaaaaaactaaaaccaaatctgccacaggacctatctgtcccacttctgggtaactatgaagttaaaggagaccatcatacaaaggagatgtctgcacccccgtgcttactgttgcaccattctcaatagtcaagataagtaaacatttaaagataaacaaggaaatcctgttatgtgaaacaaaatgggtggggccagagaacattatgttaaatgaaattagacttagaagaacctagaatgagaagacctcatgtcatctcctattcagagaactcaaaaagacaatttacatgtagaatggtagttatcagggaaggggaatggagaggagcagaggggtaagtcagaaggaggttgggtgaaggttccaaatcacacttcgagttgctcttgaaaacctaggaaagcagatttgagttgatgtgacaaatataaaagctttgctgtgtgtgcatgtgtgaaacatgtcatgagtaatgatcccgttcaacctactagggaactccccactcagatcagatgcatgttagctccggtgataatgtacataatgagaacaagacacaagccaattctgggcatgaagaggctatgtgaggattcctagtaattacatctgcagtgagaccatgtttaaaagcgcttcatgccatatgctcccaaacaagaagaaaacaaaaatctatatccacttctgtgacataagtcaagaatctaataatagaacagaagactcacaggcctgctggtcatcttgttagctagtaaatagtaaacataacacataacattaaagttcaggtaaaataaaacacacaccatttaacataaagatgttggcaaaaagcaactagaaaaatggctcagagtttaagggcagttacagctcttgcagagaactccattttagttcccagctctataatagtgagtcacaactctctgtaactatagctgtagggcagtggttctcaaccttcctaatggtgcaagcctttaatacagttcctcatgttttggtggccccaaaccataaaatagtttaattgatacttcatagctggaattttgctattgttataaattgtaatataaatatctgtgttttccgatgttcttaggtgactcttgtgagaagggtgtttgatctttgctctcaaaagagtcaggacccaaaggttgagaaccatgactctagagggatacattctttttgtctctatggagtcccccactaacacacacacacacacacacaagagagagagggagagagagagagagagagagagagagagagagagagagagagagagagagagagagacagagagacagagagacagagagacagagagacagagagacagagagacagagagaaacagagacacacatacattaacaaaaataagttattgaaacattttgagtagaaattaagcatcacagcaaaagtgcaaaatcagtttttataatttgtaaaatatttttataaatcagtaagtttaaaatacattggcaactaagtgagccaaaggcatgattaaggttatttaaacactgaaaaatgtaatgttggttgcattatgctgacttagtaaaatagtgcttgcagattctcctccaataactgcgacttcactagcactaagaattagctaggttttcagtaccagacatggttttacccttgttgagtgtgtcttgagtccaattagagagctgttggctaggtatccatgccactaatgtacacttagggttactgttccaggatgattgttaatgtggttcacaggcattgtaactggtagtaccttcctcctttcgaagctctcatagcaccttctgataccatgaaagctagtcttcagagagggagcatttgggttaccaacatgactgctcaaatgggagctagacaatgaggacaccgatgataatgttaaactggacagagtttaagccataacactacaaccttactttcccagagacgagcacaccaattggctgtctggtgccaaacaatcagccctgaaaacacaaaagatcatactgactgaacaggttatatttgggatatatgcatacttattatatatgtgcctataataacaattagtgaaaaaagaggtcatgaattggaaagagaaaaggaagggtgtggggttgaggaaaaggaagggagaaatattgttactaaagtataatttcaaaaaatataatatgaataaagggtgtatcactagtttacattaaacaaagctcaccttcctctctaacagtaaaaatcaagtcattaagaagccatttttaggcagatacaaaaatgccccatttttgcaaagaatgtattgcctggccctggctctactgtgtaattctgtatactgtgtgaatgggttgagtattttctaaagcaatttgaatgagctaatatgtattggggctggcactagagctcagccctgtggctttctagttttttgtcttttgttattgcagtgataccagcccttgttgtgactttaaaggcatattctaataacactccctccagtgtcccagttcaccacagacccgatctcaaatgaaaactctgctctgctctgcaggcccaaggaatctgtccaagaattagactgctcccagttatcttttaaagatatgttctactgatattccccaatccatttaatggaagctgcaccttccagttccttaggacaaccctccttagccctatctaccttcacttcccttcgcttccattgtggtccctagatccaagccatcatcttgccctgctctgtgcttctgtgtaggatgttctcagcgtagcaacaaagaacctatgtggcttttctgtttgttgatctaatcttgtcaatatatttaggacattatatgtgaatcttgctacaagtacttacagtggaatttattaaaattatcaaaatataattgtggagtgataaaatgaaaggtggaaaacagtaattatatcagtcctgtactcagggtgcatccatagaaaagagtatcagaatttttaacaattactctctttgattcactgtttggttcctatattctttaatatgtgaagtatgttgtcttaacatatgttaacataattttttattgcatagctcacttacattttctttaaaatatttttattaatagatattattatgaaacttatacaagcacacaccaaaacaaggaaaataaatgaagctcaatatcttttgaaatgtctctttctctgttggttctaaaatagttattttttttcagctctgtgtacaatggaatttaatgatgcattgcagctaattaaagaaaaatctttgcttcaattattgtgatttcctcctagcttctccacatacttagtttgtagatttttgaatttaacattaacacatgagcaaattaatcccagtgatttaagtcagccttaaccagcttctgtttagtccaattactatattcatgtggggattagaacattttttaccaggaaaatttgttgtaggtgattttttttccactgggcagtgtctagactaattttatctactggccaacagtttattgactatcaatcattacaggtacttagtatctttttaatttaataacaaaaatccatcccctgctctttgccactggctgacattttgtacttaaaagagaaagggttggaatggggggatttaaaacaaaagaagattatggggaacaatagaagggatgatgactaaagctcataaaatttatcctgacatttgaaatacttttcaggaaaacaattcaaatgaaatcagtgggctagcactatattttcaatttgcaggacgacttataaaaatgtacaacttatataatgttttatagatcaggtaactctcattaccctagggtgtccatgacctctttaacaggttagatactaaacccttatgatttttatttacaacttttactacctttctagccctaacactaattttaataaccagtatgaattctcagatcacacattgtatattatgtagtcattacatctctctctacgtatatatgtagactagacaaaagctacaaaggattaaagagaccacagcatccatggaattcaacaaggccttaatggccccctagacagaggctgatacaaataaaaaaggggaattcaaggtcacagggttgatcttggcatcagcatagactgtagcttcagacataatatgcagaaccagatctagctggcctaatgaatgtatttatggatggcaatttctgtaggctgtggcacaggtctcctggaacattcaggagccctcttactgtcagttgtgtgatgttttcttggcatggacaggtgacaggctcataggagctgttgtgacttcagtgttaggtgtcatttctattgtgtccagatgggagtactgtatgtgtcctcagtctggtgtattatttttctgccttttttattgccttatctctgttccatagtgacaatgggacatgctccttacacctggaggaaaatactgtactacaccatccttcataaagagctctgactagtgcgctctgctgaatttatcatataaatatatcacagggatataagaaaggcaacctggctcaggctgaagattcagtagtatttttatctttggtttaaaagaggtaacaattgccacaatagagttcatattaattagatcaataattgtgatcaccttccaactagatatttcaaagaaataacatcaaagggcaaaaacttactcaaagatgaacaaggtgatatacaattctgaccatattaacatatgacagacaaataaaggaaatgtaaatattctatctagttaagaagagagttgaagagaggggtggaaggtagcttcaaaaaactaaatctatttgaagaacagatctctctgcttcagaaaaaaaaacatatttctcaaataaaggatttagatagacacagcagaacgcagacccagtgcactctcaggtcctgcacactactcttgctgcctctccactatccggttcttgttatctctactgaatgaatttaggtggagcactcaggcctagagtagaaaaaaaaaaagactgtattttataggatgacatgaagcactcccaaagttgagagacggctcattgtataggaaagtataattacgggttgagactggacaacagtgaaggaatcactgtgccgacctagaggtttaagtagacgtggtgctattttcttaaggaccaaatagcatcctgagaggtggttttctgtgcaaggtgattgacaggactatttgggttaacttttaaggaagaagcaatgttgtgtctttttttttttctttctttctttctttgttagaacgcctccagctagatagtaatcttatcattgtcctagaagttcagaaagtcatgtttctatgcagggattcagatacaattcttttgatcagtttctgcttttacaagctgataaagaggtgggaggaagagagagggaggaagggagggaggcagtgatagagaaggaagggagaggaattggggggaagggaaatagagagagatgataggtagataggtaggtggatagatagatagatagatagatagatagatagatagatagatagagagagagagagagagagagagatgattttagatgttgataacatgccagagagagagagagagagagagagagagagagaagggaagggggtccttaattcccttagaacctgctcctatgtgaacactttcctaatactgactatgagagcacatcagtacatcataatatctgtgccacttggggttctactatttgtcacacctggttcaaggacagtcattttaaaagttctgcatgaaatttacagaaaaaaaaacaatcctatgataatttaacacttgttttcagcacttgttttctttttccattggtctgtgtgtgtatgtgtgtgtgtgtgtgtgtgtgtgtggttgtgtacatggatacatgtggaggcctaagctttatgttaagtactaaccttaagtgttcttccaccttccttattgaggaggcagcacctctcagtcacttccagagctctctagtgtggatgctgattcctccttctctcatcagaattatagaccaacttccctacacatccaatatttttgtgggttctggggatctggctcaggtcctaacatttgctagctaagcactttaactactgagccatctctccaactctgttctcaggattcttttattaacgtacttgaacggataggttcacaaggatagtaactagcttactgaagatgataaaagaagtactcacttaaaaataccatggatttatagattctttaatggagtcaaggtagggcagccatggaatgtttctcctataggcctatgttaactgcttattggacaagagactatatgcctattccactgcttaaaattaattaattgattaattaattattaagcaactacacgtttcaccctaacttttaaatttagaaaaatcttttaagttttcaatctaaccatggtaaaggaatgccacaatcatcacctttgcacgtgtttctcaattgtgacctcctaaagagcgaaaaagggagaatgtgggcttgggatggccttttctcccttttagctagccttcattcctagctaagaaagtaaatttcatgtgcagcttctcccatggagcagaagttgaataagatagcactccagggcacattagaggtgaatataaacacaatacattatattcacatattaaagtgtcataaagaaaatcatcattttttatagttattacacattaataaaaattctagaaaaataaggaggcagaatggtcttagtaaacacacaataaaattattataggcaaataggaatgttaataatttccgtaataataatttagaatactcaagtgtgaattttaatttctcatggcttttgagaattcttcaatacatcctttgtattactgttggctaatatcattacttttaagctttgtgcatgtcctctaatagacaatgttcttttgctatgcttattttaaggaagaagcatattataggttagttaagtccaaatgacttaaacatttctctggaaataatactaaacagaatctttatatttttgctttattctgttcatactttagtgtaacagtgcaggctagtttatacttcattttctcaccacttggccattagcttctgaggaaggtcacaaggaatcatatgatagctataatagagaaagaaacagatggagtagtccacatgacgccatgatgacttagtaacttggcttgatctagactacaaacatagggtcccatccttctgggtccgcatctctgggtgtgaagaaatagagccacatttctgacctaggtggctggagcataaaaggggtcacatcatgccttcagggggtaggcagtaataaaaggggtgaaccatttcattcacaatgataatcatactcgtcttttcttatctagtcataggctacaaagtttgccatatggctagcatcatatttttggtcttgaaatttagtgagcatgccattgtacttaaatatacagatggaacatgacctgcatcatattttagataagcaaatgtttttatatatgtatacattgagaacaaatatgtgaacatattctagactgtggagaaaagttaatgagtccaatttgtgtgcagaccatgtcatactgtgagttggtgtctctatccagcctgttattttattctgagctgctgatgggtctgttttcagactcgaccccaaacagagcaaattcccagcaatagcacctgcttttgagtgaaatcattaggttccttagaactggacacattttttttaattaaaggtagaattatgcaatcagattttatgactgctttacttaaaatgtgtgttctttccctggagtttctcttactaatattgccatggttttactgtgctgttatttttaaagaaattatttattttattttatgtatatgtgtgtgtgcacctctgtgtgtgtatgtgatccatgtgcaggcaatgctaacaaaggtcagaagagcacatcagatccactggaactggagttacagatggctgagagccaccttaaggatgataggatctgaacctaggacttcaattcaagtgctcttagccactgagccatatctccagcctgattatgttgttgtttattattttccttcagtggtcgtgtgacttccttttctctacccacctcctatctctttcttgagttttatgataatgaataaaggatgcttgttttgggttctggctgatttaaagaatgattttattcattctttaaaaacaacatttagttcctttacttgtcatgccaagtaaccatgggcatctctgcctgacacaacaggaagtagagagaagatggataaagatgtaggggctggataccttaaatagagaaaatagtctcaatacaaaatagttttccttttagctgtgtgttaccctccaatgctctggagcccctcctgatgtgacctcctgatgtgatttttcgcatcaaggagaggaccatatggcttataaacttgatggttttctctcaactttgcctttcataaatctggaattttctcaagtccttcagttaatttcccattttctcacattagcaacctccctcatattttgggcatcctcaaggatgcgttcagttctctagtttcttccagagcatttcagttgataggagacatcaattgaagagtacctgtgtagcagcagattgtatgaatagcaaggtacccttcaatgttcatttctgcataaaaaatattgtcaggctttgtaaaaatagttgtagagggataaatacaaataacacaattatcgctcttatgttacttggaattaatgaaaggagaaaagacaaaaactatggagaaaaacatgcgattgtcaattgtgttgatgcttggactataatgcgggtgctacgctagagtctgatgagcaagattaatctaattcagtttggaaggctgtgtggtggaattagaaaaaaagcataatagaatttggacaacagagattgttagaaatagaaactttgctacctttcataaccaaactcaaattacctatgtgttgatagacaactggtctaaagatgggaaacagtgaaaaggataaagagtcgggatcttaggacactgttaattactgaaaaatcattagttaccctttactatctagatctattcagctaactcttcatgttaaaaattttacacttaatccaataactattccgaatggtacaacaactttttggtacctgaatctgcctaaattccttagcatataattgcttagaatatattaaaatcatgtggatcttctgactttgaggtcattaatcagggactcctgtcatatgctttaatgagagaacagacaatacacagcatcaaggatatatttgtaaccagaggacactgttatcacatctcaatgtgtgagtttgttggaagagtggcacagtccctttataaaaagttgacatgtgctattcctgaaatgtgacttttcaggcaaaaaagaaaaaataatcttgtgattatataaccattttatttctaaaaatgttaatttaatggaaacagatgacttttatgtaaaattggaaataagaacccgaaaaaggagaaagtacattaaatccctcataatctcattccttataaaactacattctggcacatttactttctatggcttcatgagcatctgtgtgttgtaaatatgtatagcctgaaggtcttgcatttgaaatggaaagttgaaattttaaagtctttggattttggatatgttttagattgggaatatatatgtatgtatatatatgtatatgtacgtataatggtatctataaaattcatttttatttcatgtacttcttaagcatataaactaaaggtaatcttatataatgttgttactactttactgcaaccaatctcatgagttcaaatgtagaactattcatttggcatattatatttcaaattaccttttgattcttgtaacagtttgaatatattttgtttgtagaatttaagatgttcaacccctgttgtggaaacctctgtgttcttttctgtgtgagtgtgtgtgtgtacgcatatcaatatatttttatttccctgtgtttatatatttaagatttctgatttttacattaatataaacagtaaaaatggaggtttctggatcatagactttgaacagttcataggttatgctatttttatggttattttttctaaaatatcaaatcgaaactctataaacaatataaatttgtgtacgttcttcttaagaacatcactctcaacacttggtattgaaattgtgaaattaataaaccaattagcagcacattcaattttctctttctttcaacacataatacaattgctgccaacaattacaattacaacagtgtctgtcttgttgaaccaatgattttatttgggtgacttacagaagcgtgggttaggggttacacatttgtcttattaagggttattattgctgtgagaaaacaccgttactaaaaagcaagttagggaggaaagagtttatctggtttacacttccacaatactcttcagcattgaaggaagtcaggtgaggaactcaaatggggcttgaacctggaggcaggagctcatgcagaggccatggaggatgctgcttactggcttgcttcccatggcttggctcaaactttctcttatagaaattagggccatcagctcaggatggcaccacacacaatgggctgtgcctgtacccatccatcactaagaaaacgacttacagctggatcttatggaggcattttttaaaatctgaggttccttcctttcagaactctagcttgtatcaagttgatgtaagattagctagcgcaaatggagcatataggtgactttatcagcagaaagcccctcttgcaggcagctctatgagagatacactgcttttataaccttggatagttgcctggtagatcttgtaactttctaattgtcctcagtcttctgagactctcctacctccagagggtaatgtttcagttcaagggaaacagctacatttacttctccacaccaagcatctggctgtggtagaccagcatgtcttgtcataccttaactgttcctgttttcacatggtctaactcttctgagtaagctttctgccttagcactcaccactatcctgtggctacttaaatatttggatagtattgtttgacatatctcagagctaagctctaccacagaggccatttgaagccatttctagctgctgaggtgaagtattgcttgggagatgtagttggtgatcttgcacacatcccttctaatacaggccagaggttacatcaagaaaccaatgtgaagatctaaggcttcgactttgggagtaaaaccagacactgtagatgggatacaatgtgtaagagactctatcagcattgaagaatctcaggttctagtatgctagtcttccactataattttcagatgatcagtcaaacttaagagtgggattgcatattctttattgatcttttccatggcttgtaagattaaactataaatacacttgttgaaaacatcttatgagaaataaatatagttttctcttagtacccaggaaaatatcagaaagcttggtttaaatgaatggtttagtattctaacacttgtagtaaactctaccttgacaacaaatgaagaattaatgggaaacctcctggagaaaatgagtcactgttgaaacagaaacagagcagtccagccaatggcctccatccagctgccttcgttacaatccctttatctgaagacagtttacaatgatagtgcctatagagattttgtctatctaatctagtcattatttcacttcagagctccctgtaaagtctaaagtcaatggccgtataattttagtatatttgtaataacatgtaattcaataaatcatagggtgcagcatgattagaagtttttcatgtattcagccattctcaacacagttgaaggtccctcttccatatgataaagtgtgctttgtactgtgaatggcagcatatcattatcacgggagctgtttaggaaatgataactggtccacgactggataactttgtaacatacttatacatgactgaagaaaaaagtagaaaattctcttcaaagctgaaagaaaattctctttttttaatgctgaaagatgagacctgacaggaagtttaggtaattcacaaattcttcgaagcattgttatttactttggagatacatttccctattctggaacttaataataagtgttcattaagcatcagtctgtattcggcacattactaagtctttgggatggtaatggtgactatgagacagctcctgccatgaagccgccactctacagtgggaatgactaaatgaagccccatctttggacctctatactggctagttttgtgtcaacttgacacagctggagttatcacagagaaaggagcttcagttgaggaaatgcctccatgagattcaactgtaaggcattttctcaattagtgatcaagggggaaaggccccttgtgggtgggaccatctctgggctggcagtcttgattctataagagagcaggctgagcaagcgaggggaggcaagccagtaaagaacatccctccatggcctctgcatcagctcctgctttctgacctgcttgagttccagtcctgacttcctttggtgatgaacagcaacatggaagagtaagccaaataaaccctttcctccccaacttgcttcttggtcatgatgtttgtgcaggaatagaaaccctggctaagacagacctcccagaactggttttaatgttatgccaacagtactgacctagagtggggcagtacctggaagaatgtagctcaagagtctactgtgctttgtaggactcctaactgtggaagcaggtgtatttttgactcttttgcctgcttttgggactcttctcttctcattagtctgccttgtccaacctcgctgtgaaggcttttgccttgacttattatattttcttttgtcatgcttggttgctgtcttttggaggcatgctcttctctgaaggagggagaacagatctaggaaagatgggagatggaggtgggtgggaggagcagagggagagaaacctgtagtgtgatgcattgtatgagagaaaaatctatttgtaattaaaagaggaacgaacatgttttatttcaaatgtatatgtacgtacatatacaattaatgagaaaaagaggccatgaatttgaagacgagtgggaaggagtgtttgggaagacttggagggagaaatggagtatgccactttattataatctcaaaaataaagtaaaataaaataaaataaaataataaaataaaataaatacaaagttaaaaagagcaagagagcccagcaaaaaataaattacccaagatgccagagctaagtggccaaaacaatttgattctggtttctagaatttcaagtctacagttcatgcttcaggccttatatcacctgcccactcacgtacttcatacctagtagatcccagataatacattaggcacaggagatgaagctgtgaggcagatggcaatctttgcagttatgaatcttgtaagtgcgtatgtgttggggggtagatttaaagagataatagccttaataatattttccagttccccaagaaagtctcggatgatttctgcattgttatcatttgtggtagcagggcttttctgctaacttcgttttctcccttaacagatcgaggaatgatctttcctcactctgataatgagggaaatagactcttcagaacgcactgtgctttgggatacatgaaaacaatattaatccttatgaatgtattgtagttacatgatctctgattactactttgcaagtgttctgaagtcaagtaatagctatgggtgtaataatttttatttctaattttattaatgcataaaagatacgaattttattgaactgaattggtctaattacaactgggaacaatgaagcctggaattttagtaagcttatctggctaatttgaaatgaatattagattaatatcagcatttttcctaatattgagaaaatgttcatacactcgtactagtattatgcttataaaaagctgcttgtatttgtataattagtagagaacatttacaaatatatgcaaatattattttcttgaattccctcaagaaattaagttcttttcaaaaaccataatttaatgaaccaatcgctgagcatcatgaaaacagtcaaagccaacaagcatatggtattccaaggaagcaaccaacgacagtattgataatggtatcacaagcaaacctgttattcattcaaaccatagaacaaaacacacagaaaaagttttgggtttgacatcaacatttggtagaattttaaaactcacattcttgatgttacatttatttgtagctgatttgaagaagtgattgtaataacctctcactaaaaacctttgtttggctttatggggtttattacaaatatttaaatgtagcagagataaaaaaatgagcaaataaacaaaaacctctggtagtctaaatatggcctcctgccaatgtataataactcagaattacagactagccagggggagaagggtcaagccctgagctactctgcatttagacaacaagcagataagaaagagcccaagaggatgataagagacatctaggaataaggtaaaattcgcaattatttgactgagtggaagccaaggcagaaagtgagcaactcttctgaagttttgtaatagataaataaaatataatgaaaagtatcctactaggactttgcctccaggttacaagtgagcttgatgaaggagattgattagggtgctagagacggatgccaccctggagtgaggtaaggagcactgatacataactaagatggtgtagtttcatcagaaagatgatcacatcaacttgtgagagtggtccaaggtgatccgaaaaataacttcaagcacatgtgatggatagatagatctgcaggagagaaaagagcagtcaaaaatgcttatgggatggatggttacacatgtgggaagaaatacagttaggtatttcttttgaccatgataagttggtacatttatcctatacggaaacataaagtagaatttgaggcccacattgacatgatttctttgtactgggatttctcagatcctgatggttttgtgtctgtcagatgaatttaaaagtcttcttccctgcatttgctatcaagctttgtagttgttctccgtggaaagattagtctgctgtaaggtagcttgtctagttggatgtctcctatcttctgatgatgagaggaagtcttcaggctgtgacttacagttagaacaggaaggtctcgtgaggaagggggtgaatgcatgaaatagtcctgttgtcaaatgtgaaggtgtagaagtatgagtgtttattttagaatagttctaaccagcagcagaagtggattgacgtcatctatccaagaaggtagagattatataaatataggagtttttataaataatacaatgagtggaaactaatccaaatgcatacagtgctagcacaaatcaacacaattcaaaatatgaagagaggaggggtagtacatagtgggacagagctgttagatctttaaaaagtaatgaatttctgctaataggtactgtgcctgagtgtgactattgaacatttacaaatatttaattccacagtgactccactattcacccatctgtgaatgttctaataaagtgatccgtgacagtttgtatctgatttcaaggaaatgtagtcttttctcatttagacaatctgaagcagaaaagcaattgacaaagggaaagctaagtgcagaaagttgatgcattcattataaagctgaggaagataccatagagattgaggagcagaaagaacatgaacggagagagtagttggagtgaggcatgctggccatgctgtggtgaacagttaagcatgctgtcaggtgggtcaggagccacagggggagttgaggtctttcagaatgcttttccaaaggactgggtgtcatttgtgagccaggctgagcagtctttcaaatgacaacaaggttctgtagttacaagtcactacaagtagatgcaaagtaaaatttcttcactgtacctagaagtagttacagaaagaaccggattagaaagtcactcaggtcatgggtctacttattggcctttgtaaattagagctaagtggaactatgttgtaatgcttacaataattaaattgttggtgtcattttcctgttttctttttaaaggtttattttattgttaagtgtgtttgtgtgtgtgggggggggctgtgtgtgagcgtatgaacatgcatatatgtgcatgtgtatgcatgcacatgtatatgtgtatgtgtatatgtgtgtgtgtatgtgggtttgtgtgtgagcttatgaacatgcatatgtgtgcatgcacatgtatatgtgtgtgtgtatgtgtgcatgtgtgtgtgtatgtgggtttgtgtgtgagtgtatgaacatgcatatgtgtgcatgtgtgtgcatgcacatgtatatgtgtgtgtatgtgtgcatgtgtgtgtgtgtatgtgggtttgtgtgtgagtgtatgaacatgcatatgtgtgcatgtgtgtgcatgcacatgtatatgtgtgtgtatgtgttcatgtgtgtgtgtatgtgggtttgtgtgtgagtgtatgaacatgcatatgtgtgcatgtgtgtgcatgcacatgtatatgtgtgtgtgtgtgtgtgtgtgtgtgtgtgtgcatgtgtgtgtgtgtgtacaggtgcaggtgtatacagatccttgtaaagaggcttctgatccctccaagaactgaaattaacaggtgattttgagcctcctgatgtggggggtaggaactatgtcctctggaagggtaagaaggctctaaaatgctgggtcacctcttcagcgacctgtttcctgtttatttcaatgtctgagccaattccatgtaaaagaataacattgaaaaatagctgagcataagttcacctttgggagtgagaagtttggtctgctcctccacaaacaccaaaccttgtgctcgtagtgtaggtaagagactgctagttctctagtcattctcatcaaggccctcaagcccttgaactcagtcagaggaggagctatcttctcttcttgattcaccttccttggtatgttagtcagcttgctgttgctgaccaattaaggaaaacaaaatgcccgaggggaagcttccaaagtgggcagatttatctcaggccacagtttcagaagctgagctctcacagtggagtgctttcaatgacatccgtctttaacgaagttagatctcacagtaatgtgtcgggggctccacgtgtgaaaaacgcctgttgatcttggcttaccagagactctagttatctgaaaagttaccaattactttctgcaaaggcccggatatgagaattctatcttttctttctttctgtttgagatacatgcaaccatcagatataaatggaggggttctctaagctcaggttctctacatggtaccctcctgcacacctaggaagtcaaaattaatacgtgttcctaaggctattcagatctgtcagctttataatgactcctctctctttctcttcctctagtctctctttagctctgtcattcaagaatgctatctatccggaatcatataagcttattctgaaatgcctatattaagttgcaagacctagaagagctaagaggttgagtttactatgtggatcataacccactcttctcctcacttctactcaagctgttgcgtagggcaatgctttgctccttcatatttctgagtgcaaccccatgatacagattcatcacagttcagctattcactaactgaaagaaattgtgttgtttcctgtttggaactattacactagagtgtctataatcatacatttgttgttatgttgcatgaaataattatttctttccattgggataatgctcaacactgtaattactgggtcacatggtcagctcacattatttttgtaagaagctgatgtgctccttttcaaagtgactgtggcattctgcatatccactggcagtatatgggacacacttccctggataatctcttagataatcagtatttcctgtgtaggtgagcagtagaatagtgtgtttactctgtgttttcctaatttctaataatattgagcaaattttctcatttgtgtatttatttgttcttcccagtgaaatatctgttcatgtgttttgaccaccttataacagaaatgttaataaatttttgacagtccttatgcatcttagataccagtcccttggtggatatgcagtttgtaagtatttttccagtctgtagtttgtcttttcaatatttttacaacatcttttctcagcacaaaagatttttcattttgtgaaggaacagttaaaaaaaaaaaaagaactctgtttggctttagattctgaacatattctgctatgctcctcaaccccatgtttttgtagcccagttttaaattttattaagtccttttttactttgagttagcatttgtgagatgtgaggttcaatatgggatttcagctttttgaagggaggttcaataatgtccagttgccctgtttccacttgttgaaataggatggtctgtcatccactgagctgcacttgaacctttgtaaagaaatgaactgaacataccttgctctgtgttttacatactctttcattaacctgtgattttctgctaagcctatactttagcactgtggtgtgtgtcaccatgccacacttgctttgtcccccacccctaatgaccttatctctcctaggtcttgcaacttaacatttgaattttagaataagctcgctatgtttgcaaacagatgtcatgggattgtggtgagattgttgtcaatttagattggcgtagagagaatttgtgtatttaccatgctgcagctcctaggttcttgatgtggtatgtcttcattgttttagatgttccttgatttcctgtcgttagcacgtcaccattttaatattatggatccatgtttagctagatttgtatctaagattttcatttccttcagagccagtgggaatggaagtataatttttcattattgaagttaattttggcgtagctttttgaatgctcctttggtaccaggctgtcatctattgtttttctttatatgtcaacatgtcacctgcagtggtgtgtctattcatctcctgtgtttgatcagccatggcagaaatgagattatgttcacaggatttgggactttagtcaaattctttgaggctttgagaggcatctgagagcctctgtcacatgtaaatcttacacgttggtgacagcttctcctcacggagcattcttacttgtttcagtactcatggctattttcttggagatgaaattgtgacaagtttgatttctaaggaaaaaaatgctattattgacatgtctagtttctcagctggaaagtcactgacaacaaattccagcataaataatgtatgaactcaattcaaacccgccccccccccaaaaaaaaaactatctttataatgtcacaatgctgcttccaaaggatgattgcttaggatttaggatattgaagactaaaaattagttcaaaagaatttcttaaacttaaaaaagtgactattctactaaataggattctgtatgtaagaaaagtttggttccaaaaaatattatatcatctggtcaccataatgtcacttgtagtactaagtcaataactcagtagctatcagagttgagtgcttgttttcacatcttatcaataacattgataaaatcctaattaaaacaagtagccctacattggtaatagaaatttccatttacaaattacttaaaaaagaaaaaaaaaacggtttccactacacacagtgaggaaggactttatgattgcaaagttatttgaacaactataaaatgattgcattttccctttaatttgatctgtatggccatctccgtgatcctaagagatttctgacttaaacccccccccccacaagccttcagtgatatctattatttccctgaaagctagatttgtgctgcaaaaaggaaggcttcctttgtaaatttgacagcttaataaatttgtactggttttctggtaatggagataggcaatctgcatcagaaattatctgaaactatgtttgatacacactctcatatattttccactatgtgtaatgtacacagtatagtaatggacactctctgtgcacatgcacgtatagctatggggtggaattagatagtaatgggcactttctgtgcataagcacataatgctatggagtaaaatcagatactcaagcacctcaaagtttacaaatgacacgacttacatttgaacaaattgagttaatggttgtatttttttgtattggagaatgtgagtagtgatatttcatatagtattttgccagagaaatgtctacacacaggtgcacacacatacatttaaatgacacataggcagacaaatgcattctatttatttatttatttatttactattgaaattttaaatttacatttcaaatgttttcccctttccaggtcttcccttcagagaacccctattccaacccccttcctcctacctctatgagggtgcttccctacccactctcctcctcccaccccagcatttccttacactggggtattatatatcctcaggcccaagggcttctcctcccactgatgtccaacacagccattctctgccacatatgtggccggcgccatgggttactccatgtgtattctttggttggtggtccagtccccaggaatttggaggggtctgccctgttgatactgttgctcccttcatggggctacaaacccacttggctccttcattcccttctctaactcctctatctaggaccccggatctcagtccaatggttggctgcgagtttcctcctctctctttgtcaggctctggcagagcctctcaaaattgcttcaagtttctctccatttagtttaatgttggctactggtttgctgcatattccttttattatgtttagttatgggccttgaattcctgatctttccaagacttttaacatgaaggggtgttaaattttgtcaaatgctttttcagcatctaatgaaatgatcatgtgtcctggatttcctgaatgctttgggtttggagctttttgaatttcacattttctttgactgttgtgtcaatgttttctatggtatcttttgcacctgagattctctcttctatctcttgcattctgttggtgttgcttgcatctatgactcttgatctctttcttaggttttctatcttcagggtcgtctgcctttgtgatttctttattgtttctatttccatttttagatcctggatggttttgttcaattcctttgcctgtttggttgtgttttcctgtaattctttaagggatttttatgtttcctctttatgggattctacctgtttgcctatgttctcttgtatttctttaaagtagttatttatgtacttcttaaagtcctctaccatcatcataagatgtgattttaaatcagagtcttgcttttctcgtgtgttggggtatccagggctcgctgtggtgggagaactcagttctgatgatgccaagtagccttggtttctattgcttatgttcttgcccttgccttttgccatctggttatctctggtgttagttggttttgctgtctctgactgtggcttgttcctcctgaaatcctctgtgttagtactcctcctgggagaccagttctttataggaggaatttgggtgtgaggagccttggtacagggttagctctggggtgcatacagaaaccagaaggatcctgtccccagctcctccttaatttctgtgtcctgatggctgtgggaggttccctctggggccaggaatctgatgagaagtggtggtcttacctgtgcttacaggcttgtctgcactcctgggagaccagctctctctgggcagtatttttgtatgtaattctgtggcacagaatcagcttctggtgcagacagaaactggaaggctcctgtcccaggctgctccttggttcctgggctctgggagggttcatctgagcagcagtggtggtgctcatagacttggctgcactcctgggtggctagctctctcctggagcgatttgggtatggagccctgtggtagaggatcagctccggtctgacagaaactggaaggtcacattctatttatttatttatttaaataccatgtaagtgttatgagggtcaagatttttttttcaatgcctggcacttttgactcgtttgtattgacatctaaattttcttcagtgccttattcttttctttaaaaagactatcttaaaaattgaggaataggtcacttattatgaaatgcacagttcaatggtttttaagtatattcacaggattctacaactgttaccagcatctgatttcagaacatttttatcatttccaaaagaagtcctatccttttttgggaatatctatccatcactcttttgggacagatagcaacaactttttgtctctatgaatttatatatcctggacctaccatctaagtagaacactataatttatggtcctctgtgacttgcttcttttacttaccaggttttcatagtttgttcacgttgtggcatgttttagtacttaatttgcttataactgaataatatactgtacacatttaccgctttttttaaatcacttaatcagttgatatgtatttggtttgttttctgtagtcactattgtgacagtgaacttcatatagttgaacccacacagtattttctagcattaaattatgtgactttgataaaggctgtcagattatatagctgactgacattggagctggttctaattttagactattgctcgctgacgatctcttatctgacatggttggggatggatgtatttcagaattttagaactggtttagttttgctatgttgcatagatttttaccacttgagtttccatcatttgaaaaatgaaattccagaccatgaaatgtttaacattatgtcgggattcaaataattttagatcttgcagtattttagagtatatttttttaattgggggatgttagacactttgtatgaccaaaggcagcatggaatccttgtgtatgtctttcttaaagcccattgtacacattcatgtaccttaagcagtggtgactccaaaaagttatagccagtaggaagattattatttgtattcttctggaaaattaatcaaatacattaaaatttttcttcctaattttgtaatatttttttcacataaggagaaaggtatgttttacttagtgaaaatttagcatataaaaatgacaggtgagagtgaggtcgggacaatgatacctatagcaattgggtttgttcgtgaatatcgaggtcgtagaacagttctgtgtgttctggggatccaacacaggcctgcaggcatgtcctcaggcttggcaatcaatgcttttacctatccctccatttcccagtcccaacacagatcatgtttcatttgagtcctgtttcttacaaagttactacttctcagcatttgaagctttggccagttaagtagtaaggacagcaattgctccttttttttttttctctgctacatagggcactctgaaagcaaggtcctagtagagacctcataggacgatctctctctatgtttacaataagcgccttgcttcagaattagagtctcttctcaggaaattaatctctgaagtgaaaccaatgggttttaacttatgattcttcactggttattacactcttaagtcgataaaaatgaccttttacatttaaattaagggaagttaatttgccttagtgtcatttcattactttgttaccagcttaattccttggaggtctgacaccctggagactggcagatgaacattagctacagcttctgctcttctgcatgctattttctctctccctcgctccttctctctgtctctctccctctcctctccttccccttcactccacccagtgaactttccctcaaatgaatgagctgcatagttgtgaaacacaccagttattattattattttttgccagtcttaaggctccttacttctaggaaggagcataaagacgtgttatgtgtaaatgtcacttgtctgtctccctccactgatttctccaacttaatatcaattctctgggactcctgaggagagattaattagcagtgcatgactgagttgtatgaaagcaaggaaggattttgaagagtggtagtgatagtcgaagccttttggaatactattaatgtatttgcatagtttgcatatcctgggggcaggaaataaggtcatttgcacaatcccctattattaaaagccctaaagttatatattactcctgatgcaggattttataatcaagcggattttatatctcacagcagagtcctcgggacaaggccccgtcctattcactaccttgtggcccctgcttctacctacaccttaaggacttgtttagggatgtgggtggtggtcagcctgtgagcagtgggctagagatacaggcagaactgcactaagcctaaagctctctctgcttctgctccctacagtgtgcaattctgtcttttcttccgcatgaaattgccttttctttttcacattcatctgagagactcaagcttttggtagagtgttaggagcacacatgattctctcacacacagcgggcttgagtaactccttacacttttgctgagaagcaatttggaaagggtcttaaaagtgtttttatattttacataatggtttttaaagctcatattttgatgatttgatataggcagggtatttgtggctgctgatttatgagagagaaaactggaaatcctgccatctaattacaacataaggcttaagtgcactgtaactatgagggaacaggctgcagtgactgaaaatatgtttttaggtaagccactcgccctcacaaaggcactgtgcttatcttgcatatatttttgcccctctttctttttctcattgttaaaagtttctgttacctgtgtttatgattgtgtgtgcacatacatgtatacacccttgcatgcctggacaagacaactgctgtctcatctctctagcccccatatttcttaacgccatagaccaaatctatcactttcattcttaatgaacctcatctttgcttttaaaattaagtattgcgcgagttaagtattgattatgtgattttgaagaatgatagtagaaaataaactttggagattcaagttttatggacatgacaatataaataagcataaatcgtgtaaaagttcaatatctttaatggctttagttattcatgctatgtacagtaaatgttagagaaagtatggctttaaggctttgcaactgtgagtaagagaggggataaagcaggctctcatggcagtcatttcctcagtggatctgggtgtaacatcatggctcctgtatcaactgtttagatctcctttcttaaagtttcccagttactaataccataatggatgaacgaagtagagaaagggccccaaagggacatgctcactacatatctagctcagggccttttcatctataggtgacggctttcacttctgatgagaaatgacttctgcttaataagtcacggtagcataaggaacttatcaacaagttcttgtgcctttactgacgaagtatgtggaacatgtgtgagctacttgcaagtacttagatacataaacaaatttctagcaaaatcttggctgctcagtgttacagatgggaaactagtgcttttctcttacagtatggacttgattaactgaatcataagttatcttaggactcagtattgtgtctgtgtagtacacgaagcaccagagagtagcagaaagcacaggcttcctagtttattcctggttcatctttagttggaagcatgacttcaaagccaaactagagagttttttgctacttgtttgctgagaatgacctctgcaaaccacacagcctttaggaaaaacatttgtcttatctgtgaatggggcattggaccagaaacagtgatttttcaactgtgcccaattgtaagctccagggaacaaacattgtgatagtttttcttctagacatcgaggacctgtgtaactctggcaatttagccagggctcaaaatccatggttaaatcatgactcaatgtgtgttatgtagaatttcagtccttagagcttctcatagccaaagctagttttgtttatttatttattttatatactaagcataatgtaagggttcattatgaaaacactaaagcactatttcaaagctgaaaaataaaggtttgaaagctcagtcaataagtcctttctttcctcctcctcctcctcctctttcttcttctcctcctcctcctnnnnnnnnnnnnnnnnnnnnnnnnnnnnnnnnnnnnnnnnnnnnnnnnnnnnnnnnnnnnnnnnnnnnnnnnnnnnnnnnnnnnnnnnnnnnnnnnnnnnnnnnnnnnnnnnnnnnnnnnnnnnnnnnnnnnnnnnnnnnnnnnnnnnnnnnnnnnnnnnnnnnnnnnnnnnnnnnnnnnnnnnnnnnnnnnnnnnnnnnnnnnnnnnnnctttatattatatgtgtttgtcagatgaatgtgagacaactaggcaaagaaagcaatgacagacctgccaatcaagagaagagcaggtgtgaagcatctctgggtgcacagtgacttcagaatgatgagaaattgtacggctgaaatgtgcctgtggggaaagagtgaatggtcccaccaaagcccagcaagcctgggaagagctttgcctttacttggtagggaaacaagcaatatatgattgtaagaaagcagaaatatcacagttgcatttattttcctaagagtactgtaagtcacagtgttgagattagaccctcaggtcctgggagaggcctgctgctgcactacttgaccttgagtttaatggagatcataaataaaacaaaagtattttagagttcagagtatggcatccacctgtttttcagagttggttggtagtgttatgaaaaacgatttcttaaatagttcatcattcttccaagggaaaatttattgcttctcttaattaagaatctaatttattaatatgctaacatgatgaaggaggacacaatgcacactggagatgaacagaagttactcctatccctaatcttctccactgcagtattaatttcatttgctggtgattgtgagataccacaaaggtatctctaggaaattagaaaatccaccaaggaaaaaaaatggatgtgaccgtaatggcaaatgacacctcaattagaaccactgtactgcatatgagagttatcatgaatggtgttttcatcctgccacttaaaactacatttttttgcctattcaagttatattatcataatttccagaataaataatgatatatatctataattctggtagcacacatcatgtcagaataattgcttgtctaaggatggagcaggagcttgcctctgcttggtctattttaacactcagttttacttgctgctctatgggcaactgtgagtctatgccatcagtcgatgtaatttaggttttgaaattatcatgtaattacatcatttgccccttcatctcttcaaatcctcccatgtaattccttactctcttccaaatttgtggcatcattttctataattgttgatatgtatacatatacatacacatatacatatacatatatatatacatatatatacatatatatatatatatatatacacacacacacacaatattcctaaataaatacaatccatccagtctgtataatgttacttgtatgcacatgttttcagaatcaaccctaacttttttgctaagattgcaatagagaaacattcctcaagtgttgactacatgctggtgtgctgtgacacggactgcattgtggtatgaactgatgctgtaatgtccatacttagttggtgcatctcaccagacttcagtttccttgagggcaggcctgtatctgtctaactttgccttccaggcatctagcaacttgtctaccgtacatagcatagaacaaatcaatcagcatttgtggcatctttttcttctgaaattgaccctttatctttcccatttgcttactcatttctcactctcttttaggtcctctccatctgtcccaaggacatgagagctgacatctgtgttcatctgaaccggaaggtttttaatgaacatcctgcattccgattggccagcgatggatgtctgcgtgccttggcagtggagttccaaaccattcactgtgctcctggggacctgatttaccatgctggagagagtgtggatgccctctgctttgtggtgtccgggtccttggaagttatccaggatgaggaggtggtggccattttaggtactgtgtaccttcctgactcaatgacaaatggggcactgtcctggagttttagcttcccaagtttctaaacagaaatcccctctgtttggtggctttagaaactcggtcactaatgagatgatgaatttcagtgaaaactggtcactgttttggcaaagaacattagtctcagtcacagctaacagggaacattgggcggagtgacattcacttatacaaaaagtgaccgcagcctaagtggctttgcatactctcattggtaagtggaaccattgttggatgagttatagagggagttgatttcagagacaacagatgtattcagttcagcctgtttctttactcaaaagccaggcaaggctggaaaaaagtatggagacttgcccagctagttagtaaccagtgagggctgagttacttcagcctgctccctacagttctgcctcattatggtggatggatgaagtataaagaagatggtattgaggatgctaataagactcacaggagtgagcacaatggggggagattaaatttaggcttatggaggcggttccatccatctgtcttcacaagccaggaaaattagttggccaacactttattctaaagttcagacactcagagggtaaggttaccaatagcacaacacaaaggggtcgatgctccatgaacttgacaaaacaaaacaaaaacctacagcttaatgtacgtggcaacagtgtaagtgaaatatgcatattttcgcaagcaaaatcgctgaaggaacgtggagatcactttctgctccaatgcccgcagcaggttctacacagataaaacagaaagaaaggagaggccaggtgacatcactcctgagtttttctcaagtaaaataccttagggtcgcacaatgtcaactccactttgatcacattttccatgccttgtgtctcattgaaaaatgagttcgatctttaagctattggattttctctttctactgaggtcatcccaccatagcttgactgtactgattctcctaagaaaaagactgattggtggattttagaaactgcagaagcaaaaatggaaactgatatgaaatagaatgcaaagagtgaaagaaagaaagaaagaaagaaagaaagaaagaagaaagaaagaaagaaagaaagannnnnnnnnnnnnnnnnnnncagcacaaatctagctttcagggaaataatagatatcactgaaggcttgtgggggggggggtttaagtcagaaatctcttaggatcacggagatggccatacagatcaaattaaagggaaaatgcaatcattttatagttgttcaaataactttgcaatcatagggagggaggggggaaaccttatttcaaaaagtacagttattggaaaagacagaatttagaatggagaggaaatgaccttttatgagaaagcagttgctataaaaacagtagaaaatggatcaaggcagcaaaaaataaaatagcattctttgcaaagctttaactatttggaaattactttattgctactgttaggtctcttgcagaaattatttttctttaaatatttttgcaaggaaacaatagagtgcttggaataagcatctggggtgcttgctgctgccttccttcctttgcttttgtctgttggagtataacggaggcataatctttcatgaaagctgtatgtcactggaacagccctttgtggtaaaatgaatcatagttgtgctatgtccactcttacttgctaaaagaataagataaaacacccccccccccaatcagatgtatttgtcttttacttagcccttccttgtcaggaggggctgatgggaaaaacaagcatcaaatacatggtatgggtgccatttatttggcttcattttcttccttacactgcaccttgtaactcctctgacgcctggaaaagctgtgaggacagggactctggcttgggtctgttacaatggagtcatttgctcagtgagacaaatgcattttccttccatctgggaaggaaatgatggctgcctttgcccaatgatactgtgactatgaacacagggtcctcggggttcaggctggtttctgagtgtacatttttattctttattctcccaagtctcaggactcagttgcttgctgtttgcatcacttagtgagtcagattatgtggacacctctctgacaaccttcttccttttatatttttaaaatgggactttaaaagaaactgcttcagccaagaggctattaagagtactttttttctttttctttttcttttttcttttcttttctctttttctttttctttttctttttctttttttctttttcttttcttttctttttttttttttaacatttaagacacctgagcaatgcttcaggagagaaggaggatgagagggatgctaactaactcgccaatgaaacctggcatgcaatgactatcccttactttcttgctcctttcttttaaaaattttattagcctattttgaataattctaaattggaagaaatttaaaaaattcaccaggttgcaagtaagctgtactcaaccttctttgtccttatcctccagtacccccctccccttccctccctcctacctccatttccctccctctgtccccttccctccctcttctcccatctctttcttctccctcctcttttcctctccactccttttccctccccccttcataccattcacttctccctctccttgtcccttgataagtcagatgttttctaaactttcttcagcagcctcacttttcttgttcaggactcatttgccagatgaaaggtagcgaatagaggtcactttaaaattaattcaaatctctggatccagaagcaagtgcagtcttattcttgacagggcactattctttagtgtgtccaaagtgccaagcagtttacagagtcagttctgaagcataactaattagaggaaagattaaaaaaaataacgcagtcaacaaatgcctttattttcacactgggggctggattcaggatgtgttctttaaatagggcatatgaatgtaatcgcagttgatgcctttttccaacttgaagttctttacagttcttacacatccacgcatttttttttctttgaccttcccattttgtatgaaacacaaagaattccaaattaagttcatgatgcattcatattttatattcgctaatgtctttttactttttacttcctactctataattatttaactcgaatagatttgttggtatggttgaaatagccaggttacttccaaatgtcttgacaagtatattgtacctttcagagactgttaaaatagtagcttgctaccaacaataggccttgctcctaagagttgggacttgttttcttcactcttcttcttcttcttcttcttcttcttcttcttcttcttcttcttcttcttcttcttcttcttcttcttcttcttcttcttcttcttcttcttgcttgtcgttcttgatattcagaatcacagggttggaatcttaaactaaggaaattgctgtcttacgcctttcaactttaacttcaaattcgcaggagaactaggactgtgtatgtagaggttggatgaggagtgggacactcctggaagcttggaaggaagtgtaaggggggaaaatggaagggggacaaacgtagaacaaggaggaggatgagctaggtcaagattttactctacgtggaattcactttacatggaatctttaagcattatgtcttataagcatttgtgcctttcaggaaaaacataaaccattgtttgcaaattcaaaatctgcgcctttattttcttctgaaaggaaaatcagatctgagatgtgaacagctaattctttactcttctgagacctgggaaaatgggacattcagcggtagctattgtcttcactctacccttgctataagaaggcaagagctttgtactgtaagctcctggaatgtattattttttctttttctttttctttttcttttttttctttctctccaaatgctcatgttttacatgagctgtgaaatatgtagatttgaactgtgtattatgaagacaagtatcttcagtgtcaacaaattcactctttttatttccttgaagcatacctttgctgcgttttaaatgatgctgattttaatggtttaaatggcatttatgacatttttcatctagagctcttagtattgcctccgagtgcctcatgcagtaaatatcaccagggctgtgaaagcgtctgccttcttgggggtttcaaactctctccctagcactctttaaactaaagtcttttattgtatcttgtgtgtgtgtgcatatgtgcacacttgtgtctgcatatgtttctgcgtgtacatgtgcgtgcatgtatgtgtctgttaaagagagaggacatgagtattgctctttgtgtataatcagtcaactttggcttctgagacagcatttattataaccagccttgaacttgctggccagcaactgagcctcatgaatctgtctgtctctacttctccaactcttgaaagtgtgtggcataactttttgacttaggtgtgttctggaaactgcaactcaagtactcgtgcttgcaaagagaacattttactggctgagccctctcccagatttctactttgtgtatcttaatattatagttacgatcagtaactattactattgcccttacagtttttgtttaaagccctcactgccccagtttgtacccagcttcaaacctccattctgtattctctggcaccagagtggcattgtgtccatctccttgggatttacaccatagctttccagccttgaggattatctatcaccccattatctgccttccttattagcctgacttgggtcattccttctctaccatgctcttttctgaatttcagacacatgcaaaataaaaataaaaacaagtgaatataggtaaaaagggctctattctaattcccccataaacttttcatctttaaatcttgtcatcttccttcttttcttctttaaaatattacttgatgccacttaaagtttataaatagtcatagtccatttaaaaatgtaaatttgaaaaaaactaaaatgactacatttatgattatgtcttcatactaaagtttatgagccaactgtcacttttgcttatagcgatggactgactaataaattaattatgcaattcatgcccagtatttccttgttccctttctgttttgttgatgaaacatcgtcgaatgtgaggtattgaaatctcctaatgatactatattactgtttccttctttatctcctgtcaaagaatatttcctttatatatttatatactccacttctacatagttttacaactgtgatgcagtcttcgaaattggtccctttatcattaagcagtgaccttctttttgtctggtgatctcttttgatggctgtctcatattttcttacatacttttagcctgagtttgtatatcttcaaagataaaaatgtatcaactacaggcagtatacattaaatttttaaaatctgactatattacatattctattcaccactagccacaactggatattgattgcatttaacccctttgtgtctttgattggattgctgcatctattcacattcaacattcttaacattcttattgataggtggacaatggctactttattacttgttttctatctggttgtgtctcctctatccttcttctctctctctctctctctctctctctctctctctctctctctctttctctcattctctccctctctctctccttccttccttccttccttccttcctttcttccttttctctttctttcttttgtctttatgatttggagaatttctgtagtgctaaattttgatttcatgcactttttcttgagtatctattataatttttaaatggatttttgctaaataaatacatttttaactcccctggctcatgaacaaatgtacatgtccattatctgagataatagataaatattaatttgatttgctgtggttacaatttacctacatgtacttttgctggttagttttacgataacttggcaaaggctagcgtcattttgagccgagaacaccaactgagaaattgttcccatgagattagcctgcaggcaagcctatggtacattttcttcattgatgttggctataggagggctcagctcactgtgattgatgccatccctgagttggtagacctgggtactacaagaaagcagagtgagcaatccatgaagaacaagccagtcctcagaattcttccatggcctctgtatcatcccctgcctctaaattcttgccctcagttcctgccctgtcttccctcagtgatggactgtgatgtggaactataagctgaaatgaactctcatcaaatgtggatggaacaactcatcaaatagaaccatagtcatgctccaaacatactcaagaaactacctaagtaaagttcaaaggacctgttggatacattcattatcctcaccaatgaataactgtgatgctttttatacatttttaaacctacatcatcaacatgctaggtaatgtgtctaaggtaatagaaaaccaaatccggctgtcaaactagccccatagcaccacatcccccaagctggttacagctgtattactctttaatcatcttgcaactctacctctgttttgtctttacattttacagtttcttactatgtggacgttaagcactaatttctattttccaatccagtttcctgtggttcagcagtgaaatacttcataaggcttgatgcaaagaactgagaaaatataaatagagcaaacaacagctttcctgttaagtgcgaggttccttcctattttagggctttgggggaggccagtttgcttaagagccgaaatgtttaccgcagggatgacttgcacccagcaggaactgacctaaaaactggcatcagatactctgtagtcatgaagacaaatgggagcttctttgactgaaagtgtgtaaaaaacctttgccaggcagtaaaggctgtgtctttattgggtactccatgcattttgcactatgtacacattgtgtgatatttttctcagaatgtgtaaagtttggaagatgccttgaagaggaacattaatgcgttctgtcccacatggtaaataagtcgttcacttgcatgaagaccactttcccacacttgtagtaaaagagtgctgtgaatcgaatgatatattacatgacatggagggtggacttataatttgaagtgaatgataggacaaatgctcagcttttatatgacatatactcagggaaattttatttactttattttctgaagattttgatgaggaagtagaattacccagatttgttaattttgttatatttctctcataattttgaaggacaagtaggagacaaatttagtcatgggttaatagtctggtttcttattatcctttttgcatcatagatattttcccccagaatcccaaaataatacatgattttagaatgatcatgaaggacaatggtagagttctcaactaacatgcttgaggccccaagtttgatccttaaatttgaaaagaaaaagatcaatttaaaaacttcaaagtagaaataggttaagatttgaatttttcagttaggtaaaataaaatgactagttaatatttgaatgcctacataattcacaactgtgtgtttcggtaagagaagattgtactcatttattatctttgaactcctgaatctcaactaccaatcaatgaaaatttattgacttcttttaggacaatattagagttatccacatttgttaattctgctgaagttctctaatgttttatatttgtacatgccttaaaattttactgtttatctatgaattagtttgctaatttttgctccttttagtaaatgctatatatatatattcatcatatataatattgagaagttgcataatgaaaaacataataaacattatttaaaacctttatttttattactgaaatgcattttcttttagtcgtttttttttttttttatcccttatctaaatttgttttgatgacaacttaatcctagcaaattgactacatatcacggcagaatttgtacaatgcactttggttccatcatgaaaactttctttaaaatgtatattttctgttaataattttagtctttgtgccttagttttattttatatacttcattatggatgttagaggcagttgcagattgtgctgatttcataaaatgagttctccttcagcatccatgaccacattaattccaggtacttacccgggttccaagaaccagagatgattttcctttggatgaagaggccatatgtccaattacagaattgttggtggctcccaagctgtgggtgccacaattgcaccctttgcattattattgtgacatgttggacaatgttgtagtttatagacttcatagatgggcaggacccttgtctactaccttcccatggagtctcgcttggcatcttctgctgctacaaaagcaggcccctggccctactacaaagtaaagaaacagatgacgcaaaacaccgataaaaaatgaacagcaaagtatcacaatagacaccaaagggatccaaaggaataccttaaaagcccttactctacaaatttggaaagtctgaaacaaattaatttctagatccattcatgtaattatttaatccatttttgatctcgtaatataagataaacattttgtatgttatttgtagaaacttattgaagtctttatttattgatattttatacaattttatgtaatttctagtggttttgcatggatggtgtttatttttaactgccaggctgtgactgatagccctaccctgtgagttacttgtgatgggtctaatagttttataaattcctagacctgggactactcagtcaaatacattagctaataccacagtgcctgaaaatcagacagtcgatcatagtcaggaatggtgtaattggtaatttgagaaagtataacagaaatgaatctgaaagaaatataatccttttctatctctttaaggaagagtaagagtctaatgatagtatagaatatgttcctatattagagattttaaaaaacccagaaaaatctaaaagtggatcaaaataaccttaaaaacttgttttagcatcagagactgtgctattatcactgttattgatgtcttgtctttacaaacaatgcatgtacatttaaaagaaagccatgcattatccctatagctctgagagaaactaccatattaatgcatttgtttctaagttttatacacatgtatgggtgatagggtaggagtgtatggtccataaaatgctacattgtatgtatcatttgattttctgattttataatttgatttaatgtgagcatttctgtctgtcgtttcatacaatctatgttacttagtggctatctagtgtttcattatttatcccctgaccttcattttactacacttcattggactgttataaatatttgagcattttcacaagtaaatgtagcacttctgattatgcagttagagtaaacacttttaattggaattgctatcttaaagagaatgccacataaagatttcatataggatgtggtcttatcatgtaagtttctgcctttagtatcaccaggctatcgtaatactgtatcccttgaccatttagctccttggtttctcattttatttcttaggatgactgtaggtatcaaacaactgagtcattaaacagtgacatcaacttcaaggatattttagtggattgaaaaacaaatggattattgaaaatgaattgggcacctaacatgattattttatgccagtcatgtgatctgcatggtgatctggtcaccttcataatatcttacatggtttctgcatctaccatactgtgcctgcctgaccatgagggttggcccatctactactctattctaagaactacccagctgcccatttcaacaaagaatctttgatgtacatcaccaacttctctgtttctttctctcatttctttgattacttccgctttcctttctagtggtgttattgtccttcggggctttatggaacacttcttctttcccctcttctgattttaatctgtaagatgtaaataggtatttgttcctctgtgtgattagaatgcatagagaacaagtcatgcatggaacgcctctaggaaagcttatcccatcagagaacatctctcctgtcttttccattttaaaacatattggcagaaacagaacaaagagagcagatggctgaactttagaagccagagggctcatagagaaccttcctaagcagacaggcctttgagggttattggcatttgacatttcctcaagccctttgtccaaccgggcacttctgatttggaatggtggatgttctcaagcatcagttgatggtgctgctgaagtgaataggttgttctgcaattgtagaatcttaaagatgcatttgcattcaactctagcatgtggctttgattccctgggattaaaagtgtgtgactctcttcgcctccgacagttcagtttcctgcgcttaggaaatcatggttgggggtctctagagctagacttgagaccctgtcaggtttaactatgtagaaagagaagggcctactttgaagatagagatataacatactttaatgtgcttggggagtaattcttagttactgaataattctattaatgtatattgcatcaattatagatttataaaggctataacaacagcttcttggatattacattttgttttgttgtcaaaaatttcctaaaaaacatgagaaaaaaagaagctatttttgctttttctactcagaatgggaaaaattaatgttgcaaaagttattgaaagtatttattaaaatgagagtaatggctactctaacaaatggcatttatttccccaaccctaggtttccatcaacaactaaaatttggggatgtcctcatgatgaaaatgtgctgtgcaatattacatatatacagagggattcatgctttaaattatatagatcaatactacctactaaacaacaacaaaaaaaaacattagtgggtatggtagaaactgttgtcttgtcctgctttctagggaaaggtgacgtgtttggagacatcttctggaaggaaaccacccttgctcatgcgtgtgccaatgtccgggccctgacttactgtgatctgcacatcatcaagcgagaagccttgctcaaggtccttgacttctatacagcatttgcaaactcattttccaggaacctcactctcacttgcaatctaaggaagcgggtatgttgcatcttctttctcttatgagtatccagggggctagcaggctatgttctatcagccaagaatggaaagtacttcattttgaagtgctccattcccatctggatagagtgatgtaattttctttccttttatttacactgtttacttaaagggagaagacactcttattacctaagtaaatatttgagtctttatcatgtcagatgcaaaataaaaactatttgaggagaagcaaataggactggaaactgctatggcatgatatattattagttagaattcagaatgttcatggtccaagaatctagcagttgttcagtctacaaagctggatgtctcagtatatgccagaatctcaaagagataggttcttatgtcagtggcagaatgaatttgctaaaaagaatgaggtcaagcaggcaaagagccagagagtctttcttccatatcctttttttaggctaccaccaaaaggtgtggcccagatttaaggtggatcccacctcaaacaaacagacggacagacagacagacagacagacagacaaaaaacctccagattttaggtagattaagaaagatcaagaaaaataaaacaacaacaacaacaacaacatgaacatcaacaacaaaacaaaccaaaaccctcacaggtatacacagcactttggattttagttaattccaagtgtagtcaagttgacaaccaaagatagccatcacatatggttagttcttggagtttgtgacagtgatctgaaagggatagcaacatctttcttttgaggtgtggatgtctctaaagttgggaagatcaatcaagttggctacttatttcctattctcatgctctttcaatccttctcatctcataatcaacttgcaaagcttccttttcaacaagcctttcaaagaacaccatcagaggagtgaatgaggcatgccacataccctgtaaatagatacaggattcctttactctggtgacattgcaaattcgatcttcattaccatttgtttctttattgatgagtgtgacataaagttaatttgcataaagaaacctcccgtctctaatttatacgtcattgggcattggctaagactcttttatggctgagaatgaaatacacatttgaataactggacttaatgaacttcacataaaatgattgcctgtctatagttaagtattttggaataatgaaccctcctttctatagcctcttaaataaaacctttcttgtagttaacatgaatgcaaacaagacagtcaagagagaaattaatgtctgcactgtagccacgcagaaacaaacagaattaaatcaatgtgcttcttactcagggtcgaagggaagtctaggctgccaggagtggggatactagtgagttttcaaacatttgaattgtattagagctatgtttcagttcatacgtgtgttaacaatttaccattaaatatccagaacctgtgggacaagtacacatgtgtagataacagagatgaaccactgactccctgtgctcaggaagcttcaaatgcatatagtgtgaaatgctagcaatctgacattagccagtgatggatgagggagagggaccaaaacattaaccaaatatgaaatattcttgctggctgttaagtagctcacagttcttgtgttcatatctgccttctgctgtaaggtccccatctacaaacaactgcttgaagctcttatattcataccaactcaaaaatggatcagatttggatttttttttcctatcctgtaaggtggcctaaaaccattgtctatcatcatttacattatgcagaatacatgctgtcatcgtattcttcaaaacagagttctgtttacaacagatctcacttgatatttatgacattttttatatagaatgtggaattacttcttcctccagccatgtgaagaaatcaggccagtggattaatattaaataaccaacagtcctcgttagggttactattgctgtgatgaaacgtcatgaccacaagtgagctgaggaggaaagggtttatttatcttacaattccacatcatagtccaaaacagaaagaagttaggacatgcactccagtggtgcagttacctggaggcaggagctgatgcagaagccatgggggtatgctgctatctggcttgctcctcatgactttctcatcttgctttcttatagaacccacaacttccaacccagggatggcactacccacaataacctggaccctcccccataaattattaatttaagaaataccccatagctggggattatgaaggcatttctcaattgtggctcccttatttcagatgacagcttgtgttaagttgacataaaactagctagcacagcaactgatatggttgcaagccaaagtctcaagaaggaataattcaaacagatcacaaatagaatatacatttctttacaataagttaatcataaatctctgcttcctcttttttttcttgtacactcctgtgcatgtgtttatacaatacaggtacaacacacacacacacacacacacacacacaccacatacaaaccacacatattttgcttgtattagagctgatagactctatagttttgactctcccagttttttgtttttgtttttttgtttttttgttttttttttaattgagctagtagactgagaactcttgtttgtttttacttttagaatcaggatctgggaactatatgcttgtgtctaagggtactactgtgttaagttacagcaagtggcttctccctttccaaatcccttatacctgtatcatttttaatttgttttcataatcccgtcccactgtttttaatggattgtttagtaacttggcaaactgtgagaataggatgtgttgccagtcgctgccacttcattcccagccaaacaaaatgtgaacgagaactgtgaaagagtatctgagtatcttccaatgattagtaatactaactactatttaaacagcaaattttatgtgggcagaatttattttatatgtgataataataataatgtgaacatcccataaacaaggcagaatggtcttcatttcaactataagtagaaggttctgagaaggggatttatacctaccaaataatttgcacgggtcaaggtctggatattaaccattcattgattttacaaacttcttacaacacctgccaaacttttccataaatgtctttcccagacacatgccccacaatttgtaggatgtctcatctgtgcatttactttattccccattgatttactaagtggaaaaaaataaggtttttctttctgttattgtaagaacgatagtgataagcagttgtcacttctataaccaagactatgtttttggtgaggaatagatctcatagtgaccatggctgttcagtaagaatataattctactaagtggggtatcagagtttgaaccaaagttctgagccacagtagcatgcagctctgtccagtgtataaatctgtacatttgctcagtgaagatgttagacactgtgtggtttgcaatggctgtacaagacaggaactaggttattctccggttgcttgccctcataggtttcccttaacagaatgttaagccatagatgtttctattttaaaagttcttgtgaaaaaatgttctggtgattgtatccaacaattagatctgggattagcaaactttttgaattaaggattagacagtaaaaactttagggttgccaatctcagctattcaacttcaccattgtaatgcaagagtgactccttatattagtcaatcataacataatatagccaggaactttaggatgttttatatattaatttcattaaataccagcaacacagtatttcctattgtactcttgcttgagtttgtatttacacaatgctccacagaattccagcatttatatgtcctcaccctttgtggagcctccctctgtcctgtggaaaatgggaagtctcagtggttgtgatacccatggcttggtccagagctgtcagaagttgatttagctatgaattgtaacagagatggtggatatctggaataggacatcataaaaatcaacagtgaggagccttccagtctccatttgcaccccagagttaaccctgtggcccagatctctgtacccaaatccagccaagagagagatggcctcccaggaatgctgtcactcctaagttcacaagtgataccaacacttttgcctcaataactggccaaagaaggaccagctaggagaccacaggacacaggaactgtggagcaactggggacaggatccttctggtctccatctgttccccagagtattccctgtggcacagctctctgcacccaaatcctgcctggagacagctggtctcccaggagtgctgatacacctaagatcagagactaacaggagggacaggctccaatcagagatagcaagactacctaacactagagataaccagatggtgaaaggcaagctcaagaaccaacagaaaccaaggctacttggcaccattagaacccaggtctcccactatagcaagccctggatacccccaacatactggaaaagcaagatttgtatttaaaatcacatctcatgaacatgatagaggactttaagaaggaaataaataactcccttaaggaaatacaaaacacaggtaaacaggtggaagaccttaaagaggaaaaaaaatctaaagaattataggaaaacacaaccaaacaggtaaaggaattgaataaaaccatccaggatctaaaaatggaaatagaaacaataaagaaatcacaaaggaagacaaccctggagacaaaaaaactaggaaagagatcaggagtcatagatacaagctccagaatacaggagatagaagagagaatctcaggttcagaagatagcatagaaaacattgacacaacagtcaaagaaaatacaaaatgcaaaaggatcctaacccaaaagatccaggaaatccaggacacaatgagaagaccaaacctaaggataataggtatagaagagagtgaagattcccaacttaaaaggccagtagatatcttcaacaaaattatagaggagaacttccctaacccaaagaaagagatgcagtgaacataaaagaagcctacagaactctggtcccttgggttcctttctgaactttgcatatggtttccttctcatggtatcttcatggtaggagagggaatgagggaaagcctttcttcttataaagggcactggtgtgaatgtactaataagcaaacactaccttgtttctattaccaataccagaccggtggctacccccgggtttatgtgccagctgctagatgcagaagactagaatttagattgaaacagtagctatgcaaatataaatctttctaccttgaacagaaaccacatctcccttatttgtgacccagccagagggccatcctaaaacaggaagtactatacaaataagagagtctatggagccaggcagagaacacccaggagaagggagaggctggaaattactgtcaagaatggcaaagtcacactgatgggcaaagctcctgcttctcactcaggatgcaaactgcttgactcaatgttagactggtttttcttggtaaacatacacacatacgatacacacacacacacacacacgtatgtatgtgtgtgtgtgtatacatatattactaattttttattatttactaaagtaatttgattatacacatgatctatatgcatatatatgtacatatatatgtacatatacatatgtacatatatatgtatatatatatgtgtatatatagattgtgtgtgtgtaaaatcaaattactgtagcagataataaaaataataataaaacaaaatcattcagttgcttgtaaaatttctgcataaatcaatgaaacaatcaaaagaggcaaagcatgtcatttactttcagcctaagaggttgtgacctaaatggaataaattaatgatccttggcatcacagtgttagaaacctgagattctttgacttgtaacctgtaaatcttgataacaaaagacctctattttacttgtttggggataaattccatctcatagggtgggccttaaatccaatcagatgttggtaggctactcacacaatatttgctcataaagcatagatattacacagatattttcagaatttgtcatgtatgtttaagatattccaaagtgctgttttggttatcattgtgttttgcaaattttatcttgtatcttgggtattctaagtttctgggctaatatccacttattagtgagtacatatcatgtgagttgttttgtgattgggttacctcactcaggatgatgccctccaggtccatccatttgcctagaaatttcataaattcattctttttaatagctgagtagtactccattgtgtaaatgtaccacattttctgtatccattcctttgttgagggacatctgggttctttccagcttctggctatcataaggctgctatgaacatagtggaacatgtgttcttaccagttggaacatcttctggatatatgcccaggagtggtatttctggatcctccagtagtactatgtccaattttctgaggaactgccagactgatttccagagtggttgtacaagcttgcaatcccaccagcaatggaggtgttttcctttttctccacatccttgccagcatctgctgtcacctgaatttttgatcttagccattctgactggtgtgaggtggaatctcagggttactttgatttccatttccctgatgattaaggatgttgaacattttttcaggtgcttctcagccattcggtattcctcagatgagaattctttgtttagctctgagccgcattttttaatggggttatttgattttctggagtccaccttcttgagttctttatatatattggatattagtctcctatctgatttaggattggtaaagctcctttcccaatctgttggtggcctttttgtcttattgtcagtgtcttttgccttacagaagctttgcaattttctgaggtcccatttgtcgattcttgatcttacagcacaagccattgctgttctattcaggaatttttcccctgtgcccatatcttagaggttttccccactttctcctctataagatccagtgtctctggttttatgtggagttccttgatccacttagatttgaccttagtacaaggagataggaatggatcaattcgcattcttctacatgataaccgctaattgtgctagcaccatttgttgtaaatgctgtgttttttccactggatggttttagctcccttgtcaaagatcaagtgaccataggtgtgtgggttcatttctcggtcttcaattgtattacattggtctacttttctgtcgttataccagtaccatgccatttttatcacaattgctctgtagtacagctttaggtcaggcatggtgattccaccagaggttcttttatccttgagaagagtttttgctatcctaggttttttgttattccagatgaatttgcaaattgccctttctaattcgttgaagaattgagttggaattttgatggggattgcattgaatctgtaaattgcttttggcaagatagccatttttactatattgatcctgccaatccatgagcatgggagatctttccatcttctgatatcttctttaatttctttcttcagagacatgaagttcttatcatacagatctttcacttccttagttagagtcacgccaaggtattttatattatttgtgactattgagaagggtgttgtttccctaatttctttctcagcctgtttatcctttgtgtagagaaagtccattgacttgtttgagttaattttatatccagctacatcactgaagctgtttatcaggtttaggagttctttggtggaatttttagggtcacttatatatactgtcataacatctgcagtttagacatggatagaaaaggcctcagagagcagcagggttgaaacgtttgctgagtttatttatgtatgtatctgtttaaccaattcaatattctatttctggagatggtgggagaatgtttgtgtattgaattcagaaccacctgcgggtctgagtcaaaggagataattgctatgctccatgtgggcgatagattccagaagattcccactggactcttaagttaattgtatttctgatcatcctatctagcggttattcagtggtattaatcatttacaaagaggcaggtagaacccagtagaaaccactgttgtcctttgacagagttacttacatagttaaactggaggcttagatttcagaagatgcctatgatctgattagtggtccctctctgtgcctaaaccgtttagtcaaataatatgattcatgtaagcagtgtgattattttattttgtggaattttgctataggccaatcagaaaatgcctacatgagtttcacagacactgaatccctggtgacattcatgactgacaacatctcacattcactttccacagctcttgctggaggagctagagaggaggctgggtgctctggtctagcttgcccagactctcccacatacaactcgctttgctaggcttgctttgtgtgttcaggcgtcagtaggtcatgatattgactgtaactctgtgctatcttgtgacttctagtcagccatccaaactaaggatcatcttgaggaccaacaatgcagcaccttttataacaattaatatgaaatctgtattctcagagtcccccagatctgcagatacattggtaattttattggaaccattttctattaaaaaaaatgatgaagcccacagacattaaattttatgagtataagaaaatgagccatttaaaaattggtaggtatatttgtacatgaggctgtcaagagaatttcatttccttggagcttaaaataaatgttacattagcacttacggctacattaagcatggctgagattgggaattatttctgaatattttcttcaccttcaagatagcaggaacatatttccctccagagtagctacttaaataagaagagtgagaggttttatttgctatttttttgtacagagtctgaggagttgctctgttgaagtgtggcacggaaagcattggttggctccattggcctccaatacagttcctcctaatggctatggagtctctgagggagaggcccagtgtctgctgcccaggagcccacagactagagatcatcacagattcaggaaagtgctatgacagaatgcacacaggtttaaaagaaccccagggggatgaggaccagtttgtctcgggagaggcatcaaggggagtctagaagggtgacagtcacatagggataaggatttcatttcaaagaaaggattgagagtaagtcaagatctttgtgagttacctattttatttcattatagatgaaaaaaaaaacagattaagaaaatgaagtgattaactcaagtttccttagcacttgagtgtcaaagcttccacaggtttctaagttctttgaatcctgtgctgtccgtacttccactgatgcagattaaaagtcttgcggtaaaggtgggatcctgtggatccttcctctttccacattaacacgttcatctatattgcccgtcctctggttttgttgtgcagtcatttccaggatagactaaagatatttttaaaaaagccttttgagtaaggttataaaatttgatgcttgactgtgttccactttaaataagaagaaaaactgacagcatgagctcacatgtgattcagccattgatttcagtgtgttgcacactgtacttcagaaacaatgaacagaaaactccaagcaagcaggcaagcaagcaagcaatc

SEQ ID NO: 1183 - DNA, 1946 bp, Mus musculus
aatcaagtttcttactgggaaatgcccaaattgtggactggcctgtagtttatagtaatgacggtttttgtaaactctctggatatcatcgagctgacgtcatgcagaaaagcagcacctgcagttttatgtatggagaactgaccgacaagaagaccattgagaaagtcaggcagacttttgacaactacgagtcaaactgttttgaagttcttctgtacaaaaaaaaccgtacccctgtttggttttacatgcaaatcgcaccaataagaaatgaacacgagaaggtggtcttgttcctgtgtacattcaaggacattacactgttcaaacagcctatagaggatgactcaacgaaaggttggacgaagtttgcccgattgacacgggctttgacaaatagccgaagtgttttacagcagcttacaccaatgaataaaacagagacagtccacaagcattcaagactagctgaagtgcttcagctgggatcagacatccttcctcagtacaaacaagaagcgccaaagacgccaccacatatcatcttacactattgtgcttttaaaactacttgggattgggtgattttaattcttaccttctacaccgccatcatggttccttacaatgtttctttcaaaacaaagcagaacaatatcgcctggctggtgctggacagtgtggtggacgtgatttttctggtggacattgttttaaattttcacacgacttttgtggggccgggtggagaggtcatttctgacccgaagcttataaggatgaactatctgaaaacttggtttgtgattgatctgctgtcttgtttaccttatgacatcatcaatgcctttgaaaatgtggatgagggaatcagcagtctcttcagctctttaaaggtggtgcgccttttacgcctgggccgtgttgctaggaaactggaccattacctggaatatggagcagcggtccttgtgctcctggtatgtgtgtttggactggtggctcactggctggcttgcatctggtacagcattggagactatgaggtcattgatgaagtcaccaacaccattcaaatagacagctggctctaccagttggccttgagcattgggaccccatatcgctacaatacgagtgcagggatctgggaaggaggacccagcaaggactccctgtatgtgtcctccctctacttcaccatgacgagccttacaaccataggatttggaaacatagctccgaccacagacgtggagaagatgttctcagtggccatgatgatggtcggctctcttctttatgcaactatttttggaaatgttaccacaattttccagcaaatgtatgccaacaccaaccgttaccatgagatgctgaataatgttcgagatttcctgaaattatatcaggtcccaaaaggccttagtgaacgagtgatggattatattgtctcaacatggtcaatgtcaaaaggcatcgacacagagaaggtcctctccatctgtcccaaggacatgagagctgacatctgtgttcatctgaaccggaaggtttttaatgaacatcctgcattccgattggccagcgatggatgtctgcgtgccttggcagtggagttccaaaccattcactgtgctcctggggacctgatttaccatgctggagagagtgtggatgccctctgctttgtggtgtccgggtccttggaagttatccaggatgaggaggtggtggccattttagggaaaggtgacgtgtttggagacatcttctggaaggaaaccacccttgctcatgcgtgtgccaatgtccgggccctgacttactgtgatctgcacatcatcaagcgagaagccttgctcaaggtccttgacttctatacagcatttgcaaactcattttccaggaacctcactctcacttgcaatctaaggaagcgg

SEQ ID NO: 1184 - protein, 644 aa, Mus musculus
SSFLLGNAQIVDWPVVYSNDGFCKLSGYHRADVMQKSSTCSFMYGELTDKKTIEKVRQTFDNYESNCFEVLLYKKNRTPVWFYMQIAPIRNEHEKVVLFLCTFKDITLFKQPIEDDSTKGWTKFARLTRALTNSRSVLQQLTPMNKTETVHKHSRLAEVLQLGSDILPQYKQEAPKTPPHIILHYCAFKTTWDWVILILTFYTAIMVPYNVSFKTKQNNIAWLVLDSVVDVIFLVDIVLNFHTTFVGPGGEVISDPKLIRMNYLKTWFVIDLLSCLPYDIINAFENVDEGISSLFSSLKVVRLLRLGRVARKLDHYLEYGAAVLVLLVCVFGLVAHWLACIWYSIGDYEVIDEVTNTIQIDSWLYQLALSIGTPYRYNTSAGIWEGGPSKDSLYVSSLYFTMTSLTTIGFGNIAPTTDVEKMFSVAMMMVGSLLYATIFGNVTTIFQQMYANTNRYHEMLNNVRDFLKLYQVPKGLSVMDYIVSTWSMSKGIDTEKVLSICPKDMRADICVHLNRKVFNEHPAFRLASDGCLRAVEFQTIHCAPGDLIYHAGESVDALCFVVSGSLEVIQDEEVVAILGKGDVFGDIFWKETTLAHACANVRALTYCDLHIIKREALLKVLDFYTAFANSFSRNLTLTCNLRKR

SEQ ID NO: 1185 - DNA, 443039 bp, Homo sapiens
tgtttttgtttgctctgcaacattattccttctagagaactgtgtctatctccatagttagtgagactaccaaatgctgcattgctcagcagccaggatagagcatatgccaggcttggtcagttacagtaatacagcccctccgcacccattcttggtgcagatactagcatgtagacatgtgatcctggtagggcaaatcaagggcttcctctggactgatatttggatgttagggagagagaaatttatctttgcactgggattgctaaactttgaagtggcaaattgcacagtgacgtgagggtaaaggtttaacaggtggctctcaagagaaaaacatgcatgtatatatatatatgtacgcatatatatatacatacacacacatatatacatatttaaatttattataaattctactgataaaaggatatgtagcacataattttcaaatactattaaaatagtcatctctctttttgcaaattccatgtgacctactcattctcacaggatactttcaccggtttttgcctcactcttgcatctgtagccaacctatggttacaattgatgataaggtagttccaacaggaacattggttggtattttcctttatcttaatgatgaaaatggaacaatgaagatatattctaaaaatttatacatttgtcaatgttgtgtgtgacttctttgttaaatttgatagttaaaaaatcttttttaaaatgacagctaacattgtatatttttgtggtgtacaacatgttttgaagtacatatacattgtgggatgattaaatctggctaattaacaagtgcattacctcacatagttgtcatttctgtggtaagaacacttaacatccattcactttacatttttcaagactacaatatatcaccattaactatagtcacattgctgtacaatgagatcccttgaagtttatttctcttatctaattgtaattatgtgtcatttgatagtagttttttaatattagaagaatatttcctaaaatttttatttttcacaatgttgctatggtttaaatatttgtgtctccaaatttacatctgaggtttgtgttattttccttggagatccacagctctccctgcattgtggcaggagaaggtcctccttactcttcttctccaacttgtcttccttcccttagcacaggggaatttttttctcatttagggtggatgtggagcatatgagacagctggttcttagatattttcaaaatcttttgggtgacagtgtagtgcaatggtgaaatagatggctaagcatttgggctttgaagacagagtacctgaggacataatcctgactccatcacatactacctttgtgaccttgtgccagttactgaacttctctgtttctcagtttctttttggttcaatgaggataatgtaaatacctactatggtgcctggtgtatagatgcataataaatatttgttgaattgaattaaattcaattttgctctattaaaattaaatgagattaaatgagaccattcgtgtaaagtatttagaacagtgactaacaccgggtaagaatgtatagagcctttattataacacttttctcattgtatttctgttctaatgcttagacttgaaattcaaaagccaggaagaggtgagctgtggtgaggaatgatgatacaatgaaagcaagagggtgacagtaaatatggggcttgggaataatttaatatttcaaaaatatcagcttcttgtatataggggtctcttaagtagttttttcaatcctggacttttctctccctaaagcatcttcaatcagaaactgattttttctcctcaaataccatgtcacatatttactcaaaatatgtctttcattgcctacagaataaagtccaaaccccttaagttggcctgatgagcccctaactgcctccaattctatcttccatttaaaggttcattttgtctactgttagtcacatatcacaagctttcttatcattatgattttccttttttctagttctgtcagctagaaagctccctccttcttcccaccaagcacacccattaagggaaaaaatagaggctgaaatccagcccacaaatatctcatcaatcggtgtgctgtgacttggccctatgactggccagaagggacttcttttcctaattctcacgaagatgccaaaagcactagtggcagttctggtgaagagatacataagatttcaactgtatttgcaatcttttcttttttattattattatttttgtcttaacaacattgagatgcaaagagtgaggtacaatgttgcaacagaggaagcatagagtggtattagaagaacttacaggaaggaagggctgtttaccaggtcatggagagtcaaagaaggcctcttgaaggcaatgacatctcatatagtgtctgaagtaaggtggctagtggctagtgatgcaggacattggtggaggaagaaagagacagcatagtaagcacaaggaatacaaagggacatagggagggaggaagtatgaaggtggagggttggaatggggaatgatgagagttgatcctggatagataagcaggagtcagatagggaaggatataaaaaggccaggtaagggctttgagctttcacctgggggcaaagagacttagaagtgtttacacagggaaatgacataacagatttatgcattagaaagatcactttagctatagtgcagggggaaaaatgaactgtggtggagcttggagaagaaaatagagaggactatgtatggccggaaaacacaggaagaagggagaccagttggaaggctgatgtggaaatccaagtaaaaaatgacggggcctgacctggagcagagccaacagagagagtgagaggtggatagtttaaagagatatctgggaggttgaatgaataggactggatgtggagtcgggggtagagaagtgttgatgttactaacttggataactgggtggatagaggtagctcctgagataagaaacactggagggggagagagtttgggcaggctgcaagatgattcatttgttttgaatatgttagagattcccgtggaattgccagtcagtccatgggtatgggtatctacagttgcaggaaaaagatctgtgttttggaattcagatatttgtggatttctatgtatttgtatctgtctcactggggttaggggcagcaatctctgttttcaaacacatgaatatctgtgcagcaagacatggtcaatatccacagcagatgggataaaaaaaagagtacaaatagccacctaacagttcaggtcaggttttattggcaaatgagtttgtaaaaaatttatgaaaaaaacccgtaggatatcagagttttctatttcagaaagctggatgcaagattctccacctgtactatctcatttaattcttacatcaaccatatgtggtaggcattattaattttttttacagaaaaaaaaccctgaggcacagataggttaatgaaaatgcatgctgagattacagcatcagtattcaaaacaagtcagtctaaggtaggagaatgtttcaagaagaaaggattagtaataggctcaaacgtcataggtgggtaaagtagattagcaatgaaattgcctcactggatttcgcaatttaaaaattacctttggggaggcaacttcaggaaaacagttgaaaggaggccaatttgttgggggttaaggagtgaataggaggcaagaaagtggagacacctatcacagacttctcagaagattgaccatgaagagataggagagacagagccaaatcttgagggaaataacaagttaagaaagcatttttaaagcatgttaaatgtcaaagtgagaaatgaggggacagtcagcaaaatgaggtctccagaggcccaaatgaataggatccagatcagtgatggagggatggtgagagaaattgctttctatttgtttggaagaaagaagaaaaggaagagagagcaatggcaggaagtctaagaattgacatcatgacctgttttctacgagtgatcttctgagactgggaggtgaaaaagtgatgactgaggtgtgaaaagagacaagatgctttgagaaagctacagcagataatggaaaatgcagctgatcaggatgtacagaaggattgggctgtattgagaaggtcaagttgagttaggaggccttcaatttatggtgcattagtctgggaggttttgtggttctcttctgggctgctcagcagatacaagtacacagaaactcacagctgcatgtaatagagcctttgtgggagaggtgaaactgaaggtatgatccttgggagctgaggattttcatacagtattgaaaccccagagattcccataggatgcagccttgttctaggtcagtggttctaaaccttgatacatatagaaatcacggccgcgtgcagtggctcatgcctgtaatgccagcactttgggaggccgaggcgggctgatcatgaggtcaagagatcaagaccatcctggccaacatggtgaaaccccaattgtactaaaaatacaaaaattagctgggtttggtggtgggcacctatagtcccagctacttgggaggctgaggcaggagaattgcttgaacccaagaggcggaagttgcagtgagccgagattgcaccactgcactccagcctggtgacagaacaagactccatttaaaaaaaaaaaaagaagaagaaaaaaagaaatcacctggggaactttaaaaaaaaatagtaatgcctgtgtctcatcctttggaattttgatttacttggtctgggctgtggctttgggattcttacaaagtctccaggtgactgtaatgtgcagtcaggatggagaattattgttcctctgatctcctgttcccaaagcaagttaataacctgtaccagccaggatagatagactaggttatggcacagtaacaaatagtgctggattgtcagtatcttgacacaacaaaggtttatttcctgcttatataatgtctactgaggtctaggtaacacttttgggcaggtgttctccttgtatttcttggcattccctagtcactgaggcaggggaagaggaagatgagaaaataagtcctggttcttagatgctcacttggaagtaacaccctttccctccattcctatttcattgaccagcattagttgcatagccacactgatttcaaggagcaggaaaaggcaactggatattggtgaaccttagtagtgaccactatctagagccttcactgtaaatgaaagttgaaggggaggaaaaggctcatgtatttactttcaaacacttacatagtgcttattacctgtcagatattgtctgcattgctttcaagtaggaactaacttaatctccatatcagcactattaaataggtaattattatccccattttatagaaagggatgttgtgcttaaataacctgccctgggtcatatagctagtaagtgggagaggcaagattaaattctaggtagtctgggtccacagtccaagcactaggtctctctagtctgctttctctcaacttcgatcctgagttggggggagcagaaaggaggaaaggtagaagatatgggtgtaaatgtgagatttggtgcatgcaaagaaatttagtgatgtttgtatgcttcactgctagagctgggatagggctttgtggaaaggcacgcagtgaagtttagggagttaaaaatggaatggagtgatgctgctgctagtgaggccaaccttggaggccatgatagggaatcacttttgcccctttccttttttccttcttcccatccctccatcagagccacccatttagcatctacatacaggttgtaacttggagctgtactgaggtttgctcagaaacagaaagcaggaaacaggataaaaatttcccgagaaagtagtgcttggatcatttgcacaaaagggatcaaagagtaagtccaactgtacctatttgtaatgcatttttgaaaatttacatataattacagctactgtcaagtaaactatattagaaaatcttcagaggaggggtatttgataaaagagtccttcagtgaatcagtagtaattccaaatcatcacttcctacatcagttttctaagccttctcgtttatattggtttcggttagactagaacacacctgcagttcactcagccagcttccattctgctgtgatttaggagtcagtgaacacttctggggattggaattcttggttatcacagacaaggtctaattaccatacctggagggacagaagaaaagaacaaatgattctgttttaaaatggacttttgacaatataacaaaacgaagctttgtctttgtgtgacattgaagctttctaattcctatctctctcatctgttaaatcttgaggtttgttccccacatacggagtctgtaacacacttttaaaatgctgtattagcaccttgttgcaactggccagcatattccttagggccagtcaatctatatgatgctgctactctattttccttgactctattttgattgggaacagttgcaagttgttgccaagggtttctcttctttcatgggctgcaaaatcatcgatggcaatagagatccttgatgttgctggttgttaccacactagcctaagattaggttattttctattatttacaaggagctctggctacagggtcaggagacctgattttagtctcagtgcagactgttctaaagcactgtgtcatctgggacaggatatttcatctctctgggtcttggtttcttcctttataaaatgaaaatttaaactagaagattaagaaaagtgtgtaaccttttgacactacacagctacattttttatgatcattaaaataatccaaacgttataatgctatggagttattagaaacaaagaagaaaggataaatgtcatttaattgaatctgcagatgggaataagaaagttctaccagtaattttgtgattgtgtcttaatggagtccaaaagaatttcctctttgggaaatgtgagttaatacacccacagaggaatgattaggaacaagaatatatatactagatgggaaatgctgagaacctgagattttaaatcaatacccataggcgagatgtgggcagctgacgatgtgcaaaagaacatatagatttgaaatattctctgttaatgatgatggaattattatagcatgctagaagtctagaatagcaatcaatgaattatacatgtttaaaaaataagtctgtctattcaccaacccagccaatgaatgactgattagtttaggatcatttgaacacaggtcacaaaagaatcgctagagtgggaaattcaattatgtgtttaaggctgctgtggtgatggtggtttcagttcttcccaccaactgcagggagggagttgtaacctggccgtatctcttgagtgctgctgtggcaagctcactacggatccaatctgcacctgagtctcttgttatttaactaaacacacctgatgtatttaaaagacattttaactgtaaggggataagctccatggccagcagcacttcctgtggaaagctagaatagcctagtgttattccaccgagtctcttgatttttttttttttttttttgcataaagatttttagcggaataaaattgcctcgtgtcaaccttctgggtttgctcagctgcctggtctctgaaaatttcagagagggaaaaaatgaccccaaggtaaaggctggatcctggttttgcatttagctgcttcaagcagtaggcttacccagttggggagaggagagaaagggagagagaggtggggggagagagagaggtgggaagagagagaaaggggagagagaaggggagagagagagggaggggaggggaggggaggggaggggaggggaggcaaggagggagagagagagagacagagacagacagagagagagagatcctgtcttgaggtcagtgattagtaatctagggggttccaaaaggggacaggtgctgagatgtgtacttccacccctgcctggggattctccctgcttctggtaatctgaccttgataatttctaacgcaattacctctcctctagcacattctgaccccagcaaaaggggacgcacccatccaactatcttttcgccttcaacactgaagacttcgctctaccaccaaccgctgacgccgcggcagtgcacttttggtcccccactctttgaccctgtttgcacaatcgtcctttctcgacaggcccaggtgcagcccccagagaaaagaggaagccttacatgtatcatatttacctggagggcttgtttaaacagatgagtcaacccaatcctcagagttcctggttccctaactctggggtagaatccactaatttgcattataaacaagttcttaggtggtgcagatgcggatgctgcccgtccaggccactttgagaaccactgccttagatcaaggaaggtgcctcagtgcgggctcctctttcctttccatctctctccacccctttcgcatttatgccattttcctttctctgtgacacattcaggcttttggactgtttgtaacggtgccgctgctgtccgttctcaacgcctggaaattggggggtttgttagaggtgattcgtgccctgccccaccctggcgcatcttcgcccccacagcctttaccgtttttccatcgctaacactgccctcctcactccccctctctcgggtgtgaattattcaccctcttcccctactcttcacatcaagtgcaacctttcccgcaactttgcagcggtggcgggctcgcggatcgcctcctgcgctcagcggtcctgggggaaactcccctgggcggccgcacgctcccccagacgccaagcccggcccgggtcgcaggggccattccgggcgccggctgtgcgctcggacttcagggctcgcgctcccgctccggggtggggtaagggcggtgcggaaagcgccagtgttcaggaaggtttcaggcgccggagcccggaggggggcggtagcagcgtcaggtggctgctctgcgtccccgcgcgccgcccagccagtccctgccctgctctcagcctcggctggggctggagctggagcctgcccgcacctccgccccgggagccgcgtccgcgccagcagcccggattcgggacccgagcgggagacgccgagatgtgagcctccgactggccactgctctctctggcaccctcttctcccattccaccggcccgattggacagcgatcgcttgcctcgatctccggggagaggagcaaccaccaggcgcacagcccagaagttgggctacgctgttcagcccggagctcgctgcgcgagggggtggacgaggagaccgggagacgaaggcgcggggaaggggtctcggtctgagctgagggggattgggagggtgggggcttgagttcccgcttgcgctccccagcagggggagagatgcagagcccgcgcccaggcgccggccgccgcggtagcagcctcagcagcagcctcagcatcagcaccggcgggacagcgacagcgggggcggcgcaggcgcactgtgccccgcggagcctgcagttcccgagccccgtgtgcggcaccgccacagtctgggcagcggcggccgggggagcgctactaccatgaactgcctggtcctcctccccagagctgctcatccgggtcgggctggagacacagtcaggggaccccgtcgccgccgccgcgccccctcttctttcggctcaatcttctcttccaccttttcctcctcttcctccaccttctttgcctgcatccccccctcccccgccgcggatcctggccgctgctctccagacccaggatgccggggggcaagagagggctggtggcaccgcagaacacatttttggagaacatcgtcaggcgctccagtggtaaggagagttgtagttcagaacacccccacctccatcccgcccacacgcgccccccatcctccccatcccatccctctcccaaggggggaggaggatgcaggcagccttacctggtggtttcatttaccagttgggctggatttggggtggggtggggtggcaatgagatggtgggggaaagttagttgcatccccttcctaccagacagactcaccccctcccacctgtccagagcccagaactggaggaaagaaaggggttggatagggtgtaggtacatctggaacatagagttgagttttgcttttatctttcttgttcttccttctcccacatttttccccaaagtgagcagcagggactgaccaaattctgagttaatctcagtggaaaggtttccctcaagttgggaatggctgcgaaagtggctacttaacaagatttaaatctctggaaaggcttttggccctcgtggtcacggggaaaggtgctttgtgccggggagagtagttgaggttgaacctaagaaagagttcagtgcttgcaaaatgggaagccaattactgtggacaaattggtgcttcaagtttcttcttgctatgtttttcactgtacattcatctatatatttcgtttgacttaaacatgagaaacgtagaagtgaagcagtaactattgtgcttttaatgcaactagaaaaaaatcaaaaagatgccatcctaccttgctactggcgttaaagttttcttgccttagtgtgtctttaaaataccatccatttatacattcatttcctacaagatattttggatgggaatggttatatatttccacattttaagaccttataaactttgcatcttactgaaatctgcgttttctacttgtttttaattcttttgtataattttaaacttcataagtaagatatgttgaatatctttttaagtttttccttcagaggctgttattttgacatctcttgcttggagaataatgagaaagacatttctgtatatggagtacagtagagcttggaacaaagcaatggaaatactctatgcagttccatagtgccttgtttattcattcattgaaacaatatttatttgggtgccttataccacagatactctgtggtttcttgggattaaaaaaaagtaattaatacacatcccctcttcttaagaggctccttgcctagttggaggcacagggaaagacagaggtacactgaaatatcaaataattaaataaataatgctttccctaaatggtagattagattatactaattcttagattagaatctcttttaagactaggcttgtaaatatttcctctgattttgagactaactgtatttaagtgtttcaaagtattttccccaaatatctgacttgttatttgtttttaatttgaggttttaaactttatttcttcgttttggccaatgcctgaaacaataaaagtctaaagcagtagtgttgtatttgggtcggaaaaaatagcgaatagggtctggcctaatattcttttaaatacctgtatattttttagttatataaattcataatggtaggcaatttttattcttatagattaccttcttgtattaagattatactaaacctataatacaaggggatattactcttaaaacagtttggggaaaatgtgtggattattggaattagttaagtatacaagtcttctttcagctttctcatcctcttgggttatttcaacttcacgcaatttggtctatgagagaacttttcagagaaggccttaaaacataaaatctgcagggttacgattgctctgctttataaagagaaagaacatgagaatcccttgactaaactttattaatatagcaactgtggttgaagcttcttatgcagactatgaaactatgagatagttttttgaatttttaaaaattgtagatatactatgaaataaagatttaccttaggtggcttagaaatgtctgtttctgttgcctccattttgtatctaccactcaaattaatgagtattttatcttttttacacttcatgttcataatcgtttcattggttaaatgtttctttcctggacaataccaagtgaaaatgaaaatttatctgttttggcacttaaatgccacctctaatcgcctatggctaactttgaataccactactcaaagaccctgaactgtttgaagtgtgttagatagttgtagtgagtatatatgcaggtgtgtgtgataaatactgaaaagtctcagtacctcttttataggcagaacctcagaaattgagaattatggtattaaattggtctacacattcacgggggaatatcccgcagttgtcatttctatatgatttggcagagaaatagaaaaatttatcctgagaaattgtttaattgagactaatagaaaattcccttcaggattctcacagatggatcaggtttgtcactttgaaggtttcattattcactaacttaacaacattgaaagtgaagtgttggcagaggtttagcaggaagagaaagaatagcacccagcactcccaatctatttaacaattgaagaaacagaggctggccttgtctttttacctgaaccccaagaaaagctctttctgatacaataccattttcttcttatgaaaaggtcagatcttacagtgagagtcagccaaacatagacatagatatagagagatacccagataatacacagtcacataggtaaacactcagctggtcaggcatccacccagaaaactgaaaagaggaatatcctacttcttcttttttaggatttgtctgtaaagtgtgtccaccaccctacagacagagaggaagcaatctaactctttttctctgtcttgcacacaaggagcaaaacagagatgtaggaaacaaaacaaaacaaaacacacagagcagagagaaaggggtggggtgggagagagagagagagagattatgggacatgcaagggaaatggacacaaagagaaaatgtcagacatttatttgtccatgggtatcaccaatgaactgaaatctcagccagttacaaatttaccagaacatttttttgatgatgtgaaacaaaaaagcaagaagtgtggcatatttgaatatcaattttatacctgaggatttcttaataaagttccaaactcctcagatgcagtttcccagaataccagcactgtattctgtactccagagtggcaactataacctatgctattatttcacacctcttgagactggatttttattttccttatttagttgactcagtctgttataagcgagcattgcaagttgttactggtgattcaaagtctataaaataaaataatgagggccattgagtaggatggatacacacaccctttatagccaaatctcaaaagaagcaaggaattctttttagtttaaagataaaagataagatcatttctagacaaaaggaattataataattcttagcatgtgattctagtaaatatagagaacattattactctaagaagttgtaaagtttaaagtataaatgctataggacggcttagacaaacttttggctagtacgatcaaaataagccattagtaagggaaggtttagaggactatgtggtgagttcattacagctgagcaatgtctcccagaaggcccctgcctcaagggcttacagactagatttgtgtctagaacattattaggataccttcctttatttaaatttcaattatttatgcaaactattaatctaaattgggctctagggagcaataaacttgtgggtagaggttaagtatctggaagaaggtaactgtttttaggacttttaggttaaaatttagattcaaaagacaaaaaatatttcaaagaccttcaacctgattttgtctttgggcagcacattttactcatatgttgtcttcaattccttagcaaataggcagacatgattagtttgagtgacagtaagctaggttgctattttgaaaattttaactacaaattaataccttttaactagaaattattattatttaatattttaagctttatgacaaattggaagtttattttagttttgtggaaaactagaagtgtttttctttttggggaaaaaaggggttcaggaaagaagaaaacagagaaggtagtattttatgaaccacttacctttcaagagaagaaactcagtatcctcaatttttcattctgcttgagatagctggttgcacaagcactttttttactcagctatctcttacttgtagaaaagtccaaaattattttcatgctgaattgacatttgtacaaactgaggtcttaaaagaaacctataagagaggaagcagaactagtgatctgtaaacaaaacaaaaaaggaataataacttttacaattagccaatttaaaagaaataatggaaaacaaatggacattattttggttgttgttgttataaagttattgacattttttcttgaaaggttttctttaatatctaagacactattcaggaaatactgataaaaccacacagtgtttttgaagcactggtttactcaggtcttataatgtaccactttaacatttaaaatatcaaagaggttgaaattatactgaccacttcctaaattatatttatacataagccacaagattgtcccttgcattagattcccacactgtgttatataatgaatgcagcacattgctgatagagggatgcttattctaagatactgttatcttcactagaaattgccctctttgtttatcttttgcttgattccagaagtaggatgtgtaagacatccatctacctaggcaccttgtaactgacttactaaaaggatcatataaacattatttttaatagaagggcgtagttatgattattttaattgatagcgactgagtagatttcctaaagaagccctttagtttagtcagtgtttatctttttctttccttgtgagtcacagccgagtttcttagcttggaggaacaatgcttctgcattctccagagtgtagcctaggaaaaggttgtgctgttcaccaaagtactgtagttagtatttaccacaagaggtcactctgggttctgtcacaggtgaaccaagtagttaatatttttctctttttttgttctcccacctcccccttcccccaccttgcttgccaccccccaaatttgactgggagggagtcaatgtagttagttggtgctcttggaagaaaatatctaaaatgtaagacatgcaggaaagttaaatgaaaaaaggtatgtattatattaattattagaatttattttagttgacagtgatcaacattttataactacacgaaagtgatactgataaaaattgtttctgtaaagagatggatttaaatacattttagactaatagagcattttctttagcagataaaattttatggtaatacgcaatttcagcatttcatatacatacagtatatgaaatataaagtcttgcagaaaaatgacctgtacataatgcttcatattgagccacttcaacagattttttctctatgagacatctttatataatttatattgaattggtgaagtagaatcagttcataacagtgctttaattttatcaaaagatagtttacagatttatagttacttcctcaggatgttatgtaatcctagtattttatttttacccaaattttaaaaattaaatacagagctaaattgtttaaaattattaaataatattttcaaagttttttaaattattaaactccaaaagacaggattgggagtagactgttttaagaggttttgtttcctcttagtcagtaaatctgaattttggtttaaggcaattcttttttctttttggtgggttagaaaccatatagcaagagatactttgaaatgttccacacaattttggttttaatgggaaaaattgaaacatgtcttaaagtacttttataaatacaagagacgtgttgtgaatcagataaacatggataacaaatcacaatccaaaaccagtggcaattattgttgtggaaattgaggtcaaagaaagtagtgttctagaaagtattctagaaaatggacatttatgaaacaaattcctttaccaatagcaaagcagaatgtaaaaaaatcctcagcattttccactaaatagtctagctttataatacatgacatgagtccttttcatcatttaaagataattaaaaagaatcatttaaatattcctattttatataatatagaaactaatatattagaaaggctgagtcttgaaatatatttgatcaaatggaggcagtaataactattgtcacatagatcagtgtgtattttagacatcattttagtgtttggttatatgtggatactattacctagtaaagagacatatttatatacattctagatagtagttttgtgatatattaggttgacaaaagaaaaaagaggaaaattaatgagcacagtaatttagaaagaaagtgtggttagaaagctattggaaattttattgaaaatagatttccctctctctttgggtctggtcccattacagaaatataactattaagtacaaagtcatatggatctcaaaagatacgcaatttgagatctgagcttatgtgcataatcataacagcttgtagatataaggacatataattgggaagtcatgaaaattttggtatatgaactaagctccctgaggatatgggtcatatcttaaaaagacttttatgtcctccactgtgcagagcacatagcagtaagtattcgttgaataaatgcttttttgatttttgtctcctaaagtaaccaagaccataattaattctttccccaagccaatgctgattaaatctattaagtgagcttgaataagtaattacatagtttaaactatttagttaatcaatgcatatatctgaaaacagaaaccacactgcatagggcaaatcagatggtacttctgagaggatgagaaaggaatatgaaatggatcccatgttcacttcctattccaaattgaggtgcggctgaaatattttctaccatttttgtttcagttgtcaagagcttgaaagctggactatttaataccagaaagaactgcttaaaaatttgtagattctaactaaattattttaacaactttgcagttagcagttattgatggtgagttttatccctgggaatcaatccttacctgcttaagtaccttctgagtgagttttgccttggggagcagcttacagccctgtgcagtatgcagcagaagaggaaaatgagttttagatttttagagactgcagggccagcctcaggttgccatatctaactaaaaatcgaacaactcacttggattgaggggaaaagttaacctttgtcctgatcttttctgtaagccctttttggtctgctggcatttatttttattttttaaatttgggggaaaattaaagcacaatgattttatttttatacatttacaagcattgaaaaaatagaggagttcctcaatgggggttaaagagtctcagaataaagactccgaaatacaacgctgatccttttgcttggctctcatgccctttctagttaattatccattaatgcaacaccattttattgagtacctactatgtgctaggcagggatctagcactagggattcataatgaacacagtgacaaaaacaatgtttctcctgtttttctgtggagggcatgtgcatatttataagtttctagaggcctgtattagagtcctggctctgacacttactagctcggtgacttaacttacttgtacctagtttccttatctataaaatacaagtaataatagtacctagtttatggggttagagtgaggattaagttaggcagtacatgtaagtacggagaacggtgcctggcacataaataagcattatatcatgccagtagttattattatcatttagttgtttaaatatttgaatgcactttctatagttgatgtttttaattcttagtcaccatttccttctgcacctcttttcaactaatttccgcctcctccataatgctgaaaattcctagaaaattatgagtgcgcattcttctcgtaaatcttaagatcttttcttggtccatattttttctgactttgcaaggtttgaaactatattcccctaccctctccaccattcatcttatagctatcatgagcttacaagccctgctgccctttctactggcttccctttttgttcctctcctcctccctcctctccttttccttcctaaagaatgagttgagtagtcccacaagttctcccttcaactttctttcttgcatctccatcctacttttcagggaaagtttgtcttctgccataatttaaactttatcttctctgtgccccaggtctgtatttccaaaggtatacaggatttctcttcttgtactactcaaaagtcatctaaaactcagtgtaggcagaatagaatttatttgcttttggcctcagattgacttttttttttttgtatctcccgtttctattcaaagtgtctttagtatttttgttttttactctagaagtgttagggtcatctttgactttccattcagtataatgttagtcttactttccaactagattatcagtccttagctttcttttgtgtctcctgtaagtgctgtgtgcagagtaagttaattcatgcccatttactatactgactcatcttaagacatgaagcatgttcataactgacatcatatacagccagtgtctctaactgtgatggaccaaagaaagaactacaggtcagaaggaaagagctgcctcattaactgacctcagaaactaaaggtctccaagagggaggaatgacatgtgtgacatattccccttgctcgttcctaaaacagcttctgtctgtactagagcaaacatcatcaaggtaactggtaatctttctggaactctatgagggcatttccaaggctcacagagcagtgctctcaactgtgctatcaggcacagtgctgggatggaaagagcaaaggtgttgagttcttgacaacacagactcctgtctagcccttactcctggtgacacactgaggctctccagaattaggacacctaccttacagggttgctcagaagatttggtgaagccccagatgtagtggatcatctcagtaaggacttactctagataaggtaaggtaggggagattttttttaacctgaagaaagcaagaaattaagtagttgagaatttcccagcagaaactggtggatctgagcttaaaagcatttgagttcaatttactaagggcttaccttggagagaatactaaacccaaacaaacaacacacctctgtccatcctcgccccaaacaaaaacctactgcctagagcaaaagaagtatcagttctgcttacttcaatacctgataattcttggacaaactgaggaataaagcagaaacatcagcctcttcttataaccatcctagtgaaatcctgccaaaggagaaatgaattgaatttgtagctctgtaactctttcttgaacaattagctcctgttacatagagtgtagaaatttaaaaacatacaggagaaagccttagaaaattaactggattgtgaatgcattcagaaaagcctctttgtgtttttctatcatgtgtgcaggttggaccagctttttaattgaagtttttcatcatttatcttgccattagtgtttaattgccattaaagggtaacttcaaagaaaatatataatctcctcagaaaagatgcagtccatttgcaaaaatctttatttgtaggatttaaaatgatgcttaaacattaaatatatacttttttcctcttataaatacatcttgactgatttagcttttattccccaagattatgtaactagcataagtcttatagcttcaggtattttaagaaatttcattgcaatataatttagtaaaatgttatcattatatcagggtgaaagttttctgttgtattatgatgttatgcatcaaataggccattattgcaattatattttgcttctaatgattctgaccagtttacattttagaaactcattttttcatgaacaaaacaccaactattaaaagtagaaacattgaattgttaaacattttgtggagaaatcttttttaatagcaaagttgctattattcctaccactagaatttcagaaatatatgttaaagtatctcatgcattttgaaccactgtagctggatgaaaaaatgaagttaatgccatcaaagaaacacagacacttaaaaaatgtacctttgatcgtgaaggagatagaaagtggaagcatatttttatctttcatgacacctgaacaagtttgaataaattaacagatatttttgcatatttcaaactcctacagtgatggtctgcttaatgttgccaatattattgggtaataattagtgtcattgtggaaggtacgaagtatgtctgcacatttgctatattgctagaggattgttgtaggatacaggtgtattttgtaagaacatgaaggagaccagccttacattctgtcattgacatagaaatgggcagtgcacatacaacaaatcaacattgtggatgtgggcatgattgtgcttttgtttagccatctgtaccaagattttatttaacccaaatacaattgctatatatgcttcagatttttccactattactgttctatgaaacttaaatagatctataggtatcattcatccagaagacacatttaaaaaataatacaggctgggtgccgtggctcatacctgtaatcccagcactttggaaggccgaggcaggcggatcacgaggtcaggagatcgagaccagcctgaccaacatggtaaaaccccgcctctactaaaatacaaaaaattagccgggtttggtggtgcatgcctgtagtcccagctactccggaggctgaggcaggggaatcacttgaacccagaaggtggagattgcagtgaactgagattgcgccactgcactccaacctggtgacagagcaagattctgtctcaaagcaaaaaacaaacaaacaaaaataatacagactgcatgatttaaattcacaagtttctagaggccattcaaagcgggggaatatctgcttagcaacacccaccccctccttttttttctttaacttattgccaattccttgaaaaaaaaaaatacctgccatggtccttatctaccttcttaacaatgtctaagaattgctttataactatttattgactgactgtatgactttaaataggaagcagaattttttatttgatatattcataaaacatttgtgagtgtacagtaatgaacaaatagacacggcccctgacctcatggaactcagagtctggtaggggaggcaggcgttcaccaagcctacatcaaatatataattacaaattgtggtaagcattttggatgaaaaggggagggtttgatgatcgtgtgcattgggatctaattccaattgggaggcctttctaaagaagtagtgttaaattgatacctacagtgagaggtaacaagaggataagtgggaagaagaatatttcaggcaaagagaaagcatgtgaacattcctaaggagaaaaagaaaatgaatggctaagtttgtgaagcttaaacactagcgcagctagattgccttgggtgaaaccagaagaaagacaggagataagggcgagtgacagttaggggcctggctgttcaggggaaagattttgtgttttattcctagtgcagtggaaaaacctcatagtcccaaaagctacttccgtaaaggttgaggggaggaggagaaagagtgggagaccagttaggtctggtcttgcggtagtcgacgcaagatatgatggtggtctggcctgggatggtagtagtggaaatggggagaaatggatgtatcagatatgttttgttggtagcattattaggatctagtaatggattggatgacatggatgaggtgtgaaggatgactcccaaggttttggcccaagcatttgcgtgcagatggaggtagggaagatatccttgagatgggaaaaactggaagaaggccacgcttggaatgaaactctaaagaccatctgcatcatcgctgtcatctagctcccttttcattcccttgaagaaaagaataatgcagccaaagacagcttagctcaatataagtgtgtacagatgtgatttctgcattccatttgcagagttcagaaaagatccgggtaattagcttggacagtctggtcattcttgtggattagaaacatgtagtttcagattttgataagaaactgatttggataagaaactaagtaaacttttgaataaaacccaaaccccaaactaaacctaactttataataaatatttgacaataagcattgttgaaaaggcctctgcagccaactccttttagaaaaagttagtgattgctacatggttttaatgggtcacttttgcttcagattttccttcataggcatcgatttttggaatgtgtgttctttgaatgggagcactgtgaagggtgggtcgatacttgaagctgcgactgcctgcactgattcttcctcactgaagccccagtgatctggaagagcagcttgaaatagcccttatctgggtttgtagtcttgcctgcacttcgtttctgttggaagagctgtgtgttccggggtttgagggctttgagagcgagagctgtggtttctgggtggtgtccttctccaaagttagaactacatgaatacagtcagagggaaaacgcagctgactttcttcacatgccgtcctggatcttggcaaatctataaattagtgaaagttttttttttttttttgtgaagtcctttttcttctcaactcctctccattttctttgttcctcagtactctaaaatttgtgtgtcttattattattacttaaaatacttaaaaactgctagtcctctgaaatatttctctctgggggtaatttgcataaaaaaggtaaaaaggagagggagccagaggcttaaccccctaaaaagctgttccaccctttttttctacacgtcttaaaaattgtatatatataaggcctgtaacattgtttttatatacatataaatagtgaaatgattatacagtccagcaaattaacctattcatcatcttccatatttacccttttgtatgtgtgtggtaagagctaaaatctctcttagcaaattttcaacatacaatacaatattagtaagtacaatattagtaactgtagtcctcatgttgtgcattagatccctagacttatttatcctacataactgccagcttgtatcctttgatttctcccatttccttcccctccccaccacccttgttaatgtacatgagatttctggatccgagaaggatatgattttcataaaaacaaaacaaaaaccagtccgatcatgttggagcagctcgaggaaatcattttttttctcctggaattgctatagaaagggaggaaacatcccacatgctcttatattgcctttattgactgaatataaccttcctttgtccagaattttttatcagccaggattattgatcccatgatttgtgtatgaactcctttaggaattaatatgtagtagtattaacctaagtgtagttattttcctgttgtctgaataaattgctctataaagaggaagtgcctccttatattaaaacaaaataaaacaaaaacttagcagttcagaaatatagtctgacagaatagaaagtcttagacagggaggcctggtcctgtctttttcccctactagatactcttttccccctactagatactcttttcctatattggatgagtctttaattttcctggtctgttttcccatccctaaaagaaaggaaaagcagaagatgggtgcattttggggtcacctgaggatcttgttaaaatgcaggttctaactcagaaggtctggggtgcgtcccaggttctgcattgccaataaactcccaggtgatgctggcccatactttgagtagcaaggcactggatcaaagtgtgccagacttggctgagcatgagacttacctctatgtctgtatttttacattcacctctgagggagtcagttcagagcatctgcattagaatttaacaatctctatttttgacactggtgacaagattctattgcagctgccagcatttaggaattattgctctagattagtgcttctccaccctggctgcacattaaaactacctgaaagacttaacaataagtattgatgcctgggttctactcaagaccaattaaaacagaatctttggcatttggggacggggatgaataactcctaggtggccccctccaatctccctcaactttcactccactcaactgtgcagtcaagattgagaaacactggtaataatctctaggggaccatttggaattaagggtctttgattcgtttttaaccttctaacccttgaagaaaaagtgcttgttttattttatgttctcctctgataggatactgcatagtcttgaatgaatataatgagttgttttcaagtcttagccccttgtggatgcattccagaatctgctgacttgtgaaattacagcttctgaaatccttgcctcctggtggggataatgccctggttcttaggcacctcattcaggaccatattgtgtgtctgatccctttggagatggaatgtttgtaaacatctttaaggaatgaaacaatctggatctcaaggaaagttcaattttccagaattcatggctcaaggtcctttaagagctgtgaggacaaaccagaactggtttccctgtcaagattggttgataagaatgggtgatggtcactgaaattctgggcaatttctttaaaggcatcacttttccaaaacttctaaaccctcttactttctagatttgtaactcatttgttttcaaggaagttattcctctgtaatcagatttcttttcctcaacatgttttaaagctaaaagaaattaaaattttctgggaagcaattttaattaatttgctattctgttcttaatatttattaataatatatttttcatttgttgtaataagaattttcatgactacagggaaatgcaacagttatatgaatatttcatatacatagagagtgtttcaatgaatagagaaatttcaaaaagaaacctctggattgttaatattcagcaatttctatctaatttagccttaattaaaaaatctgtctccctctcttcttctcatttttctcaagtattttattctgtagtttagttcttagtgataaatacaattttataggttttggtttgcaggtcaacatttaacagtttattttttctaggttcttctcttacatacatacatacatacatcccccccgccacaaacacaccaagatacctctgcatatacaactcagtaacttaatcttgtacataatagtaatagcttataaatgctttttgctttaatagtttataaagactgcttactttatttagtctccgtaactatccagaatggtgggtattactgtcaccagtttgtatatcaggcaaccagtagcctaattgaaactcaccagcttttttgcagaaacttacttggtggtacggagaagggagaatatttgggtcagggatccttgtggtatattgattgttagaaatgtttaccacttgataacatctcatataaagtagacttagcaccatgtctgctttactcaactacggttttataaaacgttcagaaatggtaaaagcagttttcatgtttgtcctccataaactcagagtgcatatagttaaaatgcaattattaaggcctcgaggtaaggtctggtgagcacagtccaatttcttaactctttgatggtctcaattactggacttaaacttcaagtataaagatgaatggagagcatatttcctagactacctttttaaaaactttaagttggtttgaaaaacactctttgagttgttaggtctgaggtctaattgactatgtgagcaaatactttaggatatacctggcaaatatgtgaattgtccatattctatattattggttaaaatgtagatattttgaaaaatgggattgaagagaaaagcaaagtcttaattacctacttttgattctaacttctgtgttcttctccctaaacaactctgcttccagtctaacaggaagagttagttctccctgcagtgagttgctttaggacttttccttccttcctagtcttcctacttttccatctaaagcaaaaaaaagagacagaatttcctagactacttaggaagagtttaaatttgcaattatttcagccaagaattagaatttaaggaacatgtgttctagttgccacttctgaccttgggaatcgcggctttgtgagtctgtgacttattgcctgatgagtgatcagtgaaggaagaaatgaagttttcctgattagggataacatgtacaacatcaggcccaatacctagcatagagtaggagtccactaatggttgcttttgttattaattttgttactacacagagttactcaagtgtaagtgaaataacatattaacagatgggtagtgatagctggaccctgctgagctggagtctgaacgttcccattgtagagctgttgaaaatggtatgatgggggcagggtaatgtttttaatggcagagttcatatgaaatagttagaatgatccaaatcctaacaaatgtcttgaaaactagtctgtttataagagagagagagagagagaggtttgtaaagcctttgcagagttgtttaaagcatgcttttaaaattgtaaggtacaccccttcattgggctatgaaattgatttaacaggtcttgattaatgcagccaaaattgaaataggttagaaattgtagagtacctctcatgtagtgagtaaatgtagtctgagaaattttttcaattgtgtattgtgtatatacatgtctgcacatatgtatatacacttgagtcactatgtaaatattatttcttactatgagctttaataaaaaaagtttgaaaaacactatttgttagatcagccggcccttaatgtttacagtctttcttttttaagcctgtggggtcctttttcctagaatactagcaattcattcaaccaataaataattactatattgcaatacttttcttaaaaattttttaaaaaatcaacaagtaaaaattgaatatgtttatagtatacaataagactttgcctttctcttcaataccatttttcaaaatatctacattttaatcaataatatagaatatggacaattcaagtatttgccaggtatagtataccctaaagtatttgctcacatagtcaatcagacataacaactcagagtttttttttttttttcaaaccaacttgaagtttttaaaaagatagtctaggaaacataatgctttgatatatgtctacattgtggaatggctaagtcaagctatttcatatattcattacctcacttgtcacttttattttttgcagtgagaacacttaaaatctcccttggagattttcaaatatacaatatattgctatcaactgtcattaacctgatatatagtagatcactcaaacttattccttctgtctaactgaaatttttgtcccttgaccaacatctccccaatgtccccacccttcagcctttggtagccaccatttttctctgtttctatgagtttgactttttttacattgcacatgtaagtaagatcatatggtgtttttctatgtctgacttatttcgcttaaaataatgtcctccaggttcatccatgttgtcacaaatgacaatgctcctttctttttaaaggctgtataatatttcattaggcatatataccacattttcgttattcatctgttgattggcacttaggttgattccatatcttagctactgtaaatagtggagcaataaccatgagcatgcagatagctctttgacatgctgatttaatttcctttggatatttactgagtcgtggaatcgctgaatcatatggtggttctatttttaattttttgaggaacctccatactgttttctataatggttgtactaatttatattcctaccagcagtgtagaagagttcccatttcttggcatcttggtcagctgttatcttttgtctttttgataatagccattccagtaggtatgaggtaacatcttattgtggttttaatctgcatttccctgatgattagtgatgttaagctttctttcatgtaactgttagctctttgcatttcatcttttgaggaatgtctattcatatcctttgcccatgttttaatctggttatttgttttcttactatcaagttgagtttcttatatattttgcatattaaccccttatatgtttggtttgtagatatattttattactccatgggttgtctcttcactctgttgattgtttcctttgctgtacagctttttagtttgatgtaatttcatttggtaatttctgctttagttacctgtgctattgaagtcagacccaaaaaatctttgctcagaccaatgtcttgtagctttccttctatgttttcttccagcagttttatagtttcaggtttgatgttgaagtcttcaatccattttgagttaatttgtatatatggtgtgagatgagcgtctaattttattcttctgatgtgggatatccagttttcccaacatccttgattgaagagattgccctttcctcattgtatgtttttggtatctttgctgaaaatcaatggtttataaatgtgtggcttgatttctgggctctctattatgttttatttgtctttgtgtctatttttatgccagtaccgtgctgcttttgtactataactttgtagtagattttgatatctggtagtataatgactctggctttgttcttttcgttcaaaattactttggctattggggtcttttgtggttccagatgaactttaggattttttttttctgtttctgtgaaacatgtctttggggttttggttggaattacattgaatctgtggattgctttgggtagtatggacgttttaacaatattaattcttccagtccatgaacacaggatatatttccttttatttgtgtcttcctcagtttcttttatcaatgttttgcaatttccagtgtatagatctttcaccttcttggttaaatttattcctaagtactgttttttttttttgttactattgtaaatggtattgttttcttgattgcttatttggatagcttgttgttatagaactgtttttcatatgttgatttcatatcctacaactttactgaacttgtttattagttctaacagttttttggttgagtctttagtttttttctacatataagatcatattgtctgcaaacagagtcaatttaacctctttatttcctatttggaaggctttatttcctttctctttccagttgctctggctaggatttcagctagaaattgaacagaagtggtaagaacaggatccttgtcttgttcctgattttagaggaaaaactttcaactttttgtcattgagtatgatgttagagcttgttatggcctttattgtgttgaggtacattacttctaaacctaatatgttgagagtttttaatcatgaaacaatgttgaatttttcaaatgccttttctaaatctattgaatcaatattatagtttttgtccttcattctgctaatgtggtctatcatatttattgatttgcatatattgaacaatccttgcatctcaggaataaataccacttgatcatggtgaattatccttctatgtgttgttgaatttggtttgaaaatattttattgaggatttttgcatctatgttcttcagggatattggcagataattttctattttcgtagcttccttgtctggtatcagggtaatgctggcctcctaaaatgagtttgaaagttttctctcctttttaattttttggaagagtttgagaaagattgaattagtaagcagtgaaagtatcaggttctgggcttttctttgatgggagaatttttgttagtgattaatctccttatttgttattggtctattcagattttctttttcttcatgatttagtcttggtaggctctatgtgtctagaaatttatttcttcaagattagacagtttgttggattttaattgttcataatagttatgatcctttgtatttctgtggtatcagttgtattgtctcctctttgatttctgatttttttgagtcttctctctctttccttagtatagctaaaggtttgtcaattttgcttatcttttcaaaaaaccaacttgtagtttcactgaccttttaaagttgtttttctagtctctgtttcatttatttctgctcaaatctttattatttctttccttctactaactttgggcttagtttgttcttctttttctagttcactgagctataatattagttgattatttagggtcttcttttctcatgtaggcacttgttgctataaacttccctctaaaaacgatttttattgcttcccttaagttttggtatgttgtggttctgttttcatttgtctcaagatatatatatatatattttttgagatggagtctcactctattgcccaggctggagtgcagtggcatgatctcggttcactgcaacttctacctcccgggttcaagtgattctcctgccgcagcctcctgagtagctgcaactacaggcgtgtgccaccatgcccagctaatttttgtattttttagtagagacagggttttaccatattgggcaggctggtcttgaatgcctgacctcatgatttgcctggctcagcctcccaaagtgctgggatcacaggcatgagcaaccacgcccagcctgtctcaagatatttttaaatttccctttcaaatttcttccttgacccattggttccttaggagtatattgttcaatttccacatatttgtaaattttctaaaattcttcatattattaatttgtagctttataactttgtggtcagaaaagatactttatatgattttaattttcttaaatttgttaagacctactttgtggcctaagagttgatctatcctgcagaatattctgtgttgagaacttcaactttctgtacttgagaagaatatgtattttactgtctttgggtggaatgtttatatatctatatctgtcaggtccatttggtttaaagtgtagttcaagtccaatgtctcattattgattttctgtctggatgattatattgaaattcctgtatgcagactaggcatataatttataatcctgaggaatatgtgatttatatgaaaagacaaagttagcatatatggaatatttagaaagacattatttaataaattttataataccaattatataaaaagagaaccctgcaaaaatgtattagttcattggcttattcatataatcaaccattaaattagcatttactatgtgtcaggcactgtgctaggcaatgagaaatcaaatgtgagcaaaaacttacatgggctctatccctgtagagcttataatccaataggcagataaacattaattttttctttttttttttttgagatgtagtcttgctctgttgcccaggctgtagttcagtggcatgatcttggctcactgtaacctccacctcccatgttccagctattctcctgcctcagtctcccgggtagctgggactacaggtgtgcatcattatgcccggctaattttatatttttaggagagatggggtgtcaccatgttggctaggctggcctcgatctcctgacctcatgatccacctgcctctgcctcccaaagtgctgggattacaagtgtgagtcaccgtgcctggccagatatacattaattaagtcatgacacaaataggtgtaaaactgcacttgtgaatggctgtgaaggagaggtacatcatgtcaaaaaattatataacagggatataacctcatcagcagtcagggaaagattccctgaggtcatgtcaattgagttaagatctaaataaatgaaggtgacaaggtgaggagggaaaggaatggtatttaggcagagatgatggcaaataaaaagtccttatgctgggagagaacttggcttttacaagaatataagaaaagtcaatgaggctattgtaggcgagtatcgtgggcaagggtcagagtgatgagaactaaggctaggcagactttgaagtcattgtgggccatggaaaggatttgggtcttatgagagccaaaagaaggatgttaaaggagggaggaaacatgatacaattttagttttttgaaaaacaaacaaacaaacaaacaaacaaaaaactcgtttggcttcagtataaaaaatccattgaaggactcccacagaggttctgagtaaatcagacagttacctgagtagtctaggggagagatgatagagggctggagttgggtgatgatcatggagatgaagagaactagagagatttgaaagagttttaggagataaaagtaatgcgattggtaattaattagatacgagggtaatgggataaatgttgattgatggctcccagattactggctgataaaattgtatggatggtggccccattctctaagacaggaaacagtgggaaagtacctaatttgaaggagtaaaaagtcatgatcatgttatactgaagcacatttaagatagctaagaaaagaggtcaagtttggatatcaagatcgagagtttacagaagaggtttggtttggagatatacaatcatgagttactgaatctatggacatagataagcatataagagtaaagaaaggagaggacttaggcactctaatgtctacttattggtaaagaaggcactctaatgtatacttattggtaaagaatggtgagcctgcaaaaaaactagaggaatgttcagagaaacaagtgaatggtgttctgtgaaagccaagcattgagagacttttaagaggggagtggttaccaacgcttctgaattgttatgaaatgagtgaaaagcatcctgtgggcttggcgatagggagaggttattggtgacttggctgtcttggtggagtggtagggaagaagctaaataggagtgagttgagtgaacaggagctgaggagatggagtcagtgagaatagacaacttctgtggaaagtttgtcctgtgaatggttggagacagatacggtggcagccagaggagatgtaggctgagtggtattcagtgaatgtggcatagaaaatgtagagttgagatgattcttaagtgttttgatgggcaaagagatgtcagaaaagtatttcaagtgaatagtgggcagcatgaatgagcagattttcggaacataatgaagagactgacctaactgtaatagtatagactttaggaacaatgggaaacatgtttgtataggtagggaaggtgagactggatttcagagggctttgttagcctcggaaaggatttgagatttgattatataaacagttgggattgttgatctggatgaagaatgataggatacaggaagggtttcagggagacaatttagcattcacctaatcacaagactgaacattggaatgagttaaggcagggataccatgtagctgtatggcctgccacagttatctagtcatgaagtggacagcttatggattagagagggtaaactggcttgggctaaggcgagaaagaaaacaatttttgatggtcatattaaaaaatttatagttgatactataaataaaagaaaacatcatttatttatagaggaatttatactttctgaagtacttttgcagaaattagctcattttgatttctaactgccctaggtaccacagaaatgtagtaataccatcctcataactaaggttaagctcaagtaccattgttttactaaaacttctgattctctggtcagacggagttatccattgtcctctttgtgtgttttaaaaaatttttatgcagcaaaatgcccagatcttaactgcacagttcaatgaattttgacaattgtatacacctgtgtaacgtatacctctatcaagatagagaacaattacatttgccagaaagttctttttatcttttcggtcacttcctccaccattccctttagaaatcattgttctggtccctatcatcatataatattagttttccctatatttaagcttcatattaatgaaatcaaacagtatacctactttagtggctgttttataatgtttttgagtcatattgttgcatgtgtcagaagttttttgttccattttagagctgagtagtactccttgtgtaaatatggcacaatttctaatccattctcttcttaatagacatttgcattgtttccaatttttggctactgtgaataaatctgatgtgaacattttcctccaagtctttttgtaaacatatgttttcatttcacttgcataaatacctagaagtgaaatttctgggtcatagatacatatttaactttacaagaagctgttttccaaagtgatcataccattttacattcttgctagcattttataaggagcactagttcttgattctcatcaacaatgttgtattgctaatctttaaaactactctagtaattgagcagcagtatatcgttgtgctttcagttcatgtttcctgatgcatgatgattgtaagcatcttgttcttgtgctcattggctgttgtttctcttttctgtgtgtgaaatgtctgtttaagttacttgcttattttgatacttgggttgtttgttcttttgtaggaatattttgtattttctggataagagttctttctcagatacctgtatcaaaagtattttctcccaggctgtaggtttccatttcattttcttgagaatgtccttgaatgagtagttgacagtaattttgatgatgcctaatttatcaacattttcttttatggtgattgctatatgaggcttatataagaaatttttgtcttcctcatgattgcaaagatttccttctatgttttcttctagaaggtttataattttcccttttatatttacatctatgacccacttcaaattatttttgtgtatgaggtaggggtcatgtttcaatttttgctcatatggatatctagttgtttcaataaaattcattgaaaaagactttacctattcagttggcgtggcatctttgcaaaaaagctgttgacgttgtatgtgagggcctgtttctgaactcattttgttttattggtctacttgtctgtccttactccatttccacaccatcttaattactatagtttacttaattactatagtttacttaattactatagtagaactttgttctactttttcatattttatttttaactactttaatttgcattttcacaaacttttataatttttcaatttcctcaaaaaagcctgttgtcattttcattgtgattgtattgaatctgtagatcaatttgcagaaaatagaacactttttgatgtggaacaaaagaccaagaaaggtattcctactgtagcttgtttatgtttatctctcttgtggtttactgagttgctagttttcattctatctggaaaaattttagctatcatatcgtccaataacatgtgtgctctcttttgtttttttttcagactcaactacatatattttagattgcttgatattgtcccacagaacatgtcttcaatctttttctcttttacttcagtttgcaatagcttgtattgatgtgttttcaaattgttctttcttttttagtgtccaatctgctgttaaaccaatccaataaatttttaatttcagagattgcattatttctgtgtttacctattgacttctttttctactgcctacttttttccatagtaattgtagggttttccatttcttgcctgtctaataatttttgattgtttctgggacattatatcaatacattgtagagatttgggatttcattgttttcctctgaggagaattacatttttttaaaaatcaggcagttaaattactgatggatgaccttgatcatgaagagacttgattttaagattatttttcgtgttggtctaatttctacattttttattttagtcccagggcatatccgttcatcctatgacttgtttcttactcctaatgcatggccttctctgtttagatggaaggcttgaggtgtttttcaagcttctctagcttgatgggacttgaactctgaaattcatcttctaccttcggggagctggtgaaatttctatccatctctttagccctttaccattgctgtctgctggattccttattgtctcaccctatgcctgcccagttttggccacaagaaggatttgaggtatattatgcggaagtttatcactccatcaattaaaggatttccccaactccaagttgctctgccacccccaaattgtgacctttgactccttagacttgtaagacacttctgcttgagctctttcacaccatgaacttcccaaactggcaagtgctctcagcggaatagacagttaaatgactatctcagctaataaagcctctctttttcaagggtttatcttttccagtttgtgcctactttccgttgcttcctagtggcttcaaacagattttgcttttcatattttgtcccatgcttctttagtatctattctggcagttgtattttgttgttacatatttgttttcaacatacacacttattgagagcaaagggtgtgttttactaatctttattttatcccactgtttgacccagagcagttttttatacagcaactacttaataaatgttaaattgcattattatttttatgaagaccaattatgaatgaggatttaaagtcttctaaaaaatttgttatatttttagtatactaccctgagtatgagttcaaaggaaattttcttaggtgaaattttgaagcatattattgctttaaaaatttttacttttaaattatttatattaaaaatgtgttcacttatatattttaatattattttaattttaattcattttaatgttgacatataacatgtggtttacaaaactgctaaagttactgcctaatatgattggattttcaatcattttatattaatttatacaaaagcaaacctacttttctgtgtaaaatagaacaaaaatatctcttttatttggaatactgatagtttctaaattatctgtattatgtggttgaaaatatctttgaataattttaatttaaaggaagacttttaaattctattttaaattagacttttcaagattagtctaatggacaaaaaaattgttccatcatgtcagcaatatattaatataatttttgcagggggtcatccaattttcttttattatcaacttcaatattctcaatttgtagggaagtgaccatagccctaatcttaataaattaaccaatttttaggtgtaatttatagtcattaacattatttattactaactacactttgatttcatagcttagggtatacttgaatggaaagaattattataaactggtttcgtttaaatggaatttttagtttgtatataaattcgatatttattgcaggtctcatgatcatgcaaacctggttatgtcagtttcaagaacaggttatattatttgtacaattacaaaccatagttgtatgtgtccatctttataagtttgcctttttgattacttgaaataagtgcattgttgaattaagctaaataacctccttttttctcctttcttcttcagaatcaagtttcttactgggaaatgcccagattgtggattggcctgtagtttatagtaatgacggtttttgtaaactctctggatatcatcgagctgacgtcatgcagaaaagcagcacttgcaggtaggtaacagaatagctaagtaatcttttctgaaatttaacaaaaatctgaatgtaattaaaaggcttaagcttacttggactcccatatacaaaccatagagttaaaaattatgttagaatattagggagactaaattatcaatggaaacacatagcttaagagccactggtgagaacttttgccaaaagaaagatttgtatatatctgtgagttaatcaattcattcaataaatattttttgatgacctaccatgagccaggaatagtctagatgctgagtaatcagaggaacgtcttgtatcagggaacaacttgtggcatgtgatctacagcacctctggaacaactaaattgtcttgaataaaacagagtaaacaccacctggccaagttaaacatggtccatgagaatgtaaagaacataaaataaagctcttatatcctgtgtaagccacatgtacttggtaatggtacattgtttgactcatgtacaacagaatctgacatttatattattataatggttctttaaacaaatatgccatttctgtgagcttaaagagaatattaagaaaaaaggggatcagaaaaaagaaaaggaaactatatataaggaactaatttagaacctaaaacttttcacaatatttcagtaaggccagatgggatgttttttccgtgagttaatttttctttaaagctctcatttaactaagcactgaaccaagttattttagaactacaaggaatctgattttttttttttctaggccaaatcctctgtttttcagatgagaaaactgaggtagagctatgttaagggacttgcccagagaaatagtgatttgttttttctacccattgatgctgagaagcattatatatatacatatatatatgtatatataaaatggttaaatgcatatacagttgaccctggaacaacactggtttgaacagtgtgggtcacttataggttaattttttcaaccaaatgtgatcagaaatatagtattagagaaatacagatcaaaaatatgatattcaaggggatatgaaacccttgggtacagagggctgactttttatatatgtgggttccacagggcgttataactgcaggacttgagtgtgcacggattttgatatacgcagggatcctggaaccaatcccctgtgtatgactctctccctctctatgtatataactgtttatatatctgtgaattaatcaattcattcaataaatattttttgatcacctaccatctaccatgagccaagaataatctaggtactgagtaatcagaggaacatgtatatctgtatatatacgtacatacagagagagaaaggcagagagagagagtcatccatgttatacagaagggattggttgataactctctctttccctctctagatatccttcatcatcatgaaatgtagatattttatattataccattgagtttaaacctgactgcacatagcaatcacttaaataggttttgcaaaacagattcctaccccgcttaaacctactgaattagaatcagtaggtgattctgaagtgggtgggtcaagcagggagtcagtatttttaaccaacagcttagatgattctggtgcctatccaggcttgagaaataatctgctcaaacattctcttccttaatctatgctcctctagccatcctcatttttgcctctactgaaggcattctcatattcattcttcattcctaggtatggaaattggtaaatgggagtgatgaaaatctgtggcttctggttgagagggtccctttgctagcactgatatcgttgggccatattaagcattgctcctctcctatcccccagaaggcagtttaagttagaaaaagctgagtttcatggtagacgttatcctgtggaacaggtccatagagagttccaggcaacacagatatactcacactcgcatttcttattcttggactgctgacatcccgtcttcatgccaggtttatctcagatctcatctacctgaaggtatttatgcttccctaagcaagacaggtttttcccttctctgactcctcatagtttcttgtgtatatttctgttggcatcatcatttggccttaaactaacttgccttatcccttgggtttttattcttattgctttattgcttttgttgccatttttgagaagtattactcttcatatctggatctattttcagtcctgctctcatcccttcttgtgtcccatgtatttgccctatccctggcctattttctttggcaagtacaatttttcctataaaggattcactaagaaaataagtgctggtgtgttatattagctctttgctcctatgaaagagctgcttttcttctaacacaagtaccagattgtaagtgccttaaaagtagggtctccatcttgctcacttttgtatgcacaacaggacacaagacagtgtcttatgtcagtatttattgaattggattggcttgttttgcaataaaccgtaacctaggtctcacatgctctggatagcatactgttatttcttgtatttcatcctgtgttatgacatttgaggtgggagagttttggattataccatgctttttaactgtataaaaaagtgtttgagtctttccccaaattgtctttacttatcagagacagtgttttcaaatgatcatgttcttaatgtaaacaattattacttacttgcataaaatgccagatgtgttttgttaacctaaaaattgcaaccagtttaatgccctcacagaacaatgaagactagcatctgatatatgaacaaatatctgacctttatcagtttttcttggaagcatgatttattttaatgtgttcttcttttaaacttccttattctcttttaaaattaaactatatccattttatgtttgctgtagcattatttagaagactgaagacctggaaggaatcaaaatatccagtagtagaagtttagctacatcatatgttgtatatactggaaggataatgacactggaaaaaactaacaacatattatcaagtaaaaaaaagcctaaaatgaaataaaacaacaaacccaaaagcaccccccaagcagtttataaaacagtgtttgcatcatgactcaaattcttttacatatcgcttttttcccatttcttgaataaatccagaaaagcctttaagtgtgagacacaaaataacagagagagaaaaaaagaaaatgaggtgcacatttagaaacacggggttgatggctaaaagttattatagtgtgtggaattactgacttataagtgaatatggagataagtatttgacactgagaatatccttgtaaataatttaaaaattttgcttatcattataagtttttagacagacataagagaataagaagctacaaagcagtgagcttcattttatatgggaaaatacaagctttgacactatatatctcagaaaaaagaatcatttttgtatccaacttgcattagatgaattaaagtctatagggttaaagtggcaactaggtaaatgattacatgccacagttttgaatgttcaaaagtgaattgttttatggtaaaataaaaacacattaatttgtgtttttataatatcaagaggctaatatttctttcttctgttttcttatcttttttcttctttgtccttctcaacccctcccacattggaccagacacacagaatcaaattaaacatactcctcagtttgtcacaatattgtcattttgctctctctaagcaaggtctctctttattttattttatttttttccttttatttcttttccctttcatcccatcccccttgttcctcttatggttattaattctaaagtgtgtttattgtatgtctttctaatctgtcttctgcttgttaattaaatatgtgtattcttgaaatgatattgctttgcatatgttggttgttaagatctatttaattcctaccacactgtaatatttatggtttcttactcttttcattcaccattatgtttttagacttctttgtgtcaccgtatgatgatctattcatcatgtctgattgttgtctaatgttgtagtgtcttcacagccttcgttctatttatacattctagtagtcctggaatctaactttgacactttgctacctcaaacaacttggaaataagaatcgtcctacacatcttcttgtggccctgtgtgagacgttttctgtctctatccccagaaatgggattgctggataatagaatatatgcagagtttgtaaattaactgctataagactgttacagagtagccttctgtttccattctcagcagccattagtgaggattctggttttcctacatttttgctatgtcataatggtactgaaattcctatctgaaaatatctgatgtgtgctaggtattgtctcatttttgttttaggtaaaattatgacactatgacactttcggatccctaggaatttcaaatgttgtccattttactgtggacactgcattttccacgcctttgcactgttttgctgtttattggaggacatgaaaagtatcgcatgtttaaaagaggttatagactttgggagaatgacatttaaaagcatatgatcttatctcatgacctgtagaagctctgacatttgggatatactgtcatagattaggtaggaaccactttagcattttacttctaattaacctgaaacttttaagagcctattctgctgtcattttttgtttttgttttggatagaggggtgagaagaacaatcaggtagtttaggtagggtggattgaggggtagatagatgctctcagatacatttttttgaaagaccatttacaatcccttatccaaccccatcaagttagacaatgagtcagagctattaagaaacagtttattgggcagatttcacagcagttttatgaacacaggattatctcagcagctaccaagagcatgtgacacatgatggatgccagtcagtccggctccatttggctgagggctgtgcttctcatggtgagactgatgaaaagtgttgaagggcagaggtgtcttggtgatgtcagactccgaagattacaggtatacagtgctatccctgtttttccttaattacatgtcatggatcaaccatttatttactccagtgaaatcctttgaagaccatgtaaatcaatgggttgtgaaaccttttggttatgatcctctgtataaaggaatgtctttgatttattccaaaattacctctttcagattttgaaaactgtatttcttttttttttttttgagacagactttctctctttttgcccaggctggactacaaaggcatgatcttggctcactgcaacctctgcctcctgggttcaagtgattcttttgcctcagcctcccaagtcgatggggttacatgcacccgccaccatgcctagctaattttgtatttttagtgtagatggggtttcagctggccaggctggtctcgaactcctgacttaaggtgatctgcccgcctcagcctctcaaagtgctgggattacaggcgtgagccactgtgccgggccgaaaactgtattcttgtttttaatttttcctccttaacttcccctctctcaggctttatcttttttgatccttcgactgtagatctcagtccacctcccattaacctttatgattctatggttgtggccacttctgagctggagaccacatttaccaactgcgttaagtctatctgtgttgctttgttttgacgaaggatttgctaatctatgaactacagcctgcagataatattaccctgtattatggtgactgaatgtttgttgcattttagtctagacacaccgttgcacatttagcagagtaagagaggttggtggaactcatgaataggttatgttttcttcagagttgtaagattcttttctcctttggaagtctgtcaatcgttatagccattcttacgctaggtactataatgaggcttgttcgtgagattttgagagcagagcaagggatccaagaataaataaatcctgctacaagcccaaaccacctgttcctcaaagttttctaggtcagacacacatgaacgataactgccagatgcctaggcgagctgggtatggcctagaccaggcctgaagacaacttatcccttattcccaagatgaaaccagtcagttgtgtgacaagaaaagtggccagattatacaggagcaggttctgagtgagcgtttgcttcaacctcatgggcttgtgaagaaagaagattcacagaaccatgcacatctccctttaagacacagtgacacactgccttttggaaagcatggttcctggagaatcctggagaagctagggagtgaggctggggtggggaaggggcattctagtcccatccgtacattccagtcatatttcagccattgtgtaacacgttataatttgtaactttatttgcattatccttttgtcaccctttgagttatattattattgtccttattttactgatgaaactatgggtcagagaggatatacgacttgtccataaattatccactttgtaagtggtcctccaaatgcaaaagtcctctgttataccatgactgcccaatattataacagagatagattgcttctgtgaatccaattctattttcctttcaataaagtaacagtgcagtagttcatttataattaccaaggaggagcttggcatcctatgtaagagagcaagtggaagttttgtgattttaaaaatatttccgttacatattccttgaggatatttggtagaagatatgaaaactatggaaaattattatatatggtttctaaagcccgttgattactatttctataatttgtgacccctcaaattgattaaccattcaaagactgcattgagcttcagtcatcctgagtcaggcttcaggaacctgtgataaaacatttcagcattcatatgtgacaaagccaagcaaataaacaaatgtgccatacccacagagaatgcgggaatcattgatttatcagtatggcttggacaactttggctgaaaatactttcagagattgaattaacctccagaacacttgccttgggaggatagatagatagtacatttctgacattctttatagtctgttttgaaatacctcttattatttaactgctacatgtcaccccttcaaatacatgttctatcactggaaatatgcggtataataaatgaaaaatctgagtggaacaatgtaagaaatgaaagactattttaaaaaccgcattcggattttaataatataggattatttttcttaagtgcctttattttcctaggataagtgattttagcattggaaggactaactaatggaggtgtattatgaaatttttatggtttatttaaaaattgcttgtttgtttttatcttctcttcagaagttgagctgcatcagacctgtgttgcattttttcttcgttggtgttattaaaccaatccctcaaagagcttcttttttaaatttgagttgtaacttacttttaaatcttattggagttaatttttgataatttttatcctagttgcttgttatatcataaattctttcttattttgtttttctgttgaccaattgcgaatattatgtttcagtttattgaaccacagacacctgtcatttagtagcagtgtgaaatggtttttctttctttcttttaagactacaaatatttacttagtttaattgcccttatcttgaattttaaaatgtttctgctttattaagattctttaattaaaaataaaagttagtaaaaaaagatttaaaaatttcacttgtctataaaaatattatgtacaatattaagctaatatttttttgggagagaagtggctttatgttctttagctgaataattctaatttaattgtaatgccttcaagcaatttttatgaaactctcatgagctgaaatttcagctttgacagtaacagtggcttttcagtgccagcttgcaggtgtgctttgaggtttcctgtgttagtctagatataagattatggaattaagagtctgtcattttattctgagatccttttacttattttattattttaatgacaattaaaattttcctttttaaattaaatatattaaaaatgaaggattcaggtttctcggtgcttggacaatctttgatctgccttacccactttcatttctgactttctagaattctagttgcttaggttggtgttatagaaggtgggcttgagttaccctgtaatttctggttgtaatgtggtgctgctattggatcctgtgtgtcattactggatcttgctgaaaaactatgccttttaggttgtaaattttattgattggtattttcaggtgcagattttctgtgagcctataatgaagctgaaccttcaggggccctcatttgagtggatgtctttcgaggctctgtttgtaatcttgttttataattttgtattctttttcttaaggagggcttcacaaattgtataagcttcagcctccaccacactttggatctgcctctagtaaatatgtgaactctttgaaaactgaaagaaaagcaataacaaagacagacttttgatctttcaaaatcttagttaaggtgtttagtaatgccacattttctttcctggtggaagaaatggtctggacaatcataccgatcagcagaactgtgtatctaaaaccagatgtacaactgatgatttgaaagcattgagaatggagttttagagacatgtagttcttgggcaagttttgttatttagatgatcagacttttgccaaggttctcttagaaaaatagagaatgtcaaacattagaaagtttttgtggaatatggacattcactccttaatctatgttttgtatgttcctctaaccactgtaataatgtatgattccttcaagatgccatctttacttcccttccattagccacacttgtacctatcttaagaaaattccctgaaatgatgagaatgtcaatgcattatatgtatcatatgcaatcctcacttttttaatgatagtatgggaacataaggtccatgcaagctgaaaccacataatactatcttaatactcaataaaaattatgatggttttagcatctttaaaaatgtttgtcaaaacaataaaaactctcttactgttggttatcaatgcagggagatgatatcatagtaaaactcatatttatttagtgtactgtgattttgaacattagaaacgttgagaatggaggaagtgttttatttcttcttaaaaaacttatgagtcatttaaacaattctttggcttttcagaatgtaactttctgtataaagagagcatcttttctatcttctcgaaaattgtcatcctcctttctaagttagaattaatttcaaatattttattcttccactttcactattgtgatcaatgtactagagctcctttaataaggagggtttttttggtttgtttttaaactggtgtcacctcctctgggaaaccttcatcctttttgtcacaaccactttcttcatttatatggatgagctcaccttcactaagtccttttggatgcatatttagagtctcccaaatggcagtagtattgacatttccatggtcacctatttctcttataacttcatttatgttcaatttgaattccacttccaacattattatttttcatttctttggtggactttagtttttgttggctacttactgcttttgattatccatttttgtaaaatgtcatatgggtttatcactgagagaaaaggaggcaatatgactacatgcttttctgtctgtgcgtgaactgagtaacagccgtgctgtttccaatactgacaggctttgaaagaagtgatgtgatcagtgactggttgtgaaggtgcatctgttattttccagtgatttgtagactgaagatcaagtggcaaagcttgcactttgtgcaattactcacagttaacatactgtggaaactgaaatttgaactgtgctgtggaactggtgttatttaactaaaccacagtgactgaaatctgtgcatacaggaactgtgtaaagcaagaactgcctctcatgatttgactattctgtgtaggagcaatattatattttctagccacatttgactagtcaaagacaattatatgatttttgtagcatttgaaaggcaacacaaaagtgaaatcgattgtttgttttttttcccccccagttttatgtatggggaattgactgacaagaagaccattgagaaagtcaggcaaacttttgacaactacgaatcaaactgctttgaagttcttctgtacaagaaaaacagtaggtatctcaattattaataagatgtgccaactctttattaatattatgtttggtaagtcgtagtggagctaaaatgtagagagcatgtaaaccttctgttgcttcttttcttggcaggggcagaggttgctggtgaaattagataataaaattaataaataattctacctatggaaagtaaccttttgaggaatggaagaaaaatgtgatgcatcttaatatgacttttgtatcaggcagcaaaatattttgtaattaatacttataataaagatcctataattatgtgacaacgattaaaattgacagatacatgtattaatttcttcttatggttaaagaaaacggtaattgttaacactggatatatgcaattacctttcgacacgaacataggcaatgtgaatatgtggtagctacttgaggggaatctctaccaatatggccttttgccagcctcagactcttttgtgagaaagcctagtagaagtagtcgttgttctcagaacaagtcattcacgtttggtaaatttgtgttgattgttgtgacctttctctgggatgagatttgtatgtggtaaggtatgcattatataatgacataatatctggtgatatagactttccatcagagtttggagggaaaaaaaccaacatgacaaaaaccaacagtatactcaacaactcccctttctaattcactttatttgcatggttacttacatttatctttttgctgtttcctcaaattgttcttgctttcttttttgaaatgaacagtcacttcataagatgagtcaatttatttattgttaatagcaaatgatagcaaagtctactattatctttgatggaaattgatggttactaaattcttcccaagtttggaaaacattctcgcttcaacaggaaacgcctgttccatgttcagtgcctgttggatcttgtggagcataatttatcctctccatttacttgaaacattttttatctgtggaatatttggaattaaaattcgatttctctttttattagtagactaacaaaggaataacagcgtgagacattgcctcaaagtagtgcacttgataatggaaacatttgtttttagtaattttacttaaggaatggcttatcttatttttcattttacatcaagcccaaagagaatttcagtttgaagtcatagctaaatgtcagctagcttgtcacctagaaaacaatcccttctgaatggtcagctctgtcctctgcaagagaaaaggcagactgtaggtgctttctgggtctttttttgccaagtctaagtacatattgataatttgtaggagacctgtataccaaaaaatccttcattttcctatggtttgttaagccttcaataatttagatatgtgctccaagtttagcaaataatttaagaatattctatataactaaggtcattcactctctgacatttaagcaaaataaacaaacatttgcctgactttaaagccccaaagacaagtccatagttcctgagtttctcaaaaaatatgtaggtgaagcctaggtgacatagcaagaccctgcctctatgaaaaaaaaaatagctgggcatggaggcacatgcctatagtcccagctactcaggaggctgaggcaggtggatggcttgagcccaggagttcgaggctgcagtgagctatgatcatgctactgtattccagcctgggtgacagagcaagaccctgtaatgacaaccaccacaacaaaatatcttagtggaatttctgtttatttactttaaatcatcttagtaattacttgaattttacatttccagaagtctttccaaggtagtttagttattttgccttatgttaatggattgaaattattatctgatcattgttcaggcctatctggttctttccagataactctctatgcagataagtgcctgcttatagccaatgggatatataccccatagcattgtaagttaaaacttgtgcctcctttctgtgcactatctacattgagttttgcttttgttttcctctttagtgaaggataggtgttatccatgtattataatggagttttgctatttaaatgcagcttttaaaaagtcttgtaaatagctgaaaggttttgaacatcagctgagaaaagcatatttttgtgatttaaaaaaagtgttaggtagaaaaattcacgtctgcagaaaactgttttgggaatgcctatgtgccaagttctcccaatacgtcctttaagcaattaagttaaacaccattttgcaaatgggggaattgcggcatctgattgaatatgcatcaccattgaaattttagtttgcagcctctgttctgtaggtccagtgctctgattagcagggggctgtttctactgtggggaaagaaatggtagctctgagcttaagatagctctttctggccgggcgcggtggctgacacctgtaatctcagcactttggaaggccgaggcgggcggatcacgaggtcaggaaatcgagaccatcctggttaacacggtgaaaccccgtctctactaaaaatacaaaaaattagccgggcgtggtggcaggcgccttgtagtcccagctactcaggagtctgaggcaggagaatggcatgaacccaggaggtggagctcgcagtgagccgagatagtgccactgcagttgggcctggacgaaagagtgagactccgtctcaaaaaaaaaaaaatatatatatatatataaatataaatatataaatatatatattatgtatataaatataaatatatataatatatactatatataatatataatatatataaaatatataaaatatatataaaatatatatataatatatataaaatatatataatatatataaaatatatatataatatatatatatggctctttctgtgtactcaaatgcagaactgatagccgaggctcctccaagtcatcaatgctggagcactgcaccgagattcagccacagcaggttcctctacttaaccctcccagactccccagccccctgaaccccaaatccagaatatgaaggatctatcaccacatacttggcagatactcagcctacttggggaaatatgaccctgtggcttggaaagttgaaaaacaattaccttcatatctaaagcagttttaaagagagcccagactctgtgccagaatttgaaaagttgcggttttcacagcaaggcatgaaatctaacatcatctctttctgttcagatttctaacagaccttggaaaattacttatttttttagtgcccttttctctttgtttatgacccttctgcctcaagcttactgtgttggaatagctacaggccatgtatccactaacgtctgggtctggtgatttgtaaaaccgtgcacatcactcacagttcctggtcacgctgtgtaaaatacgaaaacagaaaaaaatgaacaagcctctcggggagatgatgtgattatttttgaggtccctgtctcattctaccatcattttggaaagggccacgtccttccataggccccctggggttgcagaaaacctgattgtcacagctgaatagtcccatagaaatctcctttctctaattctctgacttcttgagcctggtagttatctcatcctgtctaaatgaaaaattcccctttgtggtgacattaggtgacttttttattttttatttttttaggccatgggaatagaagtgcttcttattcggttcttaatggaagctagtaaaaggctagggtcttacctacagactattaatacctgcacgtttcactccccaaatcctaaaccttacaaaaacctttatgtcttaaaatagaatatttggaggggctttactgcactgtggcatgaagagaatataatgagaaaagtgtctctttgattgtaatgtaaatgtgtctctttgattgtaatggaaccttcccttcagtgttttatcacctaacagataattacacctttgaaggcatttcttgtgccttcacatatttctatttgttatataccagttcctgacttatccaaatgataagccttgaatactttgataccctctgtcctagagggcagagtctgcagtagccatccttcgaagaacgaggtgatagagtccagcttcatgctgtttaagtgagggaggtaggcagcagtggctcaaaaagatgcctggggatctcaaaagctggggacacgtctatttttcttcaggctgccttaacagtttcaggtagagctctgtgtacatcggacatcaagttttgctgacatcctctctctctgatgtggggatgctgtcaaagccatagagctatcatataagtctatctgactgatgagagagccttgggatagaaacagtattttagatgttcctccaagaggaatgcttattagaagatcaggtatggctgttgcagttaattggaaacacttgtcaaagtgacatgacgagagaagcaggtaggagtgatcacaattggtaagactctcagaagaaagttggtgagagcagcagtggttgagggacccagacctacaggtgttgctgggattgcttaagtagcaagactgcctttgtgttcctgcattgtgaaatgacagcctgtgctttactttagaattttgatattttggcgtgtatactgtgtttattaaatttgaacaactggtagttgatacaaaattaaaggtttacggattgtttgtagtaattaatatactgttgttttggtgttgattcctggcacagctgttggcagctgaaggaagaaggaagccaggagaccaaaccactgctgtggccgtgccacactctaatgtcctttccccaacttctttctgttacaggaacccctgtttggttttatatgcaaattgcaccaataagaaatgaacatgaaaaggtggtcttgttcctgtgtactttcaaggatattacgttgttcaaacagccaatagaggatgattcaacaaaaggtaattttcaaaagaattactacactgaaaaattaggctgttgctaaaagatcttcttactgttttacctctgctgattgaactggaaaacaaaattctactatgtggcctttcttttgcttcattgcttggaatctgttttattcaatcatactgttggaatagaaatggcatgtctatccaaagttgaaatatagattggttaacttatagcatgagtaagaaattttatagagcattttttttgtttgtcttttagtcaaggtctcactctgttgcttgggctggagtgtagtggtgtcatttcagctcactgaaatttccatctcccagtctcaagtggtccccccacctcagcctcctgagtagctgggactataggtgtgcgccaccatacctggctaatttttctattttttatagagtcagggtttcgccatgttgcccaggctggtttcaaacacttgggctcaagttatctgaccccccttggcctcccaaagtgctgggattacagacgtgggccatacacctggctgagcattgttaattttgaatcaatatgattggaatttcaacacctcataccatggtgagctttagagccaaaacgtaacaattggtggaatggtttgggtgaaatctaactagagctcagttggttagttgattgaattttgttgaattacaattgtaatagttgactttttcaagttacttttcagtttttatttattctgttgtgtagtccctagagtagatgttgctagattatggaaagaataattttgtcttcaggagagtgactggcaaaatgcaaaccttctgactgtagtcttattgactataatagtcaaagagactgctatagaaaccactagtcagtggcatgtgcttttacctccttttctatgtaatttattcccaatttattctctccaattatgtttaaattagaaactggtgtcatataaatgaagtatttcaaataaccttagaagtagtttttatgaaatgttatttttaataatctcttaggaaactaaaaataaaatgtcttcctctttgcatttgacaaacatcgcctttccttacttctttttaaaaaactggcatagaaactttaatctttccaactgtaatcataattatagaaaaaatcacagtaagtttattccttgcataggaactcacatatataatattgtatctgctcagtttctggttaacatcaaatagcgagaggataatttttacagtgtgcaaaccattcaaagtatgacagcaatttatttgtgctttgaagatcgaataaagtattcaatttggacccatattccctgttcctttacacatagactcagtgcctgggaaatttaagataactataaatactacttttaaattgaacagtcttctaataatatttagggttttttttttcttttcccttttttttttattattattatactttaagttttagggtacatgtgcacaatgtgcaggttagttacatatgtatacatgtgccattctggtgtgctgcacccattaactcgtcatttagcattaggtatatctcctaatgctatccctcccccctccccccaccccacaacagtccccagagtgtgatgttccccttcctgtgtccatgtgttctcattgttcaattcccatctatgagtgagaacatgcggtgtttggttttttgtccttgcgatagtttactgagaatgatgatttccaatttcacctatgtccctacaaaggacataaactcatcattttttatggctgcatagtattccatggtgtgtatgtgccacattctcttaatccagtctatcattgttgggcatttgggttggttccaagtctttgctattgtgaatagtccagaatctacaatgaactcaaacaaatttacaagaaaaaaacaaacaaccccatcaaaaagtgggcgaaggatatgaacagacacttctcaaaagaagacatttatgcagccaaaagacacatgaaaacatgctcatcatcattggccatcagagaaatgcaaatcaaaaccacaatgagataccatctcgcaccagttagaatggcaatcattaaaaagtcaggaaacaacaggtgctggagaggatgtggagaaataggaacacttttacactgttggtgggactgtaaactagttcaaccattgtggaagtcagtgtggcgattcctccgggatctagaactagaaataccatttgacccagccatcccattacagggtatatacccaaaggactataaatcatgctgctgtaaagacacatgcacacgtatgtttattgcagcaatatttaggtttaatgctcatttgcttgttttaaaattcatggtgctccatccaacagccagagaatacatattcttcacctcacaaggagtggagcattcaccagagagataacattctgggccataaaactaccttaataaatttaaaaaaatataaatcttaaaaagtatgttatcagaccaaagtggaattaaactagaaatgagtaacagaaagatatctggaagatcccgaaatatttggaaatgaaacatgtttctaaacaaatcaaagaagcagccttaagataagttagaaaaatatttttaactaaagaaaaatgaaaatacaatttatcaaatttgtgagatgcagcaaaagcagtgcttagagggaaatatgtaacattaaatgcatatattagaaaagaagaaagacataaaatcaataatctaagattctaccttagaaaactagataaagaaaaacaatttaaaccaaagcaaactgaagacaaggaataataaaccttacaacagaaatcaatgaactgggcaacaggacaacattagagaaaatcacaaaaacccaaagctggttctttgaacaggtcattaaagttagtaaacctctagccaggctaactgagaaaaaagggtaaagacacaaattaccaatatcagaaattaaagacatggacattcaagcagagtaaagggctactgcgaacaactctatagctgccattgataaattggatgaaacagaccagttccttgaaacacacaaactaccaaaacttacagaaggaaaaatgaacttcatttgtgctttatttatttaaaaaattaacaataattaataatcttccaaaaccaagaaaagaccagatgcagatggtttcattggtaagcgctaccatacgtttagggaagaaataataccagttcaagtcttttccagataatagaagcagagagagctctcttaacctattctgaggcaagcactacccatatagcaaaaccagaaaaagacattacaagaaaggaaaactacagacatattttttttttaatttttttttttttttttttttgagatggagtctggctctgtcccccaggttggagtgcagtggtgccatctcggttcactgcaagctccgtctcccaggttcatgccattctcctgcctcagccttccaagtagctgggactacaggcgcccaccaccatgcccggttaatttttttttgtatttttagtagagacggggtttcactgtgttagccaggatggtctcgatctcctgacctcgtgatctgcctgcctcggccttccaaaccaatatttttcatgaatatagattcaaaatcctctacaaaaattggatccaacaatatctaaaaagaattatgacaaccaagtggggtttatcccacttatgcaaggctggtttaacatgcaaaaaccagttgctgtaatctaccatataaaaatgtaattcacaaaataatgagaaaagtcatgattatgccagtcagcagagagaaagcacttgctgaaatccagcacttgttcatgataaaaactctcagtaaagtttgaatagaggggagcttctctagtttgataaggaacatctatataaagcctataatattctaactatttttttcttatacccattaaccatctccccatcttactccccaactacccttcccagcctcttgtaaccatccttctactctctatgtccctgttgtcaattgttttcatttttacataactaaaagagtttaattggattgtttttaacgcaaaggataaatgcttgagaggatggatatctcattctccatgatgtgactattaacgcattgcgtgcctgtatcaaaacatctcatatacctataaatatatacagctactatgtacccacaaaaattaaaaatgaaaaaattctacagctaacaatggtctatatcttaaagttatatatttttaaacaaaagagaaataattggcatctgatttgtgacctaacattttcatacacgaatgataatcagactgagtaaaaagctttgatcatagtcttttcctctcaaaaaagtatgtatttgtatttgcactacatgattattgttttctcttacttactttaagtgatttcatggcacagatgaagttggccaaagaaagtacagtactttcgcagcagttttgaccggctgaacctaagtggtggtgtcagtaactacatatctatttatggaaactcaaagtcggcaacattttgcagtgaagttggggaaagggtgctgatgttgaagtgttgacttttctttctgaaattaatgcttctccatttatctgcatctccacatcagaatcacagaattctttgtaaggctcagtctctttgaaatgaataattcatttttatacaaaatgatatttgaaaaagctcgagacaactcagaccacttgattttttaactatgagtttgatagacatgtaaattagaatttatagggaaaatcagaccccattgtgaaaagcattagagaaaaaggtctctttccagtgccagaatctgtagatgagcttattttaaatagacttttgagacttctctgtatcttccaaacacatagcagattattgaaaaagtattgtaaaatgtaactatgaatggtgtgtaggagctactttctattattcatgtgaactgtacatttaacatgaaaaattcaatagaaataaaatatttatgccattaagtcagcatcctatatcttgaagctagcagtgtaggaaagtacattttaaaatattggcataagcacctatctttctactttttaaatcaagtaaaggaaccatggaacttttgggaaataatgggtgcgatgacatgataacaccataatatcaaaataatttgggtgtagatcattgaacttgggtagagtagacttgctgttgattcagttttgggcaccagagttacttaacctgagcctgttcaggactcttacaggaatattttatcctccttgtcttacatttatctattttttttttcccaaccaaaaattgggaatatggtacaggcatgattctaagtcctggagatacaaagtctcttctgtcacattctagtgggggaggcaaactagtaaatatatagtggaagctttcttttgattgctcccgttgtctcagtaaaaacaggaatcacagttatcaactgagagtaaagatggtgaagggtgtgagaagagtggagtgcgtctgaactagttatctaagagagtggaatagtgagtggacaagagaaacacagcaggatttctgagctgcacaaaggtccatttcaggctagtggtcataaatttcactagttatctatgagcataatattgtgttttaatccactcatatttagtcaaagaggtatagatgcagaagtaagtgaaaagttgtgtttatccaatgttgaaatttggtcaagtgaataagagaagactcagggacttcaaagatctgggagttgaggatgtttacaagggtgtttgcaaaattttgaagaaatacttcattgataaaaattctgccagcatacaagaaatagtgttttagcattcaggacagacaagtgaatctatacaccggcaaaatcagaatgtaatcccagagcaaggactttttaccttcttaacatgaaaaggggcctgatgattggaacaagggtccaagtcctttgaggatttgccaaaattgactggaattaacattaatctcctacttgtatcgatatttttaccaagaaacttagacatatgattgaaagacttaaataaatggactcactctgaattttatttctgattcatatctgggaaaataactacaacatgtgatggcagccaactaatttgaacgtacctcttccttgtaatcaatctatgattaccaaacttttattctgaattgatatttgatcttactggcactgggtaatgtcaacactatctttgaattataccatgatggatggttgcaaaacccatcgaaagggaaggaagccagtgttgatggagtagttaatgtatgccaagaattttatattcattattggtcatttctataattctgaaaattagtattgttgtctccattttactgttgaagattctgacgctcaacgtctgactgatttcaaatcccatgttctctctattgcacccatgctgccccgtccttctcagtggagacttattgttgaggtttaactacctcaatcccttgctttcttttttccccacaaaaatgaagcacaggttgagaatactttcatttggagagaattatgctgctttgaaccaaataaactaactgataataatttaagggggcaaagtgttcccgttattttttgttcctggtattgaggtcttgatagtgttgttcaggtaatcagtcagtggtacctgatacattataataatacaaagaggaaaattacagccaagaaatccattctgtcagttatccatatgtgttctaaaagagatggcctaaatctctgcccatttatactgtacagtattttcaaacagactccaaaactgccaagataattacagtgtgaaatatcttgtgccaaatagttatggcattttcttgccaataattgtgacaaaaaaattcccatagaataaaaaataacagccaaaatagcaagcttctccttgtggaagccaatggttttctttagagaggaaacaacagatgaaatatgagtaattatactatgtaatgtagtctctttggccaagagcataattgtttacctaagctttttacttatagattagaatcttgtgttgcagtctagtagattgatttaactgcctctgtgacttctttttatttttaagattaggcagtccatgacaaagaggttaattgcaacccaatagagctaaactaatattttattaagaaggagctggcatcctgagcttttaggagaacaaatattctcataatgccatgaacaacttacagagcaagtattaggctcttcatattcagctctctgtttgcattaccctgtatcgaccacatctaagtaacattagcaaactttgctgaataatcagtcacaccagttagatctctgtaaaggtgagatcagtaaatgtatcacttggaaaagttagaactgctgatacgtcttttttctctgacctagacagtatggcagctcaactttttcaaagtttatacagtacaagttggtgggagatcaaatgaactaatataggtaataataggtaattccagatgtgttcaggaacacaaagggattggtataagacattgttagtgatagcaaaaatttagaatctacttcaaagtacatgattgaaacgtatgtgtgatcaggaaggagcaaatgatcaattctctgagatgataggggtgcaggtaagaaccaggtgccatagtggtttagtctggaggtggatgggagagaaggggaactgaaggctgtcacatttctatgaccattttgtccaaagcaatctacagattcaatgccattcttatcaaaataccaatgtcattttttacagaattagaaaaataattctaaaattcatatggaactaaaaaaaccccaaatagccaaagtagtcttaagcaaaaagaataaagctgaagacatcacattacctgacttcaagttatattacaaagctatgttaacccaaacagcacagtactggtataagaaatagacacattgattaatagaacagaatagatagtccagaaataaagccacatatttacagacaactgatctttgacaaagccaataagaacatatattggggaaaggagacctttttcaataactggtgctgggataattggattgccatatgcagaagaatgaaacaggacccccctatctcttgtcatatacaaaaatcaactcaagatggattagcttaaacataagacttgaagttataaaaatactaggagaaaatctaggaaaaactcttctggacattggtgtaggcaaagaattcatgacaaagacctcaaaagctgaggcaacaaaaatgaaaacagacatatggaacttaattaaactaaaagcttctatacagcaaaagaaagaaccaacagagtgaacagatgacctgaagaagggaagaaagtatctgcaaactatttattcaacagaggactaatatctagaatttataaggcacccaattcaacaacaacaaaataactccattaaaaagtgggcaaaggacatgaatagatatttttcaaaagaatacatacaaatggccaacagtatatgaaaaaatacttgacatcactaatcatcagagaaatgcaaattaaaactacaatgagataccatctcacaacaatcagaatggccattaaaaagacaaaaaatagcagatgttggtaaggatgtggagaaaagggaactcttgtacactgttggtgggaatgtaggttagtacaacctcaatggaaaacaatatggagatttctcaaacaactaaaaatagaactaccatttgatctggcagtcctgctactggatatgtaccaaaagaaaataaatctttacacaaaaaagatacctgcactcatatgtttattgcagcactattcacaattgcaaagatagaatcaatctaattatccatcagtggatgactggataaagaacatgtggcatatatacacaatgggatgctactcagccataaaaaagaatgaaatcatgtcttctgcagcaacatggatggaattggaatccgttatcttaagtgaaccaacccagacacagaaagacaaatatcaaataatctcactcataagtgggtgttaaaaaaatgtgtacacatggatgtagagagtggaatgatagacattggagacttgggagggtgaaggcgtgggagagggtggatgatgagaaattcttaatgagtacaatatatgttattcaggtcacagttaccctaaaagccctgaccattatacaattgatacatgtaaagaaattgcacttgtacctcataactttatataaattaaaaagaagactatcatgtttcttatggcttctgcttttttcaataacatttttggcaggggtttgtgctgacagtaaggagagaaggacagcataggtgttgtgagaaaaatgctaactctttggaactggaactgcaagaaggccctaatcagagtcaaataaaaagattactgagtagctcagaaagctcatctctgaatgctcccattgattttaatgtgtaccaaaacattcatttgctttgcattgattctccatgttctagggcattttgatagcaaaactcataaacgattactcaattttacaaccgcctttggctttgatttatctaggaagaaagaatcctttccaagtcttttctcctaaatttctctcttctggtccgtctgagtcagttcaacatttgccaccacttttttttcttttttctgccagcagttccccagttctctttctgaaagcagattataatccttaacacttccagaattccttctctaaccttccctaccatgcctttcctaccttcttcaaccaaaagacttccttcatataagctatgctaatacctaagaactgaatgtattttcttctttaaattttaaatatttacatataatgcagatgctgtactcctatttatttcctcattaatcatcattaattcattcactaaacaaaaccattcagtaaaacattccacaaaaacagatctagtgcccactatgtgttagtcaaccaaggtaatatggtctggctctgtgtccccacccaaatctcatcttgaattttaatttgaattgtaatccccacattgggggagggacctcatgggaggtgattagatcatgggggtgatccccccatgctgttctcattatagtgagtaaattctctgagatctgatggttttataaggggattttcccctcttggctcggcacttctccttcctgccaccatgtgaagaaggatgtgtttgctttcccttctgccatgattgtatctttcccaaggcctctccagccatgtgtaactgtgagtcaattaaacctctttccttcatatgttacccagtctcaggcagttctttatagcagcatgagaacggactaatacacaaggatagaaaatataagatctggcaactaaaagtcgcacgatgcagtcacttcccttttcatctatgttcaagggtagtcttactcagaatatgctgatttaaaacatttttagaatgatgggttaatattacctttctctttcattttctttctgtttttcaaatcaatgatagtcctatttttattcatggagaaaaatgcatgtgttttatttttactgtttaaaaatgattttttttcttcaagaaagtaaaataaggtaaagaaaagagatgaaatattccttgatcacactgacttcatgtgtaaattaaggtacacacatacacagacatttgaacaagctttttttgtattaggaacaactgcttcctccttaagaaacacagttgtagtctgtgctcatgatgcttcaaatggaaagccagaggatgacaataagctttcattgtcatatttctcctttctcacacttattttcatgtatgatactgtgaaatcagagaaaacatgccatttgatgatttgtatttgtttatggatcatttaatttattcctaaatgtctcctttttttttcaaaatgttttctggataaacctttttttcacacagggaacgaaagtgggcttttcttttaatccaatgagttataccaagggctgtaattttacctgttttagaaatctgagccttcagtaagtaaaagattgacttggaattttctagaaatagtcaaggcaattataacattctattgatgtaaggtgcacagattatcaccaggtaaaattataatatacctatgactaatatagttactgtcatccaaagacgccctcaccacttttaccaaacaaagcaaaaccaaaccaaaaaccaatgataataaaacaaaatgagatttattttatatctgatttttaaagttacaaatacaattgatttattttatggtgtattttatgccaggccttgtttcaagtgctaagaatggagggataaacaagagtttagcaagagtggctattatatcaatcaacaattacatcagtgttgttagtgccaggtgaggtatgcatcccatgatgtgcgtgtacagaggagggcacctctcacttgtgggtggatcaaagaagcatccaggtaatgcttttactgagtctgcagttaccagtaagtgttagccagaaagatgggggagggaaaagacattccaggaaggcagaatgattgtaacatgtgaaaatacggaaacacaaaacagcgtagggtgtgcaaagaattcctagtagatttaattttagttttgaatttattctttatttgatttgctattgattttaataaggctgggatgcagagcatgtgtgagaaagtggcaagagacagaggcagagcaaatcacttggatcagaaaataaatgacctgtataccaaggatatacagtgttatcctggaggccttcaggtttctgttaaagggtaatagggtaaaaggcatgtgttttagaaagaactttgcaagcaatgaggatgtggttttggaatgctgcctaactcgggtgaaagacgttgtgttgtctgacatagtaggggtgcagagaggagattcaatttgagagatatttattgatgttataatctataaggctaggaaataagtgtgtgtgtgtgtatgtgtgtgtgtgtaggtaatagtgaaaagaggatggcgaatttcatgtttctcatttgggcattagaaatatcttggggccatttgacaagatcagggatgcatgagtgaggcagagtgggtgataaagggggaagatggtgtcagttttggacatgttgagtgttgtcagatgcctgtagaatactgtagtaagaaaagtccagtggctagctagacacataggtctggcattcaaaagaaaagtctcaatttgtcatagagattgcatgttggtttttcattaatgttgagtttttagagagttggtgtcatatctaataccctttttttttgtttccacagcacattgtacagggtaagccttagggttgcatacaattcccaaaacctaactttttttttgttctaattactaggatggggtccaataatgtagaagaaataaagactctccatcaattgatgccagtttatttcttttccaatccagttattgatacatagacctgaattggtggggcaatacaaagcttaaattaaattagaatcagcctgaagaatagtagtaaagaatgatgtcacctgcattttatggtttgacagatattaggcaggtgtatttccagaatttcttccttaattttttttttgtcatatcatctgaaatttcatcattgtcatcattcctttggaacatcaggagtttttcagttttaaggagttgcctgataaatgacctcatgaagggtaattgtgtagaagttatcagatagtgttaataaaattttttaatgaattggagcttttgagatatctagggaaaggataattgagacaggatgagagtatggctggttttgttctatttgttcacttcttattgacatttccttgagattaatgattttattactggcaatttgaggccccagaagaaaattctttcccattaaattgcatttctttcccccaaaagtcactgctctttcagaagacattattaacaattctagatattccaaaaataaatttaggtatcactgcagttgttaataacagataaataacattttgctatgttacaaggaagatggaagtgtgtgaaatgaaccataaaaagtaagatttgttgaaattcagttttattctcttatatctgcacacaaacacattgaaggactattataattagggtaagactagctgctgtaacaaataaatccccaacttttagtggcttaatacaatagaagcacatttcttgctcatgtaacagtccaaggcaaacgatcctggctggcatatggcattttcccacacagttattcagcagctttgctatccccttgggccttgtccagctggtagaaagaaagagaaattgtggagaagtcacagttgtttcttaaatcacggcatggaagtgacacacattacttctgtctgcattccattggtgagaaccagggacataggccatactgagatgcaagaaattctgggaagtatgttcctaattggacagctatttcccagtaagaaagctgtacaatgcaaggaggagcacagaattttgtggatagctagttgcattggctacagggactatacacagatatgggcaaaatacaaaggtcacacataaaaattgctcattattttatggccacacttcaaatatatgagcatgtctatacagaaggaaagaaaatacttttgtttgatactttgcattcattttggatgttatgtggttgctgagatctttttaatgctagcaagaatgttggattccttattcatttgtatgaaaaactgagactttctttccttatttttaaggttggacgaaatttgcccgattgacacgggctttgacaaatagccgaagtgttttgcagcagctcacgccaatgaataaaacagaggtggtccataaacattcaagactagctgaagtaagtatgagatgaattttgcttcccaagatggtggtgttggtacatttttcttccctaaaatgatttaatatagatatttctggctatgatcttataaatacttagctgataatttatgtttcccttgtagaaatatagaaatcccaaatatttctattcattctctccaacttttgaaatgggagtgtagctcatgacatcccaggtcatgtctgtagagtgtaaggttttctttgagcatatcagatagggagttctttcattgcttcatgcatatatgcagcaaacacatattcagggtatgctctgtgcttggcactctgcaaaggatgtaaagttaaataagaaatgggccctgtcatcaaggagttaaatatccagcagaggaaactgatcataagatgtgaaaagatgcaatgacagggtgctgtgggagcctgtgcaggagaatttgcccaaatgtggggccctagggaaggctgtgtgagtgagatgatacctgggctgagtgaattctgaagggaaaatgtgagagctagtcaggtaaagaagggatatagtttattcctaccagggaggccagcatgtacaaagggtcagagatgaggtagtatggtgacgttgagtatgactttactgtagttgaactcatatggggaaggagaaggtagggtggcatatagtgaaatggtggtggttggtgtctcatgtgccaggaaaatgacctttgtgcctcagaaaaacctctcaaagggaggtgggtcctaattggtttcttttgcaatttcatgtttttattgtgttaattcaaaaactttattctaagaagaggtccatagtttttaccagattgccatagggatccaaggcacaaaatgattaaaaactcctgcttggcctagtggctctgtggagaatggggaggtagggaaaccagtgaggaagtcctagcagtaagtaagttagcatgaccacggttgtcagcaggatagtggtagcagaagtgggtggattgcagacacattaagattagagtgaacacatttgttaatacattagaatagtgtgtgaaacaaggggttgagtccaggacaattctatgtttttgatttagatgacagggtagatagttctgttggttaataaaatgacgaatgtaagatgaaggaaagaagatttgaggacaatgatcatgagttcagtttggggcatacaaagtttgaagagccccataggaagccctagtggagatgcctgaacagcagggagatttatgggtctggcactctggaaggatatttgagtttgaattgtaggcttcagtgtcatcttcacagttatggctgttcaagtcatgtgactagacgatgttaccctgagactaaggagaaaaaaaatgaggacagaactctgaggcagctaatagctttattgttcacatgtcttctataaccataatttgtattactggtatgaaagatgccaaaaagctcattaagctaccaaaactatgctgagcactacgtttgcactcacaaaatattctcaggtaacttttaccaaaaaagagaaagataaaatccatacgcttatcagttttctctgctgcagaaaagtgagtcgaagcacttcagagtaattttcttaacttgtcgtaaatattgaatctggtttggaggggattaggaagtaaagtatgttccctgaatttagaagactatggagtttttcttagaccatggctaacaaaaagacttttggttttctgctctaaatagcactgttagcttggggaaagatgaatcctttgatgtgcagacatgtttctgaagaccaaaataagacattaatataactaaatattaactagtaataataatcacaatatttaaaagataatatgcaattagtacaagatttaaagcagacaatgagatacaactttcttttgcaaaaatgcttagattttggagctagttcctcttctgcctaaagttgcctgtttctttctgcaaatcaagctgaaatgtaggaggttgtttctgtgattgtgaatttttatagtcatgattcctttggggtcttaaccacacctgattcaggatttttcttttgtctgttacacaacagagcgacaacaagtgaaagggggccatagagaagacaatcttctcccttagcacccagaatcactcagaattgttttttcactgtatcaacggaaaagaaagaaactttccccttgacattttctcatttttatttttgagaaacgtattcctatttcatcccatctgttttttttttctttgctctgtgattagtgttagtttctttaccagtcatcccttattcataaacctggttctgatataaaactgctttctgtcagatcttagggtcgatttcagagagcatacagaaataacaagattgtcgatagacatttagtctgaatacctgcagcgcatgctcttagatctccaaagatagacataaaagaaataccaaataagtataacaatgttgtttttccagtggtactcaaaactcttgtaatttgctcaatgcaagtatttggtttagctatggaatttgaggtgcttttactttttcaaagacagataaatttgatctcaattctacctgatcccccaaatttggagctgatccccagtttcaaagattccagtctccataaaggtagttaattaattttctgcgtgcattgacaccctgctgattgcctttagcttgttcacttttatgttgggtagagataaatatatacgccctgccacatcagtcagtgggcctgactttgttagagtcaatgctctcagatcttcagagaggaagaatgtgtctgtattggtacaaaaatacatcaaaaaatgtgatttcatcctccttccaccaaaggcttattgcttatagaagcacaaatgacataacaatgaaaatgaagagtctgttactgttttatgaaagagcccaggaacagagtgaagattagtagtgctttgcatatgaaaaagatgaagcttattttttgtgcactgttttttgttgttgccattttcctcttcttcctcctccttgtcctcctctaccctttcctcctcctttttgtccccatcttgcatttttttggagggctttacatatgcaaatcactgtctagagaattgggtcctgaatgtctaaagaaatgtaagacagatatcttaccttgggctgtacattgtaatcacctgggaaggttttgaaaatatagattctctgagaacccaaacaagaccaatttaatcattctccagggtggagtctaggtataagtatactgtattcttttaaaacttccccagatgattctaatatatagccaggtttaagactttctgaactcagggtgatgccattccatctttagaggagacctgcattaatccaggctactgagcagggcttacatctgtcagcacagtaggcacagtgtccagggccccacaacacttttacgggtctataggatgtttcaatttctattaacagcagaagaaaacagggtaattttaggtaaaaacaaaaactgaatgtgtgatattaatatatttatctgttataatatacacacacacacacatatgtatatatatgtatatatacatacacacttttttttttttttgagactgagtctcgctctgtcacccaggctggagtgcagtgagtggtgtgatctcagctcactggaacctctgcctcccaggttcaagtgattctcctgcctcagcctccagagaagctgggactgcaggcacgtgccaacaagcccggctaatttttgtatttttagtaggacggggtttcaccatgaaggagtctaggaaggcacaaaggcttagggtccacgaaggtggtaatgcaccctggtactgagtttgttcttatttcccaagtttgatttatttgtggttaaacatagactgtgtatatatagatggtaaactactaacattgaatatgaaggcaattttcatgtttaacacaatgaaattggaattgacaggccagtagttgaaaagcaaaagaaaagacatgattatgtacaattgtataatacttcaccccaacatgaatcttacctcctggtaggatgatttgctgttaagtaatttaagacatcatgggaaaaacataactgaggtactgataatggcaaatacataaaatatctttataagtattcttacaaacaccaaaataaaaataacaattctaacatacaattaaagggaccaccagtgatgttttccatatcaaaaatagtaaaaatggatattatattcttagttttcagatatgtaagttctgtatatgagaggaactttaggatactctcccaagctgccaaagatgctagtatatttgttttgttttgtggcatatattataactcagagttacatgctaacaagtatttttatttttatccattcttacatctaaatatttaatgcatttatgattttatgatttggcctttttgactcctaccttctgggtcccattagtcctagagacactgaataactgaatacatacaatgggcaaatctgttgaaaatatttaaaaatttccatttaccaaactctttaacacatacattgtctttggcttcattgatggcacagggcagaagtttttgatttatcccttcaactgtctttttttttttgagacggagtctcgctctgtcgccaggctggagtgcagtggcacaatctcagtttactgcaacctctgcctcctgcattcaagtggttctcctgcctctgcttcctgagtagttgggattataggcacgcaccaccacgcccatctaatatttgtatttttagtagagacagcgtttcaccatgttggccaggatggtctcgatctcctgacctcgtgatctcgcctcaactgttttttataattcccaggttccaggttccagaaggcaatgctatgtcctgtgttggttacctttgcccagggatacacaaacctctactcttgctctgtcatctgctttttatctttgttttctgctgtaattagacttaattagtgtaactcaaggttcatataaacttacactaaaatttttccatttgaattggtatacagaaacaaacttgagtatttaatatttttttccctaaaggaaatttgcagttgggcaagaaacacaatattctttaagtccagatctaagggaggaagggaaaaagcaggcgataccctttacaaccctttacactgctgtgccacccatcagggcccttgctgagtatcactcaacaacagcatcaccaacagtgggatgccggggtccagcgaggccatcagaatcaaagttatgcttcctgaggtgctaaatgtgtatgaagaatagataatggtgtctcacccaaataactgctggacagtccatgagagccatgtgattctaggcaggcttgcagagtgagtgtgcaggaggcacttgcagaagtggacatccagcagtgttgtggatcagtgttggctactgcatcagagcatgccagatagaacagcagaaagatcagctttggtagagtgattggacttggagtgacttcctctgaacaaattttaggacaactcaggagaagagggaggcaagactgtggagcatgactggctgtggtttgactgccagtagatttgaattcatcactgactgtgcagagataacctagtcatgtataaatacattttctctcttttaggttcttcagctgggatcagatatccttcctcagtataaacaagaagcgccaaagacgccaccacacattattttacattattgtgcttttaaaactacttgggattgggtgattttaattcttaccttctacaccgccattatggttccttataatgtttccttcaaaacaaagcagaacaacatagcctggctggtactggatagtgtggtggacgttatttttctggttgacatcgttttaaattttcacacgactttcgtggggcccggtggagaggtcatttctgaccctaagctcataaggatgaactatctgaaaacttggtttgtgatcgatctgctgtcttgtttaccttatgacatcatcaatgcctttgaaaatgtggatgaggtaagtttttcgttttggttttctgagtactgtgggtcatatattttgaaaacatcaggataaatggattccacagataatccaaacctctttttagccaccactttcaactttcttgaaacccttgccaaaagttattatatttgattaccttaaattagttttcatctgtttcttctccttgatatctggttgaaagtactaattactgggaattggagtttgtggatggaagaagtggaggagaagaaaagcggcggcatttgaagtcaactacagttcacaaactacataattgattgaaagaagatattagattggtgcaaaagtaattgtggttttcacaattacttttaatggcaaaaaccacatttacttttataacaacctaataaatagatgtattttctttgaaaagctgcagcatttgaaaactactcattcacagatcttttgactcctcctctcaagacacatatgataacaatggtagagttaacataaagataaagaaacttttatgaaacagcaattcttgaatttttgccactttggtttcttcctcatagcttttgctttacattttgtctgaatatatttgtggatattggatgacgtattagtccattttcacactgctataaagatacaacctgagactgggtaatttataaacagaagagatttaattgactcacagttccacatggctggagaggcctcaggaaacttacaatcctggtggaaacaagcaaggaccttcttcacatggcggcaggagagaaaaaggagcacaggggaaactgccacttttaaaacccccagatcgcatgagatctccctcactgtcacgggaacagcatggggaaaactgcccccataatctaatcacctctcaccaggtccctctcttgacatgtggggattaccatttgagatgagatttgggtggggacacagagccaaaccatatcagatgacttctgatgtcttgtctcatgtaaggctctgcttcttcagtgttatcagtgcacctagaagtacttaaaatatgtagaagcttaaaagaccacttcatccacagcttctcaggctctaacttaatagtggatgatatttaagttgttacaccaagctaataggatacaaccagtaatttcaattcataatatatagaagagtcaatatagaatatgtctattattaaaatatgttcattatgataatattactaacttaattatcctaagatgttcctatagattctagtctgtagactgctcagatggaaaattctttactctgttgttattattattataatacattgtaatatattatttctctatgtgtgttgggagatagattgaaacttttcttcagtgactttttctataaaatatttacgttcaaccaactataataatataaatattatttcccccaaatttaagtgtagacattgtattttgatattgtgtatgtaattattactttataaattatgagaaaaaaatcataataattcattttccaagttttgagtccacctacatcaagcttttaaagattttttttttcaaatttatcttctgaagtgagttaaaggagttaattttgaaaatacaaatcacatgataggggacaataagcagtatttatgttttgcacactacacagattattacattaatacattgagattttagttatttagagtataggcctaaagattttaataaaggcaatcactcatgtggaatctagaaaagttcatctcatatagagtagaataatggttaccaaggggtggggtgaatggagagatggtggaagaatacaaaacttcagttagatggaactaaattcaagaaatctattatacaatatggtgactatagttaacaatgtactacattctggaaaaatgctgagaaagtgggtgtaaagtgttctcaccacaaaaatgataactgtgaagaaacacatacgttaactagctagatttagtcattccacaatgcatacatactttaaaacgtcatgttgtacatagtaaatacatgcaattatttctgtcaattaaaaataatcaaaagattggcttgattagtattacagtaaatatattgtttaataatacatttataactatgtaatacttttatttatacatttataattatgtaatatatattaaaagattctctcaacttagctcatattcaagaaatgcaaagtaaatccacactaaatacaattttctttcttttttttttttttttgagacggagtctcactctgtcgctcaagcaggagtgcaggggctctgtctcggctcactgcaagctccgcctcccgggttcacgccattctccggcctcagcttcccaagtagctgggactactggtgcccgccacactaaatacaattttcatttatcacgctgcaaagaccgaaactacgttagaacactaggctgttgagtgtagtagctaagtaggcacaccgctcaaatctcctttcatcaacacgtgctgtgtggagtacggtcagcggcaccctgggtccagctcctggctttagaaagcctattgttaccatctcttctcgactcagcatttggtgatctcacagtggtagcttgaaattagccacagtgggcgtatttacactacagaaagtagcaaaagctacaaatcaaggcctttttaaaaaactttctgtagagctagttgttaatcattttccaacacatcactgaacacagttaactgaaggctgctgccttttctgatctcctgcagctcacatgttgaagctgggctcacacatttccccagggctcttccccgtcagtgtctgagtatggtgggaatactataacttgtccataactgcaacttttgctctgggactatccatttactgtgtaaaagtgtaagctttttcttcctacctgagtcttccttccctctttcacaggtgttagaactgcattgtagtccaaaggctcttcgtgttcccctcctccccattttgtccttcccaggcatttacctcagtaaaattcttgcgtaaataaccctggcttggcatctactccttacaggacctcaattgatcaagtgggatgtggcatatcactctcatacactgctcaggggagaatgaattggtaaaatctctataaagaacagttggcaatgtttcattttaaaaaagagaagaccctagaggcaaccattttcaaattttttcaggggattcttttattatttgcttccatgtcaccaaacaacacgattacatatctacctcttggtttgtcaattttaggttttgtctttgacttctcaacatgaaaggtgagattttagctcccctttctactttcgctcactatttaaatgcaccattttcatcacctcattctcacaatatatcatccttttgattcaataaatattaagtgttgatattattattattgttattattattatttttggtgacagagtcttgctctgtcacccaggcgagagtgcagtggtgtgatcactgcaacctctgcctcccaggttcaagcgattctcctgcctcaacttccccagcagctgggactagaggcgcgcaccaccacactcggctaattttttttaaatttttttagtatttcaccatgatggccagtctggtcttgaactcctgacctcaagtgatccgcccatctcagcctcccaaagtgttgggattacaggcgtgagcaactgggcctggccaagtgttgatattgttatgactgcaaatatgcattttatagctgatccttgcagcatgctgtaattacttttctttttctgcactttccatttttctgggagctgataactgtctgattttatgttttctatgttcttatcactaattcaaccacaaagttctctgacaattatctaaatctcccttcattacattgatgcaagaagtattctatcgatatcattttcttaaacaaacctctctttactctttcacctgattgatagttaagctagctataatattcttggctagagataattttccttcagaattttgaaagatacaatgccattgtactcctccagtaattctgataagaaacttgaagtcattacgatttctgttcctttacatgtgacctattttctctttctggaagtttcatacaccttctctgtcctaaggttctgtaactttctgaagatatgcttttgtgcagatctattttcatcagttttgatgggtgttaactaggtggtccttttcagcctggaaaagcatgactactgtcttgatattttttcctattatgattttctccagccctctgaccttttctaaattttctttctttctggaactccttttattcagatactgtacctatgagaccagtcctgtaattttttttttttttttttttgacatggagtctcgctctgtcacccaggctggagtgcagtggcgtgatctcggctcactgcaagctctgcttcctgggttcacgccattctcctgccacagcctcctgagtagctgggactacaggcgctgccaccatgcctggctaattttatttttgtatttttagtagagacagggtttcaccatgttagccaggatggtctcgatctcttgacctcatgatccacccgtcttggcctcccaaagtgctgggattacaggcgtgagccactgcacctggccaatttccttttttttttttttaaatctcctattttctaatcctttatctttttgctacactttctgggagatttcttccacgttattttctaactctctttgtccctaataatgcttttcttgcttaaggtctagtttgcttaatactattatagctaaatttgcttttgtatggttggtgtgtatttgatccgtatatttctggatatatattttatgagtagtgtatagattctgaaagtctctttaacaggcaagtttaatctgtttacattgattgtgattaattacgttttgatttacttagtacatcttattttctatttttaaatgccttttcttacctttgtgttttggtgttttctttttccttttgtttttccaggttttggattgattgaactttcctttaatctcttggattcctcctactggtttggaattttttctgttaatcgattactcttacatttttaacatcagtgtttgacttaacagattccagaagcttctaagtatctttacctttcttcatttgattcaaggacttctgttccccttcatctttcaaattattattgtcttttattttggatctacattatttttaattttttccttttaatatgtgattgttttattaatatttaattgtcaattcttatttagatttatccacacgtttatcggcttcttcattcatactattttatgcattctttgccttttttctgggtcagttcctatagattggctctttattaccccttattataacattcacctttctggaacatatttctttcaggaagcctgcctgcatcattcccaagcagctttaattaatatcttcaccatatttcatgttcacttatgtatatgtatgcgccttaatatagttaaaaatatttttttcttttgttgatttgtgtgtgttcataagcactatatcagctgttggatgttctggagtcttgtgccttgtctaggacatgtttgttttgagactttgagagggttactctggttctcagtttccatgatgtaaaacaaggaaaggagtgtatagctaaattacttatatcacaaggtgattataaggaataaatgggaaaagggatactaatatattttgcttgtagaattctgcaaatctggtggggtattattatttcatttgtatgtgtttgtttcctcagctggattataaatcctgtgatggtgaagaatgtgtcttccatctccttggtatttcttcattgctcttaaggcatactggtgacttattgacctgaagcagtaaaatgttagcaaggttttagtaaattgcacaatgacataaaaataaaatagaacttagacctgaagaggaagtacattaatggtgacttgggaataagaaagaatatgagtctgaaaattacgatataatccttttacatgatgtaagtgcagaatgacttagaagacttaataacgttctttattttcaagattgtcgacacgctctctgaaggtagtttggtttactaggaattcatgaactgaatatgtgattctttaagaaaattgtgaggcagaaaagacagattccattaaagaaggcattctgtttgaaaagaaggaacataaattttctaaaagctgtaaacagagggtaaaagaatgttgtcactaagaatccaaagaataggattgagcttctttgtagtatgcatttgaatacagctttgggaggttcagggagcttgattttggggagattagagggagttgagccatagaacatcatcaaagatggagcagctgcagataacacgctgtttggtagcataggaggattcaggaaatatgaaacatggggaattttgatgataatgagtagtcttaataagtgataaacataaaaactaggtcaaaaatgaaattgggaaaagataactcatgcattgctttaggagaaagaatgaatagaacaatgactgctaagtggaagtatataaatacttttaattttcagaaaagtttatggaagataattttctaaattattgttttgtcatgaattatgcttgtcaagctgccacatgcatcatttcactttatcctgtataattacgttaataatttttatttctgatctagtcattaaaacaagaacaggaaatcaggaaggctaattatgcttctagacttcagtaacttctgtcagcttagaatcctctttttcccttttgcttgccatctcagaccttctacaaagaataacatgttagaaattgttatttaatatagttggcttgccattaccttttcattaaagtgtatagataatttaaaataatacttcagtggtataactaggatatacctaatttttctgtttgttttcctagttttaatcttattaaatccatataaatactgcctgtctaagtttgttatgtgctgccatagcaaaataccacaggttgggtcatttatgaagaacaggaacttatttctcacagctctggagactaggaagtccaaggcactggcatgtggtgtcctgtgggggctgtcctcacatggtggaaggcagaagagcaaacaagacaaatgtgtcttcatgtagcagaagacagcacaccgcttctgcaagccctttttatagcagcattaatccatgcatgagggcagatccctcatgacctaaatacattctatttgtcttcatctcccaacattattgcattgaggattaagttttaacatatatatttgaggggacaaaccaatcaaaccatagcgctacccaatccttcttggaattagttgatttttcttttcactgtgattcacagctgatgatagcatgccaacattaagtcctaagcaatctgcttttaaatctaactttgtaaagagtgtgagcctttttaaaaatagactttaatttttaagaccgcttttaggtttgtagcaaaattgaggaggtgcagagatttcccatgtactgtaccctttgctcccaaacatgcatagattctcccactatggaaatcccacaccagagtggtacatctgttacaattgatgaacctacttgaatacatcattatcacccaaagttgatcgtttctagtggctttcactcttgattttgtacatttaatgggtttggacagaagtatgatgacaagtatcctccattacagcatcacacagattagttttactgtcttaaaatttttttcatgctctgcttattcttttctccttctctgcttatccgtggcaaccactgatcctttgtgtctccatagttttgccttctctaagtgtcatatagttagaatcagatagtttgtagctttttcatattggcttctttctcttagtaataggcatttaaggttcctctgtgttttttcaaggcttgatagctcattttttttttctgtgctgaataacatatcattgtctggatgtatcacagtttatttattcattcacctactgaagaacatcttggatgcttccaagttttgcaaaattatgaataaagctgctataaacattcatgtgcaggtttatatgtggacataagttttaaacatatttgggtaaataccaagaaacatgattgctgaatcatatggtaagactatgtttacttttgtaagaaactttcaaactgtctgttttccaaagtggcagcaccattatgtattcccatcagcgatgaatgagaatttctgttgttccacatccttgccaacacttggcggtgttagtattttggagtttgactattctaacaggtgtgtagtggtatctgtttaaatgtatctcttttgatgttttaaaattttcaattgacaaatggcatatattgctgaacaccttttcatatgcttaattctcataggaatatcttctttggtaagatgtgtgttcagatcttttgtgcatttttttaattgttgttttaagagttctttttagtttttagatgatagtactttattagatgtcttttgcaaatattttctctcagtttgtggcttgtcttctcattcttttgactgtgacttttgcagagcagaattttacattttaatgaagtccagcttatcaattattactttcatggattgtgcctttggtgttgtatctataaagtcattgtcatactcaaggtcatctagattttctcctgtgttgtcttccataagttttatagttttgcattttttattttatatgattcattctgagttaaattttgtgaagggtgtagggtctgtgactagattcacttttttttttaatttggctatccagttgtttcatcactattttttgaaaagactatgtttgttccattgcattgcctttttgcctttgtctaagatttatgcctatatttatgtgggtctattcctggattcactattctgatcagttaatctattgtctattttttctccaataccatactctctttattgctatacttttatagttagtcttaaagtcatatagcatcagtcttctgacttggttcttcaacttccatattgtagtggctattttgaattttttgcctgtctatataagctttagaatcagtctacttgtatcaacaaaataacctgctaggttcttaattggatttttgttgtctctagttcattttgagaagaactgacatcttgacaatattgagtcttactatccatgaacatgaaatatctcttcatttatttagttcttctttgatatatttcatcagttttgtagttttcctcatagatcatgtgcacattttattagatttatatttaagtattttggggagggctaaagtaaatggcattatggttttttatttcaaattccacttgtgccttgctggtatacagaaaagcaattgccttttgtgtattaaccttgtaacctggaaccttgctataattacttatgagtttcatggtttttggtcaatttattcatattttctacatagataatcatctcatctcatggataatcatctgtgaacaatgacatttttatttcttccttcccagtaagtataccttttcttgttttattgcattagctagaatttccatgatgagtttgaaaagaagtgatgagagggaacatctttgcctcgttcctgatcttaataggaaagcttctagtttttcattcttgagtatgatgttagttgtagggttttttttttcttttttttggtagatgttctttatcatgttgaagaatttcctctctacttgtagtttgttgagagtattttatcatgaatcgatgttggagttgttaaatgatttatctacatccattgatatgatcatgccattttcctttagcttgttgatgttatggattacattaactgactctcaaatgttgcaccagctttgcatacctagaaccaaatccagttggtcacagtgtatactttttaaaatacattgttagattaaatttttttaaatcaaatattaacaaaacattttgttgagaatttttacatctatgttcatgagagatattagtttgtacttttcttgtaatgtctttgtctggttttggtattggggtaatgctggtctcataaaatgcacaagaaagtattctttctgcctctaccttctggaaaacattggaggaaattggtataatttattccttaaatgtttgataaatttcacttgtgaacctatctgggcctaatgctttgtgttttagaaggttattaattattgatgcaatttctttaatagatgtagttctattcagattattttttttcttgtgtgggtcttagcagatgtgtctttcaaggatttgatttatttcattatcagatttatcaaatctgtgggcagagttgttcatagcatttcttaattatccctttagtattcatggaatttgtagtagtgtcccctcttttatttctaatattagtaatttgtatcttctctctctcttgtttcgttagcctgactagaggcttattgatttaatttttttttttttttttttttttttttagacggagtctcactctgtcacccagtcacccaagctggagtgcagtggcgcagtctcagctcactgcaacctctgcctcccagcctcaagtgattctcatgctacaggcgcatgccaccacgcctggctaattttttgtatcttgatagagacagggtttcaccgcgttgcccagggtggtctcgagttcctgagatcaggtgatctgcctgcctcagcctcccaaagtgctgggattccaggcatgagccactgcgcccagccaaaaaaaaaaaaaaaaaaaaaattaattttattttaagttctgggatacacgtgcaggacaggcaggtctgttacagaggtaaacctgtgtcatggtggtttgctgcaccaatcaatccatcacctaggtattaagccctgcatgcgttaactgttcttcttgatgctctccctccccgtccctggcagccccccatcaggccccagtgtgtgttattcccctccctgtgtccacatgctctcattattcagctccgacttatgagtaagaacatgtggtgtttggttttctgatttttaaaatcttttcaaagaattagcttttggctttgttgatttttaaaaatttatgtcctattttcaatttcatttatttctgctttaatttttatgatggcttttctttgacttactttggatttctggtttgcaaaggtgaaagtatagattattgattttagatttttcttcttttccagcatatgtattcaaagctgtaaatttccctgtaagcactgattttgtgatctcctatcctacgcattgttaaattgtattttcattttcgtatagttcaaattattttaaatttcttttgagatttcttctttgactcgtgttatttaaaagtgtgttatttaatctccaagtgtttgggtatttttcagatattgttctgttattgatttctaatttaattccattgtgacctgaaagcagacattgtatgatttctattcttttaatacatatagtgattctaataacaatttgaaaatcatttatatttatattggatttatatttatattgagtattggattactcgtctttcatctataggctcagagaaggtgtgttggtgaccctatttggcatcctttaattgtacttcaggtaaataattcaaatccagcaaagatctttagagagctaatggttaggtattatgcttgtttctggaagaatctccaaagcagacactctgtctctctaactcatcttggatttgtatacctaccaagatgcctgacatctaattgccagcctacaaatatttctattgaagtgaatgaggcataccacatttcctaactatacatgctttttgttaataatgggaaagataaggccagagggaaacctttgtgacataatcttagctgtgctctaaactctttcttctcacagactatagggcatatcctttgaccactatgttcacatttcctctcatgagttgctttccatgagtattcttttgctgtcatgtaaataatcctccagtcagatgacctaccctaccagctttccatacatgtttaaggattaccctagggttaagcctccaagctgtgatctcccactgggagtgcaaagtattgtggacaaataaatacaaataaatacaaagatgaacaagacacagtctctgaacagatatctactttctactttgagggaaagactttctcacaaactatttgcaggtgtaaataaaagaggggtcagggtgaaggaagagatagggaaaaaatttggagaaagggtaagagtcagcctcaagttccaaattggagcatgatggctgtcatctaagcttttaaattctattcctggtgggcattggtagagaatgttatcatggttgggtaatacacagctttaaagatagacttccttagatttgaaaagtttggtgatgttgcaggaacattcttttgcatgaatttccaatgagacaaagcagtctgtctaactgagggaattagctttgagaggaaaggaaataacaagcaatgaggatagcattgagcttcctttatttgattttcttgtttacataaaaatttttttatctgtactgatcttcattcatgataaattgttcctattgttaagcatcaggggatgattctaacatagaggcaaagaaggttgaaatatattggaatttgtatgttacagctaactcttaaacagtttttaccttaactacttatgaatacttgcatagaggttactgtttattgtctttctgtgcaataattatccccatgcttgagaaatcatagttttgttactctgcttttggggaagctccagtggagttcatccctacttcatttagcctttttaatacttcattttattccctaatgtccctgctttcacacaacacacactaacttataaagaatatgtttgtctttgtattgaatttcttcatctttaagaagtgttgtttatatttaggtaaagggttaacaaaattattttttcttctgcttgagaatttgacctttggctagcagtcttcctttgcttccctgggaactgatgaagggaacatgtcatttatgtttctaggcaatattacttatgtttagaaaaaaagggctgggcatggtggctaatgcctgtaatctcagcactcagggaggcagaggaaggaggattgcttgagcccaggagtttgaggatagcctgggcaacatactaggaccccatctccacaaaaaggaaaaaaaaattccctcatcagtaaattgcatctagactgtgaggaacttttaataaactataaataacttgataaggacaccatagcttatgggttccttgaatgatggagctttcagagttccatcagatatgagcatatctcttgtgggactctgaaactgcctgtggcattgttattagaagtattagattaggtagagcatgaggctgtcaaaagctacatccccaaacattaccaacacaacctgttaaaaagacaaagctgagttgaatttattgcttaccacggtaaaagggaacactgccatgcaaagctctagtagtgtactcagagcaggaaagaaaaggacagaatggattaagaatcgaaagtttgatataaggtaggtttttaaaaacagggagtggctaggggagtgggctttattagaactgggtaaagttcaagaatatgatacaatagcacaggattggaggaaacagcaaggcaaggattttgaaggaaagaattcaaagaatcttaggacataaactgtctgcagatacttttcactaaagagttaataggtctttgcaaagttcgtgtaataaaaaaatcaaaccatttatctgagcaggagagtcctggagaaagaaggtcctgctaagggagacagaacaatagtccaaagtcgtgttaatgtagacagtaagatagagttttagttttcagtgtccagaatgagtgagagtagtggtgatggtgagattagactatttctcaaggcttttaagtcaagatggctccagtacttgctgactgagtcttattttctcacttttaagttgtcttcttggggagactggggacagggagcatagctctttggactgctacacaaactactatgaggtctatgcccatggaagaggatgctaatactgcccttttgatgagcagtgatttctattctgtgcccttctgagtctactgataaataagcatgatcgatgatagtagtgtttgaatgtttagttgatcagtattgcagatacaaatacagagtttatgatcaaatgcccagtgtgcactttcagaagatgctagtttccattgtcatttgtttgtttttgggtaattgtgtcaggaaaaatcagtcatcttcagttacattcacatttatacacaggattacactgagttgtgaatggccttactcaaaaacttttacagatgttgcaattgtcctggtcacagtaaattaagaggtctatatcatggaaaccagtgcaaaaattattttaccatagattacagatttttagatttgctcaattttatgttcaatatgatgctactggaattttagaatcacttcttcttgtcttcaatattgaaatctaacaagttttaaaaaagaacatctatttaatgacatcttacctatgatggcaaagaaagtaattatttttaggaaatacacagtatccatgtacagaagcctgccagtacatatggtaaacatatcactaggactgatcactagatcaattgttaaatttctgctctttagtgttatgaatgactgtgtatttggtttgacttctgaggtgtggtggtacattgagaaatatacagggatggctctcttagtccattatgtgtagctataacagaatgcctgaggctgggtaatttataaagaaaagaagcctatttagctcacagctctgcaggttaggaagttcaagagcatggccctggattctgatgagggttttcatgctgcatcataaccttgtggagaaagtcaaaggacaagcagacatatgaggagagacaaaacccaaacagtgtcctggctctagaaaaatctaccattgcaggaacttatccattcctttaagaatgaatccagtcttgccagagtgagaactcacccactaccatgagaatggtatgaagacgttcataagagattcactcccatgactcaaacacctcccactaggccccatgttccaacactaccacattggggatcaaatctcaacttgagttttggtgggacaaaccacatgcaaactacagcaacgacataagaaggatttattcttctctgaatgtcatcctttaaatgaaaaaaacaaatcccttacttgattttatgcatctattcacctctctctctatatatatatattgaggtactcctttattataagtattggggaatctggcagtgaacaagcacacaaatccttccctatcttcataaaactgttaaagagaaattgcaccagacatttgttgaaaacaaagactttattcaagaccgttgcaatagtagagagagatttttgcactaggggagagggattggactcaactttgttgaaacaagtgtagagatgttggtcaatatgattaggtcatctaatcatttgataattggtgcttatcaaagtttgacatctaccctcctacagacattaggaaatagaggcactatctttcttgatgattatattccaaaggaatagcccacaagtctttgagaaagacattcctgggttataaaattggcaagaggctgggagattttcctctgaaagaggcagagaaagaatttacgatagaaagtttcttaaataaatgttctaagaaaagggaagtcaggatcctagacttaggaagaagccaagttaaggtcatcttggtcagagttaatattctggtgggggaaaaacagacagtaagtatatgtggacagtttaaattgtgtgtgtgtgtgtgtctgtgagtataatttcagctagtgatatgctctacaaataaaaataatacaggggcaataggatatagataatgactggggtgatgaggaggtgaacatgttggaaagcatgtaatgggctaaatgccgctgttaggttaggatttctttttagttgcaaaggaaagagattcaagtgacctcaagtgatggaagatttagtataaggatggatatttttcagcacatagcacaaataacagtggtaccttagaacctaatgtatggccctagaccaagattgctctggggaacttggcccaaggcagagccaatttctaatattagggaagtgagcctgaaaaaaggaaggagctgagccaaagtatagggaagtgaggaaaaagaaaatggagctactctttgaactccttcttcatgtatctcacagtctttcattgacattgttttctccagtatcattttcttatagccttaacattccatatgatcacatatggtcattaaaattgttgaaaaaagggatattttagaaaattattttggaggacatgactgcttactgttctagctattttcttagggtttgtagatctttagttgagtttcccaccactaatgtgactcactgactctgtctgtatgcttttctctcttgactgaatttcttagcatgcttgttaatttcatctcaacttaactggaccttggggtattcagattacacattgttactgggtgtatctgtttcttgctgagaatagcacttggatcagtacattcagtaaagcagattgttctccccaatgtggatgggcattatccaatctgttgagggcctgaatagaaaaagagatggaagaaggaggaattctctccttttttctgccttactacttgatctggaacatctcatctcgtcttgcttttggactggaatttacaccattggcctggttcttaggtctttggacttgaattgcaatatcggctttcttgggtctcctggttgcagatggcagactgtggaacttctctgcctccataatcatttgagcccattcctcacaatacatctctctctcttcctaaatatcaacatctatatacagttattcccttttacccatgggtatgcattccaagacccccagtggaggcctgaaaccacagatggtactgaaccctatatatactatgctttctcctatacagacgtacctatgataaagtttaatttataaattaggcacagtaagaaataaacaatataacaacatagaagaattactataatgtactgtaataaaagttatgtgaatgtgtttgctctcttccaaaacatctcattgttactatactcaccctttttcttacgatgatgtgagatgaaaaaatgcctacatgatgagatgaagtagggtgaatgatgtaggcattgtgacctagctttaggctactattgaccttctgataatatatcagaaaatgattacattcttcaggtgatcctggatcatcaagccatgaacattaatggttgaatgtcaggagcaggagcagataatgtcaatattagggatccttgatagttgaaggttattttttgctgaaacctttgggaagaacactgtagttggaaattattgtctcttttaaactcattaaaatgttgctatagaaattgtattccttcattgatcatataggagactttagtgctttgtttcatctgtggatcatattccataattctgtccattattgtctgtacaatttgaaacacttcagcaactttccatagtatccacattgctagttctgcttcacttcttcttcctctgtaggtgactcaacaagttcttctagtttctcatttgttagcacttctgatgaccttcaatatgttcttccacttcatcaagtatgttggcatattcttcttcactaacttgtcttgctgtgtgaattattttcttagcttctccattgatccccaggaagcctttaaaatcattcatgacttcaatccataagttcttccagcaggtatttgcaatttctggttttaattaatccattgcagttttgatgaacgctgttgcatcagagatagtgaatgatttccagcatttttttatatctggattagggtctgcattaattgctgatcaaatgcaatcaaatatcaggcaggtgcgtgtggcactgataaaccaaatgatgtcctggtcaaagggctgaaacaaggaggttgtatttgaaggtaaaaatacaacctcaacattttcattttcatagaagattcaggatggctgggtgccttctcatctccatctccatcttcatctccatccctgtccctgtatccatctccatctgcacgtccatctccatctccatttccatctctatctgctctccatctccgtctccatctgcatctgcatctgcatctccatctccatctgcatctccatctgcatctgcatctctatctgcatctccgtctccatctgtaactccatctgcatctccatctgcatctccatctccatctccatctccatctgcatcatctccatctccatctccttctgcatttgcatctgcatctgcatctccatctgcatctccatctccatctctatctgcatctccatctccatctccatctgcatctgcatctccatctccatcagcatccccatctccatttccatccccatccctgtatccatctccatctgcacctccatttccatatctccatctccatatctccatctccatttccattttcatgtccatcatgtcctgttagtcctgtttctctggagagccctgacaaattcacttagtctttcttctcttttgctttgtctctttgcttacatagcccatcatggccacttcagtcttactctgcttcaactctcattgcctgttacctcattccctcagcatttcttggactaattatttatgctataaaacaagagtcttaactttcagggttggggatagttaggagaagtgtctctgagggggttacatttttaagcccagtcctgagagatgcataggaattcaccagacaaaagaaacggttggtgggtagggagattgttttaaacagcatgtttggagatctcctaggtgagaaagaatatatttttaaggtaggaaagaagtcctatatgacagagtgtagagagcagaagacagatgctcaaggtgagtctgaagaggtaggcaggggtaggttgtgttaaggagtttgggttttattctaaaggcagcaagaaattattgaagaaggatttaaagcatccccaatttggtttgcttgtacacatatcataatgtttggaaaaaaatcagggctttaggcaatacacctcttcatagggtacatattttgatcaagctttatattcactgtggacccagtggatatgaaaatgaaagtcttttctacaaaaagaagcatattaaaagttactacattatggatattgctgaaaataagtgcctattctttgtctgtctgtctggccatttatgccactgtgtttcaattagaatatgaattggctaatacaggtgttatgcacaagttatttaaattcagatcttctacagaaggatgctagctaatccatggagtaattaggattatttccccgtagagctcttggtagcttgagttggagcagtgaattctgaataggaaaaagcaatgtaacttgttatctgggttagaggttcagataacaaatgtagtttgcaattttttttctgtctttaaattgcactctacaaaaggaaatggaaatggactatgtaatcattcatgtataaaatctatttagaataagggcccaatgcttatgaaacagagcttattactgttttgtggtttctatccagttgcctgatatggtactacctgtgaaaattaagcagctattaattattgattatggtatcagtgctggaggaatcagaaattattatgagagatttatatattggttaggttattctttaattaatgttttcattctttaaatcactaggttcccaagagtgctagagtgtgctagggataaaagaatgagcaaaacatgatacacatgcacaatcacaaagagacaagtgtcatgaagggaatgtacatggtcctttgagattatataatgaaatgacctgatctagatcagaaagtgaaagttccctaaggaagcaataactgagctataatttaaagtatggatagagccaactaggctgaggaatgggcaagaaagaattatagaacattccatttacaaagaacagcaagtgcataatccctgtgttcgagggagaatgacatattcaaagaattgaaaattggatggagagtgagcagaagagaatggagctagagtggtaagcctggacccgactgtgcaaggctgtataaacaaaacagattttagaacagtgggaagctatgagataattttaaactagcagtgattttgaagaggtaactcttatgcagtgttcagaacagattgaataggtttaaacaaatgccttgacagttaggaaactcccgtagatagaggagagagatgctgttagtgtgatctaaggtgatgacagtggaggtggtgagaggtagataaatttgagagataggagttaaaattatgtattgataaaaacattattactacaaatatttaaaaataatggaaactgattcagaacaagtttcaaaatctaactaccagtttgcaggaaagtgggaggacagaggattatactagtgacaccataatgatgcaaacatcagaattcagaatttaggaaactctataagacaaacaatctgtttttttatataaataaatttgacttcaacagattaaaaaaaggagagggaaatgtgtagattaagagacacattaacaaaacacaaagtgtggaccttctttggtcctaattctaagaaaccagctggagagagggtgggcattgagtggactggatatttgctgattttgagaaatcatgttaggttttatcaggtgtgataatgggtgatagttttgttgaattaaaaaatatgttgtcttttagagacataccctgaaatatttatggacaaaattatacattttggatttgcttcaaaataatccagtggggccaggagtttgctgttaaaagagagatgtagaagaaacaagggtggtgataagttaataattactctagccaagttgtgggtaaatgggggaattattatgctatttacctgtttttttgtatgtttgagtttttccatgataaaatattgttctaaaatgaataggattttaaggtaggttgggtgaggtgatgttagagaaagggatggcaaggatgcttcttggtttctgatttgcttagtcacatagctgatttaggagggtgagggggtatgttaattttttttgcttaatgagagggacatgagatgtttaaatatctatgggaaaggtgtagttgaagagggtatggatggagttttgagtagagtagagaaggcttgaaatatagtgagcaggtaaatttacaagaaaaacaggaaacttgctaggtagttgacagatgcattgaaagtgatggtaatgaatttatagtggaacccactgtataactgtcttgagcagttcataatacagttgtgaagaaagctggtaattgagccaggacttgaattttgatagtgggcataatgaagagacagtgatgctaagcaatttagggtgttgatgttattgaaattatgggattatataagaaaaaaggtagagaatgaagagggttaatacattggggaaaggactacaggttcagtaaggataaactacttttgcagttggtgtaattgggccattgatcttgacagagaagcagccatgatcagatagcaggatgattcaattcaaaatttcagagctggagaaagttttggaatataacaaattttagattttgatcatgaaagtgggtgtctgaggagaagtagaaaggttgttggagatggattggtgaagaaactccaaggccaggctattggaaggctcacctccatggatatcacccaaggtgatgttaagttttaggtgagattggcttttagaaatatttataagatttatgaagtaataacttggagttctttattctcatgaagtatttgttggcgtcaatccatgcaaagcataatagcaacatatttctgaatataacagataaataacacccaacaattgtatattaaatcttactttacacacccatatctttcctatttgggataatgttgtattaagatgggacctctctattaacgcgatatctatattgccccagtgttctgtcctagaaatatgaaattctgtgctcataagcatgtaacatatgcacttttcttacatttttatcagttatcttttttcctgcatgtcaaataactctaaagctttatagataatatccaccataatttattcaactcatgagtctgcagttcaattgggtggttctgctgatttaggctaggtttggcttatctcaactaagtttactcatgcatctgtggtcagccgctgagttggctagggcctgagtagtctaggatggctgaaatgcatgactcaaagggatgcttctgtggtctctcatcccccaaagcctagtgagtcttgttcacatggcagctgggctggcttccaagaccacaggtggaggtggtgtgcaaggccttttgaggcctaggcttggatctgctgcagtcatttatatcacattctgttggccaaagcaagtcctaaagtcagtctagatttaagagataggaaacagaccctctgtcttgatgggaggaattataagtaacattgcagaggggtatggatacagggggaaaaataaacacagctatgtttttgaaacaatctaccagaacattgtattgtgagaatgcaaagtgtaggtgcaaaatcatgcaactgggtatgacaagtctgtattcctgctctttcatctccacttaattgcaacgtgtccttggacaagaaagttgaagaaaataggaaggaatattggctgaattatctacctgctattattagcgacggtcagataagagaattgatttgtattttggatggctttatcattgcaagatattattttatgctgataacatctcacatctctttaatgtggaatccacaaaagtgacttgaagggttaatggcacagaggtgtctcctggatactgttccttgtgctactatggcctgaggggcttgtcaagtaaggaaattggctagaaaggtggaaggctgatggctgaaagtcctccattcaccctgttgtgttctgttatgcacttgatgtatttgatattctgttccacagtggaacctcagggatttgtgtactaatagctcagaggctgggatagaggcagaaagccactgaagtgcagaggagggcacagaaagattggaaagtttggagtgaaatgaagcagaaaatcaatgaatatctaagactggtggaaagtacagcatcaaaacattgttataaaaaaggcagaagtacataagaagggcatttttggaggatcaacctctaaaactgtctagtagtatcatataagtgaaattaaacttgccaacaggaattaaatgcaattcgtggcccaatctaaaggttatgagagtgaatcataaaataaggaaaatctcttattttagatacattgatagctatgactccctgcccccccccgcccccaccaaatatcatgggatgagtaagaaattattaatctgaatcatgtactgtggtgaaatgttagcttaataacacatcagtgactattaggttttccataacatttttttgatgtttaaatatgacatatttaaagaaaattatcccaatcttaagtgtacagcagaaagaattttcacaaagtgaaccacctagtgattagtagctgtgttaggaaacaaaatactgccagaacccgaaggtctcctcatgccttttgtaatcactgcccctctcccaacaaagggagacactatgctcatttaaccccatggagtagttccatctgtttctgaactcttcagaaatggaatcatacagtatatactcttttgtatctagctccttttgctcaacatgatgtttgggggcaaaaaggagtttggtttgattggagcactagggctatgcagaggcatagagggaaatgacctggcagcatagacagagatgggattgcgggcattggaggcctgttcaagagattatgcttaatgtctgtgataagcccttggacgatatgctcagtgctgcctttcaggaagattaatattgcagcaatgatgtaggagagattgggggtaaggacaggaaggctgcagcgtggttggttgttgtgggaaatgcactcagaatctgaaggactgggtctgagtgatacttctgttccttgctaactgtgtctttggacgattcgttcaacctgtctgatcttcagtgtcctcatgtgaacaatgaaggtaggaatcctgctattataaaaacaaaatgaattgatccatgttagagaactgcagactatatagatataagagttccagggcctccacggacccctactgcgtggccattgctgtgactgagtggagggaaagaggaggctaggtatttaatctactttattcagtcatgtagagaatgctcatgtttaagccaatattgcaggtattcatgtggttggataagttacacattatactctaggtatagagactttcagaatgaacgaaggaaaattctggagacagactgcctgaatgtgaatctggcttcctcctcttactatgtatgtgaacttagtccaattatttttaacttttctgggccatgctttaatgataggtaccacataggattgttctgaattttaatttaattaatacaaagaaaacacttagaatagtacctggcatgtagtaaatactcaatgttattattgccttgtctgtcttttccaagtagcaataaatgacctaactttctgttggttaactgcatagaagtgtgtggcacaggcccattgaaatcctgtttgcatccttctatccctgtagctccagcctttttccaggttacccacattaggattatacagagtgagctcagccctcatccatgcactgtgtatttgaatataaatagtgccctgctccaatctccctttttccagttcctttcacatttcctaatagagttgagttttgaggggtttttttttttttggcagttctctgatgaatatattcaactgatctcctacatgtgtgacctagtgatatggtttggctgtttccccacccaaatctcatcttaaattgtagcttccataattccgaggtgttgtgagagggaccagttggagataattgaatcgtgggggtgtttcctccatactatttttgtggtagtgaataagtctcatgagatctgctggtttaataaggagtttctccatttgtttggctcttattctcttttgtgtgctgccatgtaagatgtgccttttgccttcctccatgattgtgaggcctccccagccgtgtggaactgtgagtccattaaacctcttttcctttacgaattaccgagtcttgggtatgtctttatcggcagcatgaaaatggagtaatacacctagtcagtgtagagattaaggagaatttctcttttgtactcaatgacatactctattaatgcaaccctaagttacattgactgttttgttctctacattatactgttaaatcattctgagtttgtaattaatcaaagccctccaaattgatccccaacatttgcttgtttcataaaagtttattctttcatttattgaattattggctgcttaacatattaccatatgccagctttgtaattgacagtagatctgctccttaaggagtttcctggaatgtcatacatgcaaacagacttgtagtaagtgtgacagtgaaaattgttataatagagatgtgcagaaactgtatgataacataaaggaaggatatcgaattctcccagtgggggacgggggagagtatgacaataaagatggcagaggcagggagatgatgtcagggaagtgcacatggaagagagagtatttgtcataaactgtatgtaagatcctaaccactaagagtgggggaaggaagcctttaaacagagagaataacttgtaacgtagcatgaaacagcatggacattctgggaactactcctatctgagaatggcagcagcctagagaacaggtggaggaattggcaggagagatgctgagcaggtaggtaggtacaaggtcctgatgggcttcgcgtgtcacacttggaaattaatatttattcctataggtaatgagccaacatgaaaagagtttatattagagagggacatggttagacagttgtgctttaaagaaatacgagactgatagcccttgtagtgtgatctgtgaattagaggaagcaagaatggaggtgggatggctgatggagaggcagttcctgtcacacaagtgagaaaaaaccaggaaatcatgaccaaacatgtctatgggaatggaagagaaggaaattttttgagagatttattaaatagatatattttgagcatttaggcactttgagtggtgagaccctcaggacttgataaccagctacatgtggcaggaaatgggaaaagttgaggcttcgccccaggtctgagtgactgggtggataatgatgtcattcacatgatagaagataactgatttgggagaagcaaacggttccctttaggacctatttttggatacctgtgggacatccaagaggaaacgcacggcagacatttggcttagtatcaataactcaggagagaggtttctttttgtgctaagtggacctgagaatgattcatatatggaagatggttgaaacctagatatgcagtagatcaaccagaagaggactgagggcaatcatgagaatcctaacatgaaatagaagcatggagaaggatagccctggaaagtgattttgagagggcgtcagttggagggttggctaaaaaccaagaggaagtagtgccatagaacctatggcagagagagtctataatgcttgatatatatgtgtatatattactaatattttatatatactttatgtatatatatcaagtatgtatatttactaatattttgttactttttaagcttgtaaaacattttataatgtttaagtggtgtcaaactacttctaaacctgtggcagagagagtctataatgctctctctctatataaaactgatattttatatatactttatatatcaagtatgtctatttactaatgttttattgctttttaagctcataaaacattttataatatttaagtagtgtcaaactacttctaaatattagaaaatgtgcttttgagtaagcagaatccagagcaggcctgtcaggatggtcacctccttttggagcaatctgcttgctagagatgagggatgtgtgtcttcccaccatttggacctcattctagtaggtcctaactcatgacattctagttggggtttgtgttggctttcttagtttgaatggggtgaagattttctctctgtttttccttctctttgctttaagctattttcagagaaaagaattcaggtagaaatgacttttctatgcagtatttaaacagaagtcccaaagttcctttaaaagtttgagctaaccagaaaatattatctataacatcattgtttttatttttaaactgaactctgtttgagtttttcatgtatttcgattatgcgtttctttagagcagaagtgaggcatatttatcttaatatccccagggcttaaaacagaacttggcatataggagtgctccataaatgtttatttttgtattacttgttgatgactgcactgttccatttttgaaagctttcaagccttccaacatctcatgtcactgaattacacaaatttgtcttctttatttcattaattctactctttttaactgactaaagtttagcatctttttcccccaagtgttaaagtgaaatgggaatttgtttttaggctgtatatatgctacaatatttgagagtttcaacttaaatagaggtaggcctaaggaaattgaagttgaggcagaaacccagcaggatgaccctgctactcctttgtttctatagggactcttgtttctacttctctttgttatctttctcttttaaattttcattatgaaaaatttcaaacacatgctgtcttatagaatatagtataacaaaccagatgcattcttaactgtttactttttttttttttttttttttgagacggagtctcgctctgttacccaggctggggtgcagtggcatgatctcggctcactgcaccctccgtctcccaggttcaagcaattccccctgcctcagcctccaagtagctgggattataggcacccaccaccatgcccggctaatttttgagtttttttagtagagacagggttttgccatgttggccaggctggtcttgaactcctgacctcaggtgatccacctgcctcggcttcccaaagttctgggattacaggcatgagccactgtgccctgccaactgtttccttcttaactgtcaggaactttaacatgcataattagagtcttattaatatacatctattctactgcaacaacaaattcctccttgctggtcagaattcatgtcagagtaagttatattagattccttgtctacattctgggagacagggttagcagtaaggaagtcatggatacgaatggatttgcaggtaatgactgcatgagaggcttcctggatcactgctccattttccctccctgcctattttgtgaactgcatcaggaatgaacttatcctacctctgcaggtggtctattacatgcttccaaaaaagtaactatgggactttcattgatttaagaaagcctatgctgtgctttgatttggataatcccttatttgttattttaagcttctcaacaaaatatgaattttccggctgctgttctttttttggtgttatttttggtgacttttgctagagaatggataggatagtaggccacacacccatttcaggttcagctctgttcacgttttcagagctctagaaatgcagtgattctcatgattgtggcaggaggtagtggggccaacaatggtatttgttcattttccccatatataccaaagtatttcctgtgtgattgcctgtaagactgtgcttcctttttcagagttctgctatttgtagctatcataaaataagaaatgaaaagaaaccttttagagtagagggaaagttttataggaaaaggaaataaaaggtctgaattcaacactcctatttgtatactctgtatataacgcatttgagcaattttcatcttcggtttctctctgtaccatttatattctacttatgaaaataaattgggaatttcttagctaatgaaatctgttttatctaataatttgaaaatatgaatttttgggtaggaagatatctatttttttaaagtttatcattttgacttttttgttttcttaaaatcagacctataatatacatatgttcttaatatataattggatggttaaatttatgaaggtgagccattgtattgtttccccagcctttttttttcctgaaaatgtggtgtaattttttttttttttttaaatccagggaatcagcagtctcttcagttctttaaaagtggtgcgtctcttacgactgggccgtgtggctaggaaactggaccattacctagaatatggagcagcagtcctcgtgctcctggtgtgtgtgtttggactggtggcccactggctggcctgcatatggtatagcatcggagactacgaggtcattgatgaagtcactaacaccatccaaatagacagttggctctaccagctggctttgagcattgggactccatatcgctacaataccagtgctgggatatgggaaggaggacccagcaaggattcattgtacgtgtcctctctctactttaccatgacaagccttacaaccataggatttggaaacatagctcctaccacagatgtggagaagatgttttcggtggctatgatgatggttggctgtaagtattttaattttttcattgaaaattattgttattggcaattttcctggctacaatctcagataggatgaaaacgaactactttgtttacagaaaggtatttaatccatcttatttgcaattgttttttttaatctaccttagaaaatagaaatgcaaaataatatattttactcttcaggacataataatgtgtgaaaaacatattaatgtgtgtacccagcagtgctctcttgaaggaaccaggaccagcatccagagaggtggcgtttcgcacattccatagattttgttggtaatgtgttaaattccaaaaaaaaaaaaaaaaagagataggatctgatgtgaaatatattgtttataaatattctagttaatactgaattcctaaattaaagttgaccttaggatacacttttgtataggtttttacaattaagactaggagaaagggtttataaagctagtcttcattatagccactctaggttgaatatatgcctgtttgagagaatgaaaggattactgaatataagcccattcagcaatgagaagtgtctaggatttaacaggtatacctgggtaccaagttcttggaagtagaataccccctaaaggaacaaagaccatgtgctctgcactcagactgtgactggatggcatcagaagaccagaacataaaggaaatacatacaaagaagctgcttttgaagatcttgagggagacttcaccatcattcacgccttcaagttgacttagatgacttatccacacctaaactaaccttaagattgtactttgattttgtatcctgagactttgctgaagttgcttatcagcttaaggagattttgggctgagacaatggggttttgtagatatacaatcatgtcatctgcaaacagagacaatttgacttcctcttttcctaattgaatatcctttatttccttctcctgcctaattgccctggccagaacttccaacactatgttgaataggagtggtgagagagggcatccttgtcttgtgccagttttcaaagggaatgcttccagtttttgcccattcagtatgatattggctgtgggtttgtcatagatagctcttattattttgaaatatgtcccatcaatacctaatttattgagagtttttagcatgaaaggttgttgaattttgtcaaaggccttttctgcatctattgagataatcatgtggtttttgtctttggctctgtttatatgctggattacatttattgatttgcgtatattgaaccagccttgcatcccagggatgaagcccacttgatcatggtggataagctttttgatgtgctgctggattcggtttgccagtattttattgaggatttttgcatcaatgttcatcaaggatattggtctaaaattctctttttttgttatgtctctgcccggctttggtatcagaatgatgctggcctcataaaattagttagggaggattccctctttttctattgattggaatagtttcagaaggaatggtaccagttcctccttatacctctggtagaattcggctgtgaatccatctggtcctggactctttttggttggtaagctattgattattgccaaaatttcagctcctgttattggtctattcagagattcaacttcttcctggtttagtcttgggagagtgtatgtgtcaaggaatttatccatttcttctagattttctagtttatttgcgtagaggtgtttgtagtattctctgatggtagtttgtatttctgtgggatcggtggtgatatcccctttatatgctgctataaagacacatgcacacatatgtttattgcagcattattcaaaatagcaaagacttggaaccaacccaaatgtccaacaatgatagactggattaagaaaatgtggcacatatacaccatggaatactatgcagccataaaaaatgatgcgttcatgtcctttgtagggacatggatgaaattggaaaccatcattctcagtaaactatcgcaagaacaaaaaaccaaacaccgcatattctcactcataggtgggaattgaacaatgagattacatggacacaggaaggggaacatcacactctggggactgttgtggggtggggggagaggggagggatagcattgggagatatacctaatgctagatgacgagttagtgggtgcaacacaccagcatggcacatgtatacgtatgtaactaacctgcacaatgtgcatatgtaccctaaaacttaaagtataataataataaaaataaataaataaataaataaaaaagattgtactgaaggtgtgattagcattattagcgcctcttgagcctttggatcatggtcatcggtttttgtgtgtgtgtgtgtgtgtgtgtctaagctgtcctttctgagattccatgttgcagaggcttagattttgacattgatggcaaaagttctgggactccaagggcgtttgctggaacatgaaaggttaatatcttgagtctaagcaggtagttttcatcatttagaatgtctgaaagctattgaagcatcagtgttggcagttgttcagcttctgtttgtctaatgaacccttgtacaggtataggaacaagaacaggcaggctctatttgctggttagagcttgcagttagagggagagtgagaattccaagtgctgtttgctccagaggctttcagcaggaaaatgtccttatacacagagagagatgctgatgattaattaaatggatacctacgtatacaaagtggtaagatgtatgggcaaaaatgtactttataaattcagaagacaacattttgtcagaggctgtatttagcaccatactacttttaatatttatacattttgccttatacttgagcatagttagattaaaaaagaaaacctttttgttttgaagtaattatagattcattggaagttgcaaaaatagtgtggagagggcctttgttaccttcacctagtttcctccaataattacatcttatataactatagctcagtatcaaaattgacaatgatataatgtgtgtgtatagctctgtattgttttatcacatgtgcaggtttctttaattacaactgcaatcaagatacagaactgttcctttaccacaaagctgtcttttatatgtaacctacccatttcccccaactatccctattccctgaaaactactcatctgctctccatctttataattttgtgattttgagtatgttatataaattaaattatgtaaaatgtaaccttttgaaatggactttctccgctcagcataatgcccctgagatccatctaagttgaatgtatcagtaattaatttgttcttttttattgctgagtagtagttcatggttaggatgtactactgtttaactcaccatctattgaaggacattgtatttgtttccagattttggctattacaaataaagctgctatgttaatacctaggtgatgggttgatattgcagcaaaccaccatggcacacatttacccatgtaacaaacctgcacatcctgcacatgtaccctggaactgaaaataaaaaaaaaaaccacacaaaaaacacaaagctgctgtgaacatttgtgtataggtttttaatatggacattagttcttagttctctgggataagtgcccaggaatgtgattactgggacatgtgataagtgtatgttcaatttttaaagaaattgccaaactattttacagagtggatgtactagcacagttatatttttcataagagaattgtaggaaaataaaatctatgtagagtcaaaggacacaattatttactttgtttctgaggccccgaagttgggaatcatcctagatttctgtttttctatgttacatctattaataacatggcctgtagggtttaccttcaaaatacatttgattatttctctctccttccatagattaccacccaagaccaagtcaccatcatctctggcctgaacttttgaagtaacctcctatatcttcctaattttcttatgcttgccctacaatctctatcccaaagcttaagcagcccctttaaaagcaaatcagatcacaccattcctctgctcaaatccctccaatgtgtgtgaaataaagtccagattccctagctcatctttcaaggccttcctgatatggccctgcctacctcactcacttcactttcaaccattcttccttggcttatcctcctaagtccatgctcaccatctcattttccctgaaaacatcagtcttaggcctgtctcagagtctttgtacttgctttcccattgcttataacactcctctcctgacctatgacccgaattcatgtggctctccacggtatcgcctctacagaaattccttccagtgctaccctactataaaaaaacacctcaatgccaacctgtagtctctactctttaacctttcccttcattgtccctaccacgatccgaacccacgtgtacttggtttttcttttccttcagaatgtaagctccatgagaggtaggcctctgtccgtttcttgtatccccagtatctaaacaattcttaagagttttgtgctcaatcttaatttttcatatgaatgaatgaaattgaagatgtccctgatggtcgtgatgaagatcttctgtccttgaatccatcccagttagatctacgatcaagtacgtgccagcaaaatgcagggtgttagagctttgaccccgattcctttgtgaaaggcctggtaagctcacctgcattgtcttcctttgggggtgtagtcattcctttagctgagttggtaaccccgtgtcttatcggcctatcgatataagttctaagaagcaagtcactggaagctccaacaaaatgttctctcactgcttcttaccatctaccttctgaatctacctacagtggaaattttcacgtatattcagttgggtttccgaaactgtatttggttcagagttggttctattccttctctccttcatgaatagccaattatacttgctagatctaaatttccatttctcctcatctcttccattttctgaagttcctgttttgatttagagataaaaacctagttttaaagttggttgttttcttctctgagtttctattatattctttgaatacctgagtagcagttttctgtttgtataccaatttttgacatcttcttgccttttgacttaggttttccttttatgcttctgattaagtccagtttctatagccagagtattccagggagatacctttaaatttcccttttagtccttgggtccttggtaatttcatgggatatttcctttgaaaaacctgagaatattataaaaagctgtctagattcatgaagtgttatagtacctttgcacagttccaaaatttgttagacccgaaatgtcaaccaaatttggatattgtagctctttgtaaatatagtatcatttttttcctacaagaacaccaaggaaaacaaacaaatgaaaacaaaccacctgcattcttagaaaccaatatgtgctagcagccatagccagggatttagcggtgtgtgtgtgtgtatgtgtggtggggaagataggatagggaagaggcaggtagaaaacagaaaggttcattttttcacttgtgccagggttctagtcaatctgtgtggctgtctaagaagcaccacttgtaaccttataactcaaaaacagaaaaatgttttatcaaaaggttgatggagacaccaactgcctatattctgttgagaaaaataatcactacttgcaaatgatagactctttttctcgagaaagtcatccaaaatttatatgtctttcagaaaaatttagaagtatgaatgtggcaacaatcccgattcctaggtccttatgagccctcttttcaatggcctttcctttcctaggctcttgctaccataatgctaagttggatgtgggctctgtctaagactacagtctcaaaagttttccttgttcatatatcagacagatcttcaaaaaatagtataggccttcccctaattccactcaactgagattccttccagatccctcctatgtcagcagggtcccaggatacttttcttacctgctacctgggaatttcttagacttaaatcctttgttcctatatttgcccaacatgggaaatcttcctgttcagatttctgaattggaagggttgcctgatgcttctctatatacatctaccgtcatgcattctttaccttaaatttgtcttctcttggttttttcatactctgtctgccttgagtgacctccactgctctggtggcagccattactccccagggtagccacatcctccccattcctctgtatctgtccattcatgaatgaatccagctactctgctgacattcacaaaattcactaccaaagggcttttgtgagagaatatttttgcagcacttgtagaaaatagtatgtatgtacatacgtatgtgtgtgtgtatgtgtatttagatcaagatgtaagtaatctccttgctaatttgcttggtaaatacttaatgatgccttcatgaagtgttttctaatccattttatttacataatcttattattgagcccctaataatattagattttctaaggattaggcacactgactaattttgctgctattcagaaggcaccatagtacgtggatgatttattttgatgactataaaacaaaggaatgcaatgatggaatttttctaataggattatactcttgtcttcatatgtttttaaaaatcctcttccaaagatttatcaagaaagcagttacttagtcccttctttattgctaaattatcatataaactgtattttagtttaatccagccgttataagggactctacatctgcatatttcattataattttctaaaagaaagaaacatataaaataaaaatatgttttgaataactctttgccataagttcaaccataatttttttctctctccatatatatgttttagtacactgttaagtacattattaaatatgtattcagcatatgtcaaagggctatgagattggaatttgggtattcattttctctaaaagcatttttctactttttctattgtctgctttggtaaattgagacaggctgacccatgcagtatatgtcaatgagaatttgtcctgctgtgatgcaatgcaaactgagtcttataaagcaaaacaaaccaaactaaaaattataaatataaaaattgctggggtttaattggtagacaggaagccctgtcataatgatgctaatctgcaattttcaaataggatgtaattggtaatcacgtaaacatctaaaaactttctgtaattgactagtatgatctgtaatgcagtagacaaatggtttagcacatctaaaagtatagcaagaccatctgccagtgggatgtgtatgacaagaaatctgaatcttcatgtaggcggttaagtgcaactgggaagcatttagttgcacactggtcaatcagcaccatacagaggagaccaatgccacacactgtattctcatgttgatgagtttattcagcatcctctgtggaattcagataaaagtcaagctgaggttatgggcattgccctgacttctccccaccggaaaaggaaataaatagaagatggtaagatccagaaattgggagaatatagagtaagttgggagcaaaggcccgtgtgaccctggagagtctttacatctctctgagctttatttatttttttcaattgtgaaatgccaaagttgaaatcagtgacttttaaggtccctttcaggactaacattctatacttctaaggttctattggtgcatttatgcccctgtccatggcatggagctggttattggagatgaggttaagatggaaagaaagtggtgtcacaaagatgttagggctttttacatatagtgcatacattgctttatggagaataagatgtgttttctatagaaaatgttctgtaaaggttaagaggaaaagttgtcagagaataaatattatggagaaaagaaaatatgcttttggaaagagaagtgtttttccatatagaaattaggcagctaggaagactgaaaggcatgtgtctcagggtaaaggatcagggcccaggaagagactgcacaccatgcccagtgggacttggacttggagaggtactcgacctaggtggatatccagacaggcttaaaagtgggttgttgccctttcctaatattagaaaaaaattattctacaaatcttaatatgcgacttcaggtatttcaggtataatattaagttacatgttaaaatttgtcttggccttgttattgcggtgtaggtagaaaatgcagtgtgtacatgctgattttcatttctggctttagttttagccagatggggagagctttaagcctaatgtttattttggaaactgggtcaattctttgtgtctgctttaccatagcttgtaaagaaaactttgtcttttttcttttctttaatgagctgagtttcgcatgagaaaaaacattttatggagccccaagttcagggttataggcaccttttttcatggtttagcagtctcagatgtgtagtccagggcagtctcagatgtgtagtccagtagttagaaaaagactgtgtgatgtacactttactccctgattcttattccaactagggcttgtgtcttttgcaggaatgttcttttatacccatctttcttttcattcctagtcacattttcacaaagcctctcaaattctgtaaaggttgactttccccagaaaacagcatgacattttcttgatagcctattaactagcctgaacgttttacaaggatcttcatctcttgtgtccttgtatcactcaaaattatttaattcattcagccttgtgccaggtgttctggtatacattggtatttaagaaacactagatacttttgagccctcaataaccttttaatgtggtaagagggtcaaacaagaaaatcactgatccatctgtctctcccttactctctccatccccatctcaatgtccacctctgccttcatcctcgtctcatctgttcttatactatgaattaagagggaataaagaagctggacttgtgagaagaggatctgtctttgtcctgttcatcattgtgtatttagcacaaagcattatctcctacttgatggttgtgcccattgaacacatgttgaatgaattaatgaatgaataaaaatgtttgcctagttcagcctgagggagcccaggaggatttctaggagaaagtgactcttgagctcagaatacaaaataagtaggtaaatgaggcaggacttagctattttccaggtatagagaacatagtatatgcaaaaatgtaggcatcaaatagcttggccctttcggggaactccatgcatttcactttggcttgagtggaaagtagatgtgaatggaaagaaatgaaagaaccaagatgtcaaaaagctttccatagcttcacaaggagtttgccttttatcctaaaggttgtgggataaataagaaaaatttgattctttattgtggacaatgaattggaggagataaaggctactggcagagaaaccagttaggagactgttgcagcaatccaggaagacataaattgaggtggtaaatatatggaggacagtatagatttagagttggcaaactttttttttttctgtaaatgggcagatagtgactatcttaggctttgtgagccatatggtctctgttgcaaactactcacctctgcttttgtagtgctaaaacagccataaacaatacataaacagatgagtgtggctatgttccaatacaactttaagcaggtggcagatcagatttggcacgtggtctgtggtttcatggtttgtgaaaagactgtggactttggagtcagacaaatgaatctaggttcaattttttgcatcataatttataagaatttatatcagttatgtaaaccatcatttgtaaaatggagataatagtctctactttgcagagttatttttgatactccagaatagattgtacgtaagcttcctgaaaaaattttttttttgaggcagatttttgctcttgccacccagactgtagtgcaatggtgtgatctcagctcactgcagcctccgcctcctgggttcaaatgattgtcctgcctcagcctcccaagtaactggggttacgggcatgcaccaccacgtctggctaattttgtaattttagtagagttgggggtttcaccacgttggtcaggctggtctcgaactcctggcctcaggtgatccacccgccttggcctcccaaagtgctgagattacaggcatgagccaccatgcccagccaagcttcctgaaactttaaaaaatgtttttatgggtgaattaatgaatatgtggggtattttagaaggacgagttcaaaagcacttgtagatttctagcaaattcagctgaatgtatgatgaagcttttttctaaaataggaaaaaggtgcagttattactggaggaaagtggttctttttcctgcaggttattctgatggaaatgttcattaggtggttagaaatgtggttctggtttccagagctatgaggcacagagagatctctttgggaataacaatgtatagaaagtaatcatgtcaaggaagtgtacggtgcagtcagcataaagctggccaagagtagactctgaagaaggagagccacagaggggctgagaagagaacccagtgaggtagaatggaagcatgactctggaaggagagtctgttgctaacaaaggatgagagagctttaagaaggaagggagaacaacaggaccactgagagaggaagtcagaagagatctgggaggccttaggaggtcatcagtgactttatctgacttgtttgattggctagttgaggggagagagccacatggggaactcatggggtccaaaccgttttttctcctatatgaaggaaaataatgtattattagccattaacttcatggaggtagattatgctgatgcagtaattttcacagccaatatgtttttctaaatcaaatttcaaattcaacaaaatatacttgttcgattattagatgcataacatagacatagaatttctcttttgtgttataaaacgaaaggtagcattggcttagaagtttgtatgaaattgaactttcttagaacagacgttttagtcagaggagaattttatttacttatttggtgactttccaatgaatttaatattaattcctatgagaaaatatttttcaggacacactgtcacctggtaggtgaagtgatactctggtgtagaacagacagtggggatgtagatgattctcacatatgtgatatccatcaattgacatctgattttaattttgcttaatatgtaatacttaaatgttttttcacaggccgaaagactcacaaattcatagatgaatatatttagaacttattaaaataaatgtcataccaaaggcctttaggcatggatttaaggatttctttgatatggccagagaggggattttatttggagtaatttctaagccagctcctaagtgacttcttcttacctacttgtttaatattttcatatgttgtgacaactgagttagccctccctggaaggttaggtaccaggcacatggtggtagctttaggctgagtgtgtaggtaaggagatctttatggggtgagaactatatttaagtggactctcaggaaatactggaggctttaaaaattccctttgaagctggctctgtagctaccctttttagactctatctcctttaaagttgagcttatttttaacaacacccccccaccagatcttaagctgtgaaggtctaatttgggaccattactcatttaaagtgtcctgtaagggaaagacatttaaattcatgcccctatttaggcatcagcaaaggaggcaggtctggtattgactcttctgatgagacttcggtatgggaatagtagacctcgggaacttttcttagactgggctgttgagttttcctgttggtttccttagaaagggtccaaacggtcccttcataggtctgtttccccaacttctttcccttatgaggacccagctagagaatagcagaccctcctccccaggcacacactgacactccaaattccttcatcctgtgcccttttgctgccttaacaactccatctggatctatttgtctctttttctgttccagggttgctgagcactggctggagtcaactagacagccttgtgaacagctgcccctaaaatgaatgtttagcaatcttacgaatcttcttcctgtaacattttgctgagcaacaattcctgtacaatttgcacacgttctcctcctttccgaaacctatgaccactcatcttcattgcagcagatggccttccttttacttctgtgaaaaagaaatgtgttgcagatgtgcattcctttacactcctgactctccccttaggaaggtgggctaggggtggccaagggtgcaaaccattcagggccttataggacaggatagtagcccttactttgagccagatgggaagacttttgagggtttcagaccagattgacttgatttgtcttatgtcttacaaataccaatccagctgctgtgtggaaaatagactgtacagggtcaaaaatgaaagaagacagacaggtcaaggagagagatgatgatggtggtggttaggattggttagattccagacatacggtaagaccagcaaaacatgagggtttgagagaaagagagtcaggatttaaggctttcagggcaagcaactgctcttaagttagcgatggatggtcatttgttgtgtccagtgggcagtcacatatacgattctagcattctgtgaagtggccccggatttgtacatagatttgtgctgtagcttgattatttttcccttctaattgtttgtccttccttctcctcctctttcttcatcttttttttttttttttttttttgagatggagtctcactctgttgcccaggctggagtgcaatggtgtgatctccactcaccccaacctctgcctcctgggttcaagtgattgtcctgcctcagcctcctgagtagctgggattacaggcatgtgccaccacgcctggctaatgttgtttttggatttttagtaaagacggggtttcaccctgttggtcaggcaggtcttgaactcctgacctcgtgatctgcctgccttggccgcccaaagtgctaggattacaggtgtgagccaccgtgcctggcctttttttttttttttgaggcagggtctcgctctatcaccaaggctgaagtgcagtggcgtgagctcagctcactgcaacctcctcctcccaggttgaagcaattctcatgtctcagcctcccaagtagctgggactacaggcatgcaccaccatgcccggctgatttttgtattttttggtaaagacagggttcaccatgttgcctaggctggtcttgaaatcctgacctcaagtgatccgcctgccttggccttccaaagtgctgggattacaggtgtgagccactgcacctgagcttgtttttctttcttctgcattgtccatctctctctctctctactggctctttctcttcagctgataaacatgctcatgtctttttaatcctaagctaatatacatatgtgaataaaacacttgacctggaccttgcattctctttgccttattacccagcaattcttcccttttaaagctttctaaagcatgtgtcttcacttccttttcttcatttactccctattgaaaatgggcctcttctcctatactgcctctcagagtacatttgctagatttcatagacactttttcatgcatacggaagtacttcttctttggcttctttaatatttctctctttctggctctcccctgacctctcttgctatttcttctctgtttgttttgctggatcatgttactgcattgctgtcgtaaatattgaaaactgtgatattgggaacaaattattgaaagatcaagggcagctctcctgataggctgagcagtttctcccacaaaaagtgacttcatgggagccagccgactctcagatattttgctcaatggtccaccattagaaatcctgctgcatgtgttcttgactccagaaggccccttgaagctgccattttgtcctctaaaggatgtaagttcctcatctctgtaccagattggactgagttttaaactggcacagtgtctcaatgaagagaaaataattgttgagatttcagaggagggtggagaagacgtctggagcatgggctgccgcttggcaggcaggggtgggaaggagctaaggtaatgatgccaagaggaagaagagaagccttttattttttcctagctctgtgggaaaaataaccagggattattaattcacaccaccttttccctcgtttactgccatgagacctttttcctccagtctgtctgaagtgtccctattactttatacttcattatttcttcatcatggtctctaattatattctttaattctttctttatgtaattattgcttgtctttctaactaaaatggagccacaaaggcagggaacttgtctttctagttccactctgtatccctagcataacaggagtgtagcaggtgctcagtaaatcctccttgaagagataaatgtattttgatctccatatttgtaaagttgtaaattcaaaaccatactagttctccagacctaaattcttcagtcttgggtttaaattttcatacagtgaaacataggtgaatgaacatgtgactgatttcatttttctgtacagagctaataacttagtttaggacctcttccctcatccccccacttttccacctttcatagtacgcttgactgccacatctgtgctatggctgtactggccactctgtgtctatcatgttgtagagttctggatgggaagctggatatacttctttgctgcctttgattttcccttcaacctattttgggtttctcttgttacctcctatagttccttttattctgccctcttatgtttcactgccacccaccaccatgttttctgggaaaagaactaagattttaaagtgaaaacaaaacacaacaagaaagacgacaaaaaaaccatttgctatctcgagggcctggcacttgcaaaggaaatctatgcttttaagattattgttttggctatgggctttaaaaaagtctaatttgaaactcaaagctaagctgctttctttgttctcagctgttaccacactcctcttgaaaagtgactgccactgtttcagtgagaggatagcaaaagggtcattaggaagagctaggaattagagggactgaaaacactctgcacctgtgtgtccctcatcctcgatcatgctgaggcctggcataaatgcacttgccatacttccaatctttctttgttcattggatacagaagagaacaacctgggaattttaatggtttggaaacaactgtctgtactatgggcagcatttgattatgaaatttggatagtctcttctatagagggcaacacaaggtcaggactgcttcaagttagatgagaagcacaaatatcatttttggtgtttgctaaagaaacaaaactatataagtgtgttttaaagaaatttgcgcctgtagtctcagctactagggaggctgacgcagaagaattgcttgaacccgggaggcggaggttgcagtgagatcatgccactgcactccagcctgggtgacagagtgagactctatctcaaaaaaaaaaaaaagaaagaaagaaagaaagaaatctgcatttgaaaaaagtgtgtccatttactcacagggagatttcagtggcttctgatgtttgatcagagcctttctgtgctgcgtaatttgaactgctaatttattcagtcattagagagaagtttccagagaaaaagtggtgattctactgggatttgggtaatggctaataccagggaagacagagctgagataaaccggaaggaacacagggcccacagatgaagggaaggaaatctcaaatattttccacgtctctggttctcctgccttctttttcatttaatctgtgtgctaattcagattatctgactgtagttttttaaatttaatttttagatcgaggtaatacatacatgtagtttaaagaaccaaatagcgctataaggtttattttgaaaaatggaaattccttgatcttcatgcctttagacatttcccagagatgactttcaaatcattttcatttttttggtggcatttatctttttgtttttacatgattattggagagaattttcagttttagtcattgtctgttgacttccatctttggaagatgaaaataaaattatataattctctttcctgtcctatgtctcttaactaccactacacacacacacataaacacacacacatacacacacacacacacataatatatatgtgcatatatatgcattttccaattttctaaatcttctctatatttagatcataattttgatataatcaatagctgttttcattattatgactaggtatatgctatttacaactgagtcatatgttatactgtgattattttcctgtacaacatttgatttcccctagtgtagtcattatcacaattttttttcttagtttcttatgttgcttcttttaaatttattaccaaattctcttccattctgtaactctaacctcatcatgctcacattaggcggttataactttttatctctggagggctctttctttgagccttctgactttctctagttgcactatcccaggcttgacttaaagccctcagcctgttgtctcccattagccctgatctccaggagtccctttgcctttctcttttgtggacccattgtttcctatatctgttttgaatgaacacctcttatagtagcctctagagaaagtatagataaaagaattttttgagattatgcgtgttttaaaatgtctttcatttatccttacacttaactgatagcttgtctgggtagagatttaaaggttagaaataattttatgaaaattttggtgcactgttcttttgtctttgaacttctaatggaactgttcagaggactccatttgagccttgattcttataaatgttatgtttttctttctgtttccactctggaaacatttagaatctttttttagttcccagtattgtgaggttactatgacaaggtatctttctatggattcgttttcatcccaatgggtatgtgtaatcatttggaaatgcctatttttcactactgggatattttcttgagttatttcattcacaagttactcctggttttatctttttccctttcttgaaattcttattatttggctattggatctcctggattggttttttagttttttttttttttttaatctcatttctacagttttctatgattttatcttttttactctatggtctagaagttttcgtgtattccaatttctaatccttcttttgagtttttgtttctgcttgcctacgttaatttccaagagctcttgccttttctctgtgttccttctcatagcattgtgttttcacttcatgagtgcaaaatctcctcttctctttctgagggtataagaaagtttatgtgtagttttcttatccccacatagtctgtttctatcaagatgatgttttgtttgttggttttggtctctgcttctcatggtggaggctttatgcagatgcctcggaatcctggctgtctgtttttggctgatttgtggctgtggactttatgtagggagatctaattgggttattttgtggaaaatcctcaacaccagtattttggggtcatttctattaggctgccaattccctcagggaggaattttctagtttccagcctggagaacatagcccttgcactgatctctctggaagctgaatggagaatagagctgagggtttgacactcagtgtgtaagctttcacataacccctgatttcagtgtgaaacccctactttctgctcttccttcattgcagggatcctctctagtctgctgaagtgtgaaaagggaaattgactggctctgtggaattagggaaggcatctggaggggtaggtgtccatctgtttcttaaacagactttcaataaatcctctagttttagccccacctttgctccttcacttcccaaagtacttggtggtgacaattcctgggatatttagtggctctgtactgcatatcagattgttaattatcattcctttctgctggtttaagatccagctttcttggatctgatgagttagttactacttgtcctatgctttccagcttccaaacttttgttgcttttgtctgttctactgttctgtttgttcttgtggctttatggctttacgcaatccatttactgttattttgtggagttttgagaggaaacagaggtatatacatgtcgtcaaccctctatctctggctgagtctctctgcttctttgcataggtctgttagttctgctggttcatgctcctctgtcatgtgtttatcatccggatttatgtagctcttgatcaaaacgttcccattgctatttaccatttgtctcaagctacttgtcactagagaatatcccaaccttgctaaatccatcagaggttcattgctataatatctgtctatttaacctgtaggtctacttactgtctgcttggcttcccagctgttctgcatggtctctgttttttggaagtcctctgctgttatatacaacctctgctcgatcattttctctgtactcattagatccaggccatccctgatactacatcattcctgaagcccatctccggcaggtatctctctccaatcccttaaatatatggattagcactgtaaaaatgatcaagcactgtgtcattatgtaggttgagtcaagggtctaaacttttcacatagggttaatactttagagttaaaggaaggcatgaaatgtaccagcatcatggataaagttggacctaaatatcttgcatttcttaaagtcaggtttctattatactcattggactagaagtggacagcaatagagaagtgagatgaaaaatcactctcattcagtactgtgaactaaatttaaaaaaatgagggctgaattcctgttctattagattttagtaaacagcattctgtagtgcacagggaattcttcacaatgctgtgtgaattttgttggtaaacctgttacaggtgtttttcagtttgtgtttgggctaaaatattgtcaagtggcatacttgcctgaggcagtcagtgtaggatcagaacatatgtgcctttgatgaaagctgcttttcagtttaaatcactgggatgcttgtgaagctgtatcttatgaacattgttatataaacattgcctttaaaatctttggcttgagtctcaagtaaataggtttatacagtatgatctgctggctgagcagcaatgaaaataaaatgtctccctgttgtggtacatggaatttttctgttgtcaggtagaactttgcctacagaaatttaaagtgaggcaaagctgactaatgaaaatcatcatggttagtggtgttaaaaacaaagcttctacactgtggtgggaatgtaaattagttcagcaactgtggagagcattttggggatttctgaaagaacttaaaacagagttaatattcaacccagaaatcccattatttggtatatagccaaaggaaaagagatcattataacaaaaagacacatgtgcctgtatgttcatagctgtgctatttacaataacgaagacatggaatcaacctaggtgtccatcgatggtggactggattaaaaaatgtgctacatatacaccacggaatactatgcagccacaaaaaagaatgaaatcatgtcttttgcagcaacttggatggagctggaggctgtgatcctaagtgaattactgcagaaacagaaaactaaattctgcatgggagctaaacattgagcacccatggacataaacatgggaataatagacactgtggattactagagggggagggagtggggcatgggttgtaaaactagatattggatactatgctcactacctgggtacaatatacccatgtaacaaatctacacgtatcttccctgtatgtaagataaaagttgaaaaagaaagaataagaaaaataagagtttttattttaccttcagaaaaaaagagaggttcaaaaatatcataattaaagtctatgtcctcattataaattgaacaaccagagtgtctgagataagagtgaggaagggagaaaatagtgcaggacgaagtcagaaaggtaatgagaccagaccatgaagggccctggtgaccattgttctgtggatggagacttctagagcattctgagtagaaaaatgacatgatatgacatattttaacagtatcactctgactgttgtgttgaacataaaccctagggttacaaggtgggatggagaaagataattcagggaggctattgcaatcattttagtgaaagacgatgttggtttgggccaagatagtaacaatggaggtggcaggaagtggcgagactctggttatgttttgaaaatagagccaacaagatttgctgacagactagatgcgggggggtggttgttaaaatcagagagaaatcagagatgactccaagagtttttttggtttatatatctcttaaggatgggaaataatttggggaaaacagaggagagagatgtgctagaattaagagctaagttttgataagtcatgttaagtttgagacgctgcatagacacgtaagtacatatgtctcgtaggcagtcccatagacaaatctggagttcaggggagaggtcctggctggacacatacattctggaattgttgatacagagctgatatttaaagtcatgagactggttgaaccctccttgatattgaatgtgaatagagaagaggtctaagcactaaactctggcgcattgcaatatgtagtggtcagtgagatgaggtgaaaccagcaaaaagactgagaatgaagtgagttaggaagaaatctaggagtgaggtatgctgtaggtcagctgaggaaagtgtttcaaggagggatgagtgagcagccatgggaagttcctcttacaggtcaatcaagacaaaatctgggaattgatcattggattttgcaatcttagggtcactggtgacctttagcagatttgatgtaatcttgggggcaaacgctcttacaaacccctaaacctcagttaccgcatcggtaaaatggggtagtaatattattacgtatcttataggattgttgtgaaaacccgataaattaattcatataaaatgctccaaataatgcctggctcattgtaaatgctaaataaatatttgctgttgtttctagaaacctctattcaggtgctcattaattgtcagtcataatcttttggtaaggtcctgcaactaattaagaatctacctaactgaatgagcatccagtcttccctgctaggctattattgaagatctttttcagcgcctcaccaaagtatagataaatctgaaaaacatgttaactctattaagcaagaaatgaggttatcaccgcatgacttctgcaggatcatgtgctgactcctcttatttctggatgcttatccattctaaatcttgtccaggaatgcttagttcactggtctcctattggaattcaccatattttcatattcttatttgaaaactacagttgggtttgccttatttctagtcttttaccaactctttttcaaacatagctggcagtggcatagttatctctctggcacgttcttcacagtgtcgggatgaaatctgatggggctagaacacatgaactcatttagagctattaatgttttgttttcttcacaacccatcatttttaaattgcagtaaaatatatgtaacataaattttactatcttaacaatttttaaggatacagttcagtggcattaaatacattcataatgttgtacatccttaacccctatatagcctcataactcttgcaaaacaaaaactctttacccatgaaacaatagcttccattccccttttcttcagcccctggagaccaccatccgactttctgtctctatgaatttgagtattttaggtgcttcatagaagtagaataaaagtatttgtatttttgtgactgaattatttcacttagcatagtgtcctcaagatttctccattttgtagcatatgtcaaatttttccttttgtaagggtgaacaatattcctttgtatgtatataccacattttgttcatgcatgcatctgttgatggacacttggttgcttccacattagctactgtaaataatgctcctatagacatgggtgtataaatatctccttgagaccttgctttcaattcttttggatatctatccagaagtgaaattgctggatcatatggtagttttatttgtaatattttgaggaaccaccacagtgtgttccacagtgcttgtaccatttcacattcccaccaacagtgcacaagggtttcagtttctccacatccctgtcaacacttgttattttctgcaagtagccatcttaatggtgtgaggtagtatctcattgtagttttgatttgcatttccctaatgattattgatgttggacatctgttcatgtgactattggctttttgtatatgttctttgaagaagggtctattcaagttctttgccctttattgaatctgattgttttcttcttgttgagcttttgttttctttttaaatgtttgccttttattgggtttatatcgtctctcagcagtgcttataatccacattctgctcgttataatctgtcattctgtgtgaaatggggacaggcagagcaggagtcaaggacttgtgagtcctctgcatcattcatcaacactgacccataaccaaagaagcagatgcagtggactgaattgtgtctccctcaatttcatgtgttaaatcccaacccttcatgtgactgtatgagatacagggcctttaagaaggtaattaagattaaatgggttaaatgagagtggagccctgatccagtggagctggtctcctcataagaagagggagagacaacaggactctcttccaccatatgaagacacagtgagaagctggctgtctgcaagctaggaagagggccctcaccagagcctgaccatgctggcaccctgatctcagacttcatgcctccaaaactgtgaaaaataaatttctgttgttcaagccactcagtctttttgttatggtagctcaaatggactaagacaccaaggctcttctttctttctcctttttgttgtccttagcattttatgtatgcgtgtgcatgtgtgtgtgtgcgtgtgtgtgcatgtgcacaagcattacttctttggggactttagatttcctaagttgcatggaaaaaattctcatttatgctttgagataccggcagctttttaaactaaatccaacatagtggtttgagctgatgaccacctaaaagtttcaagaacttatcagagcaactacgaaggtatacttctagcttatcaaatatcttagcactaatttctttaattctctagagctgatgcaagcctatccttcttgtcttccttgcatcatttatttttctgtctccccttattttccttctataccatccacttgcaatattttctgctgaaacattttgaaatgcttattgtatgttactttagcatatatgaagcattcgtacaatatttatcaatatatggcctttgtcattcttaaagcttgtgcaagtctataatggtgagaagaataccttgtctatgcctctaatttatacattgacaaaaaatgccagcactgtaaggacttttatctgatttttccaagtcgtgtttttcttaatgtgggaatttctttcttctttaattttatgtcagagagcactcaaccatttaactattatttatagtctgtggaaatccataattgggaatctaacttcagagtacacaattatgtctacaaggcttgattacaagctttattgtggtcttatgatccagactgtggatcatacacatgtgggcacaaaggacaatggctgcttattgggaatgtaaaaactaaaagaaatcaggtatatgtgccaggggtgctgagatggggttggttaatattttatttttctgtctttacctgtgaaatgcagaacgagtatgtatcaaaatctgtatacctatataacatatgtaagtatattttaggctgacaaaaatttgatgctgaagaatattcattataacactcaaggggaaaggataaatataatagtatactttgggagaattttgaaagaggagaaggaaacatttagatgaagagttaaatatgcaagctacagttacacaaaagaaagaccatatggtttaatgccatacattagtttgttttaaaccttttgtagtttattttcattttaaaatgaatgtgtgctttaattagtgttgaagtgggctagcaaaacatatgtcttttagttaaacagtaatttatattgtattctctcccttagtcttagtgatagatctaaattctggttaaccaacaaaatgtggtctacaggcaccagggcaaacaatcaatttcttgtttgtttatttttatgttttcacagaactatgacaaataaaaattttatatatatataaaatgtgcagattgatgtcttgaaatatgtatattcttaagtgattatcccaatgaagctaattaacatatccaccacctcacagttaccttttatgtttatgtgtgtggtaagaatacttaagatctactttcttagcaaatttcaagtatacactattattgactatagtcgccatgctatacattaggtcttcagaacttattcatcttatcactgaaagttcataccctttgatcaaatctccccatttcccccacttctaagtacctggtaactacctttctactctgattctatgagttcaactttttcagattccacttgtaagtgagatcatgcattgtctttctgtgcctggcttgtttcacttaacataatgtcctccaggttcatccatgttattgcaaatggcagcaggattttctttttttcaaggctttataatacttaaaaatatatagacattttctttattcattcatctgttgatggtcactaggttgattccatatcttggctattgtaaataatgctgcaatgaacaaaggagtgcaactacctcttcaaaatactgatttcatgtcttttcgataagtacccagaagtgggattgctggattatatggtggttctatttttaattttttgaggaacctccatacggttttccataatggctgtactaatttacattcccaccaacagtgtataagtggtcccttttcttcatatcattgtgaacaattgctatcttttgactttttgataatagtcatcctatcatgtgtgaggtgacatctcattgtggttttgacttgcatttcctaatgactaatgatgttgagtaccttctcatatgcttcttggccattcgtatgtcttctttttagaaatgactattcaggtcctttgcccattttaaagtcgggttatttgtttctttgcttttgagttgtatgggttccttatatattttggatattaacctcttatcagattagtggtttgcaaatatttcctcccattctgtaggtcgccttttcattttgataattgtttcttttgctgtgcagaaactattttgtttgatgtggtcccacgtgtttgtttttacttttgttgcttgtacttttggtgtcatatcaaaaaaatcattgccaagaccaattttaaggaaatttccctccatgttttcttctaggacttttatgatttcaattcttatgttcaagtatttaatccattttgagtggatttttggatatgatgtgagatgaagtcccaattttattcttttgtatgcagataactagttttcccaaaacaatttattgaagatactgttctttccccattgtgtactcttggcatctttgctgaagattagttgactttacaggtgtgggtttatttttggattctctgtcctgttccattggtctacatgtttgttttaatgccagtaccatactattctgattattgaagctttgtaatataatttgaaatcagagagaataatgcctctagctttgtattttttgcacaagattgctttagctattcagggtcttttgtgggttacatgaattttataattgtttttctatttttctgaaaaatgtcattggaatcttgataggaattgcattgaatctgatgtgtagattcctttggtgggtattttgacaatattaattctttcaatctgtgaacatgggatgtctttccatttatttgtgtcttcttcaatttctttcaccactgttttatagtttacagtgtacagatttttcacttccatagttaaatttattactaagtattttattctccttgatgctattgtgaatgggattgctttcttaatctctgttttggataattcattgttagtgtatagaaacacaactgatttttgtttgttgataacatatactgcaactgtactgaatttgttttagctttaacagctttgtcatgaagtctttatgattattctatatataagatatatgtttttctgtatataagatttatggttttctatatataaggtctgcaaacagagacacttttactgtttcctttctaaattggatgttatttacttattttgcctaattgctctaagacttcaggtactatattgaatagaagtggtgagaatgggcattcttgtttttctgatcttacggaaaaggctttaagcttttcaccgttgaatataatgttagctgtgggcttgccatatatagcctttattgagttgaggtatattcttcctatacctaatgtgttgagagtttttatcaataaatatgtcaaatgttttttctgcatctactgagatggtcatgaaaattttattcttcattctgttaatgtggtgtaacatattttttggtttgtgcatgttgaaccatcctggcatcctagaaatagattcagcttgatcatggcgtatagtgtatgatccttttaatatgctgttgaattcagtttgctagtattttgttgatggtttttgcatctatgttcatcagggatattagatacaaccaacacttaacatgttgaaaatgtgctttggttttattctattacactttgcttaactgagaacaaagaatttataggtgttaatttaactattaataattaagtcacatgcttatttggaatatttcatatatatgcatgtctactatataatgtaaatttatgtttgcatacatatttgtgtcttcagttccttgacatatctttgtgcatgtagatggatacacatacagataaagatgtagatgtagctatagatagagctatagatatagatataaatgcagttatctacgtctaaggattaaaaaaatcaagtaaaattattttcctttcctcaaaacctcagggattacaaaggaagacccctatatgcaactgaatctaaaaatgcactgtataaggtggaacccagaatgtatatcatttgcattattatatcataggataataagccagaaaaagagctctggttctagacataattatatagtcctacctatgttacacagttgttatgagatctagtcaaataacattgcaagcatgttttaagcttttaagtacaaaattattgttactattctcagaatactcaaaatccagcccctatgtgtctgttcctgtcaaaagaggtcaacttaagatgtattttattcatcaaatcttgctccacaaggctgttagataaaaagatctgtccttctttgtccattctgaaatcaggtcataactaggctggtgaaccccaagagccaggtcagtcgtgactcattcaagtctttcagaacagccagtgaaatggttgggaagttgtttcagggtgttttttgctctgatttctgcaggatggttgtctgttcttcctatgtccagaggtgtagagctttcctgggtcatttatggctatgagaaatcatatggcttagtccagatttcccagaatgctggtgattcataatttgataaaaccaggctgaagtcatctccaaatccttctccatcacactcaatttctaggtgatagtgaaaacattttcttccctttacttggcattttcttcccattacttaatggtctgttagacattacgcattcagttaaggttttgagactgtaccttcaaaatcatgaaaacataaatcatactttcctgtattttaaagaacagattttaatttatcttctttctatttagaaaagttacaggtttttagctcttatttttactttggatcagtgggtaagtttttgatagcaagagagtgaaaaacgaagcctcccattcctgcaactgtgtttaattacggaacatgctgaaccacatttgactttttttttgtttctgaacttatgtcagcttccccagtctgtgatgaaacacgttttgcagctctacaacaaaggataaaaataaaataaatgtttaggaaagtactttgggatagctaaagagagagagccatacaaaaacacataggcattggtaggaatgacaaattaattgtgctgcctttaagtaataacacagagcaattaatgcatttaatagctttattgaaacaaaaagctcttttgcagtttgcataatttctttgtgtaataagaatgtttcataagtttatagatgaatgcatgacctctgacttagggagttttggtaatatgtatatctctgtgtttctattttcattttcagacagtattttttccttattgtgtaaattcagatctttattgcataaagccagatctaatggctttgaataattgattggtctttcagatttcatgatttatgactctcattttcaagattgtaatttttatttcttgatacaaacataccctaaatcagtttgtttcaagcattttttttgaacccagaacaacactgaatctagtgatttttaagttgcacaggcgggtcgaagattcttgagggattatcttggaactcagggaggtgtaaggcaggtgagtaggcagggcatcacactggaggttatgtgagggttttgtaccccattataagcctagcacttagcacagttgacacattggaataaatgaatgaaaaagtttaccccaccctgcatccctgctttaacctgaaaggttcatttttcccatttttttattgttctcagagtaagttttccagagtttagtagagaatttcagaaacgatgtaaactcttctctgggggctgctaatctgttgctgctactgacatacattagtatcctggctattttctctccatgacctgccttcttttccctatccctccacatcattcttcctaagcctctagcttccctgtaccatttgcccccataggagttggtatcctaaagtgctggttgagcacagtctccattcccacattcaactggcagcatgatcagaaagactgccaactcatcatggagatgggcaagttcccccaaaactctcatgcactgtataaatgcaaggtagtagtaatagtttaatatagaagtttattgatttgtcaaagtaattgatatcaccttgccagaattggacaacctcagatatcctggactttggctctctggtacgccttcgctgacctctctctctctccccgcttggtttgatgatgctatatttaaatgtaatcacactcagtagactatttgactgtcaatactctgggacagcaaaaattattagtcctctcacagtgtccttaggtgacacatgataataagagtaatcagtactttcatgatgggccacgtagatattgtgtatgatttcattttacaatgaacggcagacttcttttctaggatgtcagctataaatctaagagctttaaagacattgattcatttcatcctaatagtaatcttactagataagtgttattattacccatattttacagaagagagaaaattgagcgcacagagattaagtaacttgcagaaagccacccagctagtaagatgtggaacttggtaaggcagcctttttcaagtttggaatgtgagatgctctcaatttaatcatctctgcaatgttccaatttcgttttatccctgtgagtcccagaaatgcatttctaactttataaaacatatagaaaaagacctagagcagttatatcattattaaaatattatctctagggaagtagtatatttgttttctaataaaatgaaaatagcttcattttctctgattgtaaaaataatacatactcgtgaagaaaaatgaagcaatacagaaaatacaaatgagaaatcagaataattggaagcttcattacctagtggcatttgagtgaatatactttctgatatttctctaggcacatgtatatatataaatatagcatttttatgtatgaaactatactacactttttgtaatcaatttctatgcctacagtgtgtcatggatatttttctgtggcagcaaatacaagtatataccacgtttttggattggttgtatagtgctactttgtatggctgtaacattctttatttaagcaattctatattgaagaacatttaaattacttccaatattaatattaaaaataatatgataaaaatgattttcataagtattttggtacatggacaattacctatttgggagcaaatttctagaagatttttggcacaaaggttacgcattttttttattggatatatagtgtcaaacctgaaagactgtaatgacttaacagtctactgacatattttgagtgtgtccatttctcttattccttgcaaatggtgattttgcccatttaaaaatacctctgcttgtctgaatttgaatttattgtatggtttttattttggatattcagtgattagtgaggttgaatgtatttattatgtttattgaccatttgtatgttttgcaaattgcctactatgtcctctatccattgtttttattagtatgctgtttcttttaaattaacttttatgatctttttaaaaaacatattagcgatataagcctttcgtttatcttacgtgttgcaaatagtttttccagctaacaattgattcttcggtcctattttagtaactatttatttatttattatttgccacgtagaaattttaaatttttatatggtcaaacagaccttttcttttatggtttcttgcttttggggccttctgtacttgtagagttgtatgttgtacattacattgtagaaatggcttctttttaatgggacccagagccaggatatgtaaccaacacttatatgtcagttactttaaagtttactaagagctcccacaaacactttcttatttaattcaattaatactttaacattattattaacattcttcagatgaggaaaatgaggcaaagagaataccttaaacttcccatggctcatcccaaatcacacatctagtaaggattagaatataggccagtctgatgccaaagccatggttttagtcatgactctataccaggatcctttagacagatggaacagcagagaaagaggaaggttaaatggcccctgcctcatgctgaacagcatttccctcttttgatagaaagattaggaactgaattcttgactgttaatatgatccttcttggagtaatcggattccagttcagtcttttgaaagaaatttcagtggaaaatcaattagatgttaaaagaaaagagccataggaatgttaaggtattaagaataatgtggggtatgctttgggttttaagaattaagaggatgatgtccaagtagttaaatgaatttgtgaacatgggtcagtgaaagagtaccacgtcagagtgcttggtccatttgcagccaggcatattgaatgaactcttctctcatctcatttctaataaatagtcagagcaagtattaatcaggattttacatgtacaattagaaagggttttattcttggtattatgctggattttggtgcagataaatttctcattcacaggacactttcagtcttcaggtcagattttgcttttctaataaagaggtatatggatttcagttgattcacatcattaattatcagcatttgtgtggatgcaggatatcttgggcaaagctctgtatctgagataaagcaaaaaaaaaaaaaaaacctaacaaaccatttctgccttttatgtccctctttaaagataaattgagtagggagcagtaaacacatgatttcaggtcttgcaatgaaataagcagagctcagtctcgtaaaaataaattaggtaattcaacacagaacaaaagaaggaatataacaatgtaaagctatgtattaggtacagcagatcttacactgactatggcaaatcaaagtgtcatcattttctaatatatctcctctcagggcagttaaatatattttaaactatagagtaagttgcagtttttatgttagtttgtattccaatatcattggtgtgaaatcatcaaactctaatttctagcatttctagaaaatgaacctctttagctcccacatgaattctagaattttcaggattcttctcagtcagtgatcaagttgttaaaaaattgccttggtatacaatgtgggctctgctatttttaactttgtctggacctctttccttaacagttgagataaatcaatcatttgttgggactgagagccgtaaacgatgagaagactgttttcagagcctcagcatttatttgcacctgtgccacactgcaggaatattggcatgaccctccgttgagctgtgctctctcctttcaaatcaaacatgcagtctcagagcccctctgtgttctcaaatctcattagtagtgttttctggcttggaggttttcagaatccactgtttgtatggcagtggaaaaagacattttttctcatcagaaatcagagaaggcacgtcaatggcacaacaaacttaattgttttactgttctaataaaaaggcttcattgaaccaggggctttccctcgaagttaattatttctcacatcaggtttgttctgtctaataaaattaagcagtgaccctaagaagatgccaattgtttgacattgttataaagaacacattaaggaatttggatgcctgagaaatttattgtccttctctttaattgtgtcttccttttggtagtgttcctccaattaaccaattatttggggtatggttgtggttaagaacatgaacatcagccacacttggattgaaaccctggctggctgggcgtggtggctcacgcctgtaatcccagcactttgggaggctgaggcaggcagatcacgaggtcaggagatcgagcccatcctggctaacacggtaaaaccccgtctctactaaaaatacaaaaaattagccgggcgtagtggcgggcgcctgtagtcccagctactcgggagcctgaggcaggagaatggtgtgaacccgggaggcagagcttgcagtgagccaagatctccactgcactccagcctgggagacaaagcgagactccatctcaaaaaaaaaaaagaaaaaaaagaaaaaaaaagaaaaaaagaaaccctggctaagccacttactatgcaggtgactttggcaagtcactcatttctaaaacacagtttttcatttatcacgtgggggttatgacacctatctcatattaaagttgtagttaagattaaatgaagtaatgtacgtgcaatactttgatagtactgcctaatatcaagtagatgttcgataaaaagattttattactgtttttaagcactgattgttaccaaactattggtgctttcataaatagcttttataaatgcttattggaatagcatttttttccatttatgtatactttcacttcaatgtaaattggggtcctgctatgtattcagtatcaggattcaaagaataatagtatgtagcccttgttctaaaggagtgcagaagataaataattctacctttacttttactgcattcacttgtttaaatattatatgtgcatttttaatggcatttgtaacctttaactctactgggaaagaatataagcatgctacccataagaattatatttcttactatagtattctgtagtatgttttcatcacgtttcttccaaaaatgacagtagttttggaaccttatagacctgaaatattctattcaatgtgtcatgccaaaacatatagtccccgctctcaagaaacaggaagggaagaacttagaagaatatgcaaatttaaatagtgagtttatgacatgaattcaacaaacaggaaaaaagcacaattagttctacacaaataattagtaagaatctcacatgagtttggccagttacaaagtggcaaagccagttaggcatatgtgacttttcacatattgcttaactggagcagggagatctctggttcacacctgtggtgcattggtctgattccgtaagacacttattgtctgttctgtgccaggcactggctcagctctggaaatacaaggtgactaaaacaaagcctccattcttcaaggaacgtaaaatcccaaatccattgggaatgtgcctgataatttatgtttgagaaatcgcttccagcctgtcctcactgcccacatggcgaggtatgcacgttcggcatgtgggtatctcatgagtgttgtctagtctatttgggctgctgtaagaaattaccatagtctgaggagcttataaacaacagaaatttatttctcatagttctgggaagtccaagatcatggtaccagtgatgtctggtaagagtctgcttcctcatagatggtgtcttctagttttgtcctcacatggtggaaggggcaaaggacctccaaagaaacacatacatgtaatatgctttgtatacatgtaaaatatatgtaaatgtgagaagagagagatcaataagatttttctctcttccagtggaaaattcctaggaaattaacagtgctgatcatttataaaaaatgattataaaaccacagtatactccaccctcctttttaatgaagttttatataagatcattattttaagtatctgtttccaactgtctctctgagtacagttttatttaatttattctgtgattggagttctatgatgatacagaatctttgttgcattctctatctctattactgtgtctctttcaatttataagggtggcttcggggcttccagaaaatataaacatgagtgagactatctcagactacattaggccaacataaatgatgactcaccacgagtaactcagttgagatggttattaacgatttctatttttgtggaaggcatatggttagcatgcaagagctctttatacatcattagcaaatttaatttttgtaataatctttgatgtatttttcaattttaagaaagcacatgagagtggtgttcatttactcctgaaaattcagcccttttcactctgattacattcattactgggatttttgtgaatgtgtttattgatactttctcaagcttgaggctgaagtgagaattaatttttgatttttatataaatgatgagggattttagctgggatgtttgaggctaacattgttgcttctctgttcaagattatactgtgggatgaaagccaagagtaattttttaaaaaagcttcaggggtgtattagtgccctacagatgctttaaagatgaatacatttttttgataaactctgtgattttagctaatgattattaatcattaagaaacaatgcttcttctagtatagagtaaaagccatctaagcttgggttttatattgttcttattttgtagtttctcccaagtactataattattctaggtggctatactaattgaatttagaaggggtccctactaattaaacaaaccattgctacattacctaaaattctaaatcagttgttcactgacctctaaatataaaaagttttggccgggcgcagtggctcatgcctgtaatcccaacactttgggaggccaaggcaggtggatcatgaagtcaggagtttgagaccagcctggacaatatggtaaaaccccgtctctactaaaaatacaaaaattagccgggcatgctggcacgtgcctgtagtcccagctactcagaaggctaaggcaggagaattgcttgaacctgggaggcggacgttgcagtgagccgagatcgcaccactgcactccagcctgggagacaagagcaaaactccgtctcaaaaaaaaaaagtttcacatttaacacatgatctgttcttgatttatatcagtattgattattcctggctaattttatattcgaggccaacaagatgcatcagatttattctgcagcttcattaatcttgacaaatcactaccttaccccatacattttgactccttagacaaaaattttaactaagttcagatttagaagtcattttatgtagatattattggaaaatatagatacatttgttagataattctcaatttaagataagaaaaacttaaaacattttgctctctgtagcaatttatattcccagcaggggtttagccttaagtagacagacataccaatctgtgaaactagaagggactataccttactgcctgtaaatttcttcagtgttaaaaaagatagttgaagctttctatcttcattttccacacttaaagtggcttatgaaaactattaattttatatttaactatgtcatatttgtgtgtggaacattgcttttagagacaattattaaaagaaatctagatggccaggtacggtggctcacgcctgtagtcccagcactttgggaggccgaggctggcggattgcttgaggtcaggagtttgagacagcctggccaacatggtgaaaccccgtctctactaaaaatacaaaaaatagctgggtgtggtggcgggcacctataatcccagctactcaggaggctgaggcaggagaatcgcttgaacctgggaggcagaggctgcagtgagccaagattgtgccattgcactccatccagggcgaaaaaagcgaaactccgtctaaaaaaaaaaaaaatcaagatatagaaggaagtaaatgatgataaagcaagataagagaaagtagcagactggattctgatttaactcagcaaacagtataagtactaaaagacaaagaataagatttgatggttgtcatcaaccaaatttctatttattataataaaaatttgaaaaaattattaacactgaatttgctgagatttattatgtgagggacatattaatgcatttcattgttcttttacatgcactacctcatgtaatcctcataacaaccctaataggtaggcaggcttaggtaaaaataatcttgagtcatattttgtaagtagtataacagaggtatgtctaaaacactttactttttttttttttttttttttgattaggagtctcgctctgtcacccaggctggaatgcagtggcatgatctcggctcactgcaacatccgcctcccggtttcaagcaattctcctgcctcagcctctcgagtagctgcaattacaggtgcctgccaccacgcccagctaatttttaaaatatttttagtagagacggggtgttactatgttggccaggcttgtctggaactcctggcctcaagtgatccacctgcctccctcctaaagtgctgggattacaggtgtgagccaccgtgcccagctacttgacagtttttgagttaaaaaaaaaaaaagctagttaaaagccttcctccagtaatctgacatgctgatgtttttttcttatatacaaaatgttcacaaatattgacccacttctctaatttgtattctattttattgatcaagttgtctatttctgaatcaatgttgtgttttcttaattcttatatctttgtaatatattttggatctggtagggtacaattccaggctttgtctattcctgatcatttactcttctgtatgaatttcagaattatctcatcaagttccatggaaacattctacttggcttttgattaagattatgttgaattttcccagctactcgggaggctgaggcaggagaatgatgtgaacctgggaggtggagcttgcagtgagccgagattgcgccactgcactccagcttgggtaaaagagcaagactccgtctcaaaaaaaaaaaaaagaaaaaaaaaagaaagaaagattgtgttgaatttataggttaaatcaagatcattatgttgtttataccatcaacatttcctctccatgcacatggtataccttcatttattcatatattcttgtgtgtccttcactcaacaaatatttttaagtatatactattttagagtactgttctaggtgttagggatacatcattgtttaaatgcccctactcttaagtagtagtttgtatttcagtgagggaagagagaaaatagagaaataagaaacaaatgtataatatgttccattatgatacaataaagtagggtataggatgacagaacaacagaggggtgtgtgtgtgtgtgtgtgtgtgtgtgtgtgtgtgtgtgtgtggtgtatgcacacacataccctgtttgattagcagagtcttctctgataaagtaacatttgaatcagggaaaaaagtgagccatgtgaacatcttgagaaaaagctgctttccagagggaacaccggtgcaaaactgtgagctgggaagctgcctgatgtgctcaaagaaccgtacagagcccagcatggttagagtcgtgagagagagggagaaacattttgtagttttctccataaagatcttgaatattccttgttagatttattcccaggtattttacagcctgtgctctgaatgtctattttatgttctttccaaaactaccttttcaatttgttattgctgctgtgtaggagaattactgattcttgtatgttgattttatgtcctgttacataacttagtgctagtattttagcagttgattctatttgtttttttaaattaagtgaaaatcttgtgtaatgactatttgtctccatcctagactgttttattaatatttttttccttgtcttgttacatttctaggacaccccgtaaaatatgtactagtatctgtgaaaatgagcatctgttttcctttctctaattttaatgaaatgcttccaatttcataataagcatgatgtttgctatttctttaataaaacaggcaatatttcttctatttataatttgtaaggtttttaaaaatgaaactttttagcatctattaagcttgtgtgtgtgtgtgtgtgtgtgtgtgtgtgtaacatgttagtgtagtgaattgccttgatatctttcttatctggaactatttttcaattcttggtcacatactgattcaaaaaatatcaagtgcctacaggaactggtaccattctaggcacttgagttacgttagtgaacaaaacactcaaaaattcctggcataatgaagctgatattctaatgatggaaagcaaaaaaagaaaaaaaccaatacatataataaatgaaatattgtatttttcgttagaagagataagtacaatggcaagcggaaggagcaaagcatataaggagcagagtgtgtttggggggtttgtactctcagttagatgggctgacattgtgtggttctaagcagaggtatggcatcacctgcctgtgcctctgcgggctcactctggacaaatagactgtgtgggggtgtgggtggcgggtgagcaaaggaagcaaatggagacatataaagagcttattataggaatacaggagggaggtgattgagactgacttggtggatggcagtgggggtgaagaacatccacttctattttgaaatagaggtaactggatgttttctgaccaattgcatacaaggtgtgagaggaagagagagagaggttgaggtttttggcctgagcaacctgatcatgatgtttgttttaataaaaagctagatttgatttgctaataatttatttaggacttttacaatgttgctcataattaaaattgtgtgagaactttctgttcttccatatcccttgtctggttctattagcctttaaaatacgtagcataggccgggcgcggtggctcacgcctgtaatcccagcactttgggaggccgaggcgggcggatcacgaggtcaggagatcgagaccatcccggctaaaacggtgaaaccccgtctctactaaaaatacaaaaaattagccgggcgtagtggcgggcacctgtagtcccagctacttgggaggctgaggcaggagaatggcgtgaacccgggaggcggagcttgcagtgagccgagattccgccactgcactccagcctgggcgacagagcgagattccgtctcaaaaaaaaaaaaaaaaaaaaatacgtagcatagtgttttctatgtttgagagcagcttggctacagttagttttcttttacttaaaactttggttgagtttgctcaaagagtcatttggacctggtcaggtagtaggtcaatgagtcagcatcccccagaccacccccaagtttggtgatttgctagaaggagtcacaggactccatattgtgatactcatgactaagatttattacagcaaaaaaaaaaaaaaaaaaaaaaaaaaaaaaatccaaagcaaaatcaacaaagggcaaaggcacatggggcaaagtctggaggacactgggcacaatcttccaaaaattctttcacagcgaagtcacacaggacaagcctgattcctccagctatagctggacacatgtgaagtgttatttgccaggagggctccagtctgtgcctctgggtgtttgcagctttatgtcccttctttgtttaggtgctgtctcctatctttgaaggattcctaatagtttccctgaatttgaggtttactgaggattcttcctctaagtttcaacaagctattttgtaatttctaggaatttggggtgggaaggagagatcatagcatgttctaaggctaccatcttggccagggaggctctttttgtgttactgagtaggcgggtgaacaggaagcaggaaggtgattgaaagtcagacgtatccgtctgtcatgtctgtgctcatctctgctcccctgacaactaacaaacccgttgacttcattgcatttcagattcctaacctgtaaaatggagatcactgtagtcctgtgaagatgaaatgtgttcaagaatggtagcctcctatttactacatattgatgcttaacaaactgtttttttccccttttttggtcaaataaaatgaaatatactgttatacaaactgagctgaaaacatgtagaatccattacccacaaaagtttgtgtagtatgtatacataattatgtttgaaaatcatttaaataaggtctttgtggatagattcataatggagagtcaaggagacccttgggatgcttgggaaagtatctttaatattttgaagacgtcattgtggtagaagatgaccttcatcttgcacaatgccctcatgtgactaacagcaggagaacatcgactattggttgatccactaagttctttattatgctgttacacagggcaggggccagagcaagttgcacatgctgctctgctttgtgcttgtcacttgccgctccagccaggccacatgagcttgagaacggcttcctgttttatagaaaggccatgagtgcacagggaatgacaaaacggaatgactaggtatggcaatcctacttgcttttagttttctatacctgttactcagactccttgtctaggcaattgaccctcaatttccagaccctgcagtcatttgtggattgcagtgcttggtttcctgtcctggaaacctgatctccctggatttcaggactcttattatatactaaccttggcagttgccctttccttccagacttgcatgaagttgtcaatgagaccatcatgtgggagagaataaaaatgcacgataaactaggaaatagtcagtgtggcactgtgaagacaaatcatggcagacttatttcatttcttctctgatagagtgacaggcatcataaacaagggagagtaatgggctagatctatcttgcttccctgtaatcactcctgaaacactcaaggtatgactgggtcatattttatatttccatatagatgagaaacaggatctttgtcatagggtctgattgatctgtctagtttctctgagattccacatccaagccaacatcctggataagttgcactaacaaaaaatcagagcagcagaatttaataaagaattaaggagagaagactgtctagaaagacagtgagacacatcctacatgtggaaagtatagtcagaattcaggaagggattgggattgtaaagttaagaaaatggattagggttgaaaatgcaagctgaatctttacaaagaattcaggaagaattgagacagtgctatacgttgttcattgcaggatacattttttattttgcttttgagacaccctaggtaaggtacttgagaacactttggggtcggttggattctgattccttctcaagtacagtaaactctctttacagatatatacatttcttgctgatgaggaaagtggaatgagaaagaatatggatgtcaccataaaatgagacaagaaaaaaaaagttttgttatgtttaaaaaactctcctaatttgtattctattgatggtgagtaaacaatataacccttacatgtgaagagtagtctattcatttctctttatgaatttaacaatatcaattagaaagccaaaggggaaaagcccatctatattctatttgttgttcaacagagagagaaatgagttgtacatttttagtatctgaccttttttttaaaggaagatagattattctcattcttaatggaaacctgtgaatagtgttgatccaagtgaaatatagatttttgtaaaagagaggaaagggattttgttacagaatgagcttctatgtttcctttacatcttggctcaatcactatttcattagagaagccttctctgacttcccagacaaggtcagctcaaccttttctatattctcacagcaccaagtatgtgcgtgtctgtctgtgtgtggttacacacacagacatactatatttgtgactcttttacgtgatattcccctttagatagactgtaagctccactgaacacaggaaatgcacatgttttggctcatctttcctaaccaaagcctagcatggtgtctaacacctaatacactctcaataaatgaatgagccaataaacagtgaatgtggtctagatattaaaatgctgagaaaaccctatgcagttgaatagaactatattcattgctcatgaaaggagattttacttaaaagttttaccttagatgtgctacctttttgagtaagggaggcaaattttcaaacctatgggagagttagggtggggagtaggagacagcactgccacattctgggtgggtgagagctggatgtgaagtgggcctggtgccagtctcagtcttgacctaattttgataactgttactgaacacgttgctcttttatcatggcgttgaaagcctatctaaaagcactctgtgggacctttagatatagcaagtgaaagggatcaaagccctgaaaactagacattgttggctcaccctggaaggctggcttcagtaacactgcttccctcttctccactgacaactggttcactgagcaggaagttgggattaatttactggagagcagggaaggtgacaggatttccacagcaattgaacacatttagcagagaaatgttctaaccattggtgacttcatgatttcctctttcttgggaaagtccaagactcttacctaacatttgtcatccttctcccctgcccccctcaatgaaggagaatgatagaaaggagatcttagcaaaaaaaggaaaaaataagaacaaatccaaacttttatcttatagttactatggaattaagtccaaaaatgatgctggctttcatggcaaacatgcatacttctctccttccatagcctcagtttctgtgccttattattgtttatattcattaataattttagctaatagggttattatgcaaatgttaccaggtgtttttatttgaagctaaaacaaaacaaaagaggtttaattgtattctgaaggatctaatgaactggggaggctttgagttctgaagataggacaaaaaaagaagatggggctacttgtttggtgaggtagattttcttttcttagcctactaagggtataatgccatcagaacctgaagcgtggcttggtgacttttcaaagtctctaccagctctttgattctgtgggcaataccgaagaaatacactgatactcaaaaatgcaactagaaccatggtagcgtatattttgaattttataaatgagtgtcctttattttgtaatctccgaggttagttccatttgcttctaaacttcctttgatctaaaaagcaaagcttgaacatttgacccagctattaacattggtggtagggtttagagaagtcagacataatttcagatgcaggatatgcatttggcttgtcatgggggaaaatgaaatgagaagtacaccccaagtcacaattcaggcctttttatttgatcaaagtccagccttgtagtcatctttaacagccactgaagcctcagtgtagcatttgtgaaaaatataaaacatgataaatatgtctaaaagaaaatgttttttctaactttgatgaaggcttactttctgtgacatgtatgtgcgtgtgtgtgtgtgttgagtattggtggtgggtgacccaagacatctccacatcatcaggaagggtgtggtttacaaggaaaccattgaggaccataggggaagaggtaggggcatgtgtatgtgggattttgctgaagatgtgaggaactttttggttgaataggaaaaatcaaatgtaacacccactctagttaataagtctgactctaactaggttcatctgctttttcttctgtcatagtagcatacaagtgaggtagtatggctgaatttagcgtggagacccttcacttgtgtaacataataagtttatgccagcgaaggaaaaataggtacagtgactaagagaaaatagactggtaatttcattttcaattcgtaaataattcacttaaactaaaattatttataggccattgtggaaacaattactttttgacttatttgcattcttaatgaagacgatgtgagtttttgagtggcttgcatttgtgacaaatgcatcaggtatggtcttggaatatttttgtagaaatgccataatttctgacatattggaaaatcacactcttaattgaaccaaagatgttttagtttcttaagaaatatgtaaaaatgatatttttcatttaagaaaatagcgtgtgacctcctcactaaaatattttctgaaaaataaaaaaatatgatttataatataataaaattataatattagatctactttttagtattaaaactgtaatagcatcagtaatcatacattctgtgtaactttgatagccccacaaatggagagaattattctttcatctatatctattcattatttttctctttagatatctccttgggccatatgaatgatgcagtctagcttcatctttgtcagtatggaataggttttttttaacgtttgtttactattgtgctttgacacattccctgctacttctagattctattttctgagcacccaatgactgtcagcatcctacacgggctaagagaatgcgacaactgaagaggaccttacatattatctgaccaaacgcttatgaaaccaaagcttagatatacaaagtcatacaacttcttctatatttactttaactgtcctcctagttctcatatttttttccaatttgagaatagtatgtgttccttgcttcaaaatggacagtcgctgtattgggtcttgtgcctaccctttcttggagaaacctaatttccataatgaacatttgacatattttcaccctgagatttttagcataatacagatgaggaatgaactgagatttggtagtacaagggtgtgtgtgtgggtagtggtgaaggttgtggtttgagaagtccatcttttatggagtgaagagaaggaagacaggcctattttttcatttggcaaacatttgctgaagggctactgtattgtactcctacacacaaccatttattattccgaaataataggcttggtggtgtttcagttttcagatttttaaataatttgtgaaaaatcacatagttgtcatacatttattcataactgtcttatgaaatagatattatcgcagacgtggtggctcatgcctgtaatcccagcacttggggaggccgaggtgggtggatcacgagtctaggagtttgagaccagcctggccaacatggtgaaaccccatctctactaaaaatacaaaaaattagccaggggtggtggcaccgcctgtaatcccagctactcgggaggctgaggtgggagaatcgcttgaaccctggaggtagaggttgcagtgagccgagatcgtgccattgcactccagcccgcatgacagagtgagactcttgtctcgagaaaaaaaaaaaaaagacatagatattattatccacatttttttcagataaaactgatacaaagaaaaattaagtgatttgcctaaattcctattgctaactggaggtagagctaggatttaaatcagctttttctgactaaaaaattgggctcttacaaaatatactatattgcctgtattagactcaacctatgctggtgttagagagatgaattaagtcatagtgtctaagcattattttatataaaagaaagaaaaactactattataatcacttcccataatgtctactttttaatttgtatttattgtacaatttaaatccctacctttcaccacatagaaaaattaattcaagatggattaaagatttcaatgtaagacctcaaactataagaatcctagaaaaaaaaaaactaggaaacaccattctagtcatcagccttggaaaagcatttatgagtaagtcctcaaaagaaactgaagaaaaatcaaaaattgacacacgggaactaatgaaactaaacaggttatgcatagcaaaagaaaccatcaactgagtaaagtggcagcctacataatgggagaaaatatttgcaaactacaatgacaaaagtctaacatccagaatctgtaagaaacttaaaaagttgaacaaggaaaaaaaaacccattaaaatgggctaaggacatgaacagatacttcttaaatgaagacataacagcagacaacaaacatgaaaacatgtgccacacctctgatcatcagagaaatgcaaatcaaaaccacagtgatacaccatctcacaccagtcagaattactgttactaaaaagtaaaaatagatgctggtgaggttgcagagaaaagagaatgcatatacattgttgattggaatgtaaattagtttggccattgttgaaagcagtataacaatttctcaaagagcttaaaacagaagtgccatttgacccagcaatcccattactgggtatattttcaaaagaaatccaatcattctaccaaaaagacacatgcactcacatgttcttcacagcactattcacaatagcaaagacatttgatcagcctaggtgcccatcagtggtagactggataaagaaaatgtggtacatatctaccatggaatactacacagccataaaaaagaatgaaattatattctttccagcaacatggatgcagctggaacccattatcctaagtgaattaacccaggaacagaaaactaaatactgcaggtttccacttttaagtgggagctaaacattgggtactcatggacataaatatggcagtaatagaaactgggttctactagcttggggagagagggagggggcaagggttggaaaactattgtgtactatcctcggtatctgggtgatggaatcagtcacaccctacacctcagtatcacacaatatacctaggtaagaaatctgaacatgaaccctctgaatctaaagttgaaaaaaacccaaaaataaataaatgaaaataaataaaaaacattttaaaatcgaataaaacttttgggaatgaaaaaagtgatggaggctggacacagtggctcatgcttgtaatcccagctatttaggaggctgaggcaggagtagtgcttgaaccggggaggcggaggttgtattgagccgagatcatgccactgcactccagcctgggcgacagagcaagactctgtctcaaaaacaaaacaaaacaaaacaaaaagataggaagcatttcatgtatactatcctgtaaagcaactttttaagtcttttgttcatttttattgggttgtctctttaattgattcgtaagcgttctttctatattctggacatattctttgttgggtatatatgttacaaatatcttctccctgtgtgtcacatgtgttttcattatcttatgggattttttttcaaaaacttttagttttgttgaccctcctcatcatatctttgttttcttcttcattaaaatttgctcttatcttactgatttccttcattaaatttcttttcattttttagaaaactttttcatttggatgcagagctcatttattttcaagctttgatttctttactgtaaatatccactacttactgtaacttagctttaccaccaaatttaacatgtggtaccataatcatcttctataagatacagcattattttatgtaaaagaaagaaaagctgctattataatcacttcccataatgtctacttttttatttctatttattggaagatttaaaaattttgttgaaagacataattttgccatatattcttcttgtgcatacacataaaagtatatataaaaataaattgcttaagctattcattggttaagctatttattaaacttccccacatacaaattccaactcttctgaatttcttcacattatgtaattcttatagtatccgttacataatcaagagcatttcctatagagtgctttactattttccctgggatttgcttcctaattgttgacaattattctgtgagttttgttgctggtactttattgatcttactagaaatatgctactggatttttttggtcaacaaacaggatttctatttcttcctcagatggtcctacaagtttgcagactgaaacatggagaatgctatttccttgtcactccactgggaataacaattgcttatatgcagatcatggcaattatgtcatctggccaacgataattagaagtcgttgttgattacaagatacagtttgatttcagagatattaaaatatgaaaaaatatgtgccttaggttagacatttagacacaaggtcctgttccaagaattaaaaatttttttaattcaattttttttttttttttgagacggagtctcgctctgtcgcccaggctggagtgcagtggcgggatctcggctcactgcaagctccgcctcccgggttcacgccattctcctgcctcagcctcccaagtagctgggactacaggcgcccgccactacgcccggctaattttttttgtatttttagtagagacggggtttcaccgtttttagccgggatggtctcgatctcctgacctcgtgatccgcccgcctcggcctcccaaagtgctgggattacaggcgtgagccaccgcgcccggcctcaattttttttactgtatagatttatggggtaaaaagtcatgttttgatagaagtgtatacattatggaatgaataaatcaagccatttaacatatctgtcaccttatttatttatttattttttggcgagatcatttaaaatctactctcctagcaattttcaagtatacagtacatgatttgttttcctattttgatgtcttctttcttccttgacccatacataggttattggaaagcttattttaacattactgtacacatgagtttttggattgttttatttttgctattaatttttaatatttttttaaatcagaaagtaagttattatacaaatgtttttgaaattttcaagacttgctttatgaccatgatgtggtgatgtgctttttgttaacattcctgaatgctttagaataatgaaatttttgtgggttgtgaattgtgttgtccaaatctgtaattatttagaaaaactgtatggtaaatcactttttaaaataaatgtgttaaaatctccaattacttttgtgaatttttcaaaatctccctttacagtggcaatttatattttatatatttgaggctacgttacaaggtgcataccaatttaaaattatgtctccctggggaattgaaattttgatggatttctaattatcatccaccaactattaaccattaataattatgagtaattacatataactattctgcatataatttctattatgtagcaataatttatgatacctctatccattatttttacattattgtatctctagcaatatttgcatttatgtctagcaatgacttgtagattaaggaacattttgtctgctattaataccagatttattttgctgagtatttctctgtatgtcatttttagacattaacttccaatgttcttatactcttttgaatctcttgtaaacagtacatagttatatttttttaaaaaatcactttgacaatttttgttttaacctgttgttagtctatttacattagtttgaattgccaatacatttaaattcatgtctgtaatcttactttgtgctttctgttttcctttagaatgacttttttctcgtttactattttgggagttaaaatctccaagtctattatttcagcgatttctttagatatcttaatgtgtatgcttaacatagtctaatgttaatgagtgtctttaccttcttccagtgtaatgcaaaggctttaaaacaaaatctattcattctcttctgaacttttatgccattgttcacttctgttcttttagccctttctatttagttttaactccagaaattagacatcatagttattattttttctcttactttctaaaatgtcttagaatttaacagtttattacattatatttttcaacctgtgttcctaacatattctaagatacttaagaccaagtatctggtcttatttatttttcattggtccccagtgcccgggcaatgccatatacttagcaggtgcttaataaatacttgctggctcattgactcagcatccaattatactcatgagtttcattaaatgagaaattttcacatccaaattaaaacatttaagttttttttcctctgtggttagtattggtttgccatgctccatttccatgggactgatttaacagaagtttcaattaccacccctccccctcaatttgttgtgggaagtggtgggtggaaagagagataacaagaaacaaagagggaacacaaaaataccactgtattttgtaactacgtgaaaaatggtaaaactaaaatagtttcatttttcatttgattttttttaacctaactgtgttcttcctttttcacttattgacatctatcagttctcataatattcctgtgctgtagaagaggcagtaatacattttattcttgggccttgttctgggtcaaacagggccatggtagagctaagacaaagttcaattctcctttctctttatccgtgcagttttttttccccccatattccagcatattccaggtaaaaagcttctttcttctgtgtgggttgagcactcttgttaagttttcattcttctctttgttacttggttcatctagaaaaacatttctttcccactaataaaaatacttttcttgccttacaatacctgacctaagaatagcttgaaaataaacctgaatttcccttaagataatgtaataaagggacaccagatcagacatctgttactcattacttataatccatggctaaaagtcatgctaataaggagttattgctatttgtttctcagatgcttgctcaagagactcatgcattgtctttagtcattttcactttgcttgtgatgtcagtaaagcattagcaaaattggaaacactggctattaatggggaggaggggactcccaccataacacaatttagtgatcaaaatgtgtcagttctagccactgctcacagtgaccatgagttacatttctcagttgctgaagagcgatttggaattcttagctttctataattgttttgttttaaagagaggcaggctgcttgttatgtatattcctcatatgtggctgtggtgatattacttatttatgtgcccctcaactaacaatgccattgttaagttgaaaatattggaagttgaaaatgcatttaatgctagcaatgcagtattgtacatacacaatctttgacaatgtctaaatattccgttgagattatttattgtattaagttgtatatagttactgggactgaaaagactcaacaaagggctacctgtgacctcacgaaggtctttgtttctgaaaaatctttaaattctgatcaggatacctataaagaaaaaaaagcaattcacttcatactccatatgtcagatagcaatttattgtgtgaattctgttgctggatggacaacatgtgctatgttgattgtaaaactgaaccgtgaatctaccttaggaagaattttgaaaacatacagattaatctatttttccttttcctttaaggatactcctcatggtaagaggaaggtgaaagggaggctccttcacaatttcaaatatttgttggcaatgtgaaatgaagaattgaagtagctataccaatagtaggcctccatcttgtactcactccccaatcctaaagcattttcatctcagttatctgcaatttgctgaaaaaagtgaattgaactgtttcactgtgttaacatatataggtccttatgcagccaaacagaatggaagtctggttgattcataggcttagctgtaggtggcctattgacatttcaaatagaaagaaggatttgcttggagctactgatgactattgctgctgctcttttccttttagactgtgaatgttaccatcagggaaagtaatttttcttgggactgttgctgtaggttccctgcttctggacatatatatggactattgggttgaaaacacagtagaaattttcatcatttttgcctactgggaaagcttatgatgtgaaaacaatttctttcttatagtcccccacccttaattattatttttccctactgtcagggtaacttaaatttttacctaaatgaaattaggggtatatctgcttcaggagttcatagaaggcagagttcaaagtagactaggctatccatgtgtgctacatagaggtgttcctaagtaatgctgatgaacctttacaaaatatgtctttggagtctaagttctaccactagattttttaatgagaaaaagacatcagtctttggcttttgttaactttcaatgtctccttgtcatctctctgaactgagaaggctataactataggtatggcatatggtgcatatttatttgttttttactcccatactgactcaggaaatgttttgcttcattaaactcatgatgctgacattgggaagccaaggtgggtggatcacctgaggtcaggagtttgagaccagcctggacaacatagtgaaaccctgtctctactaaagaaaatacaaaattagctgggtgtggtggcgcatacctgtaatcccagctactcgggaggctgaggcaggagaatcgcttgaactcgtgaggcagaggttgcagtgaactgagattatgccattgcactccagcctgggcaacaagagcagaactttgtctcaaaaaaaaaaaaagtcatgatgctgaatgaattattattgactaatagagttcttaatctgtactgataccagaagggttaaatttgtggggtactaagtcatcagaatctttctataatttcctaggtgcataaaaaaattaacaaagaacacttaattgtaatatgctaaaatatctcaaaaatagatgtaggaaagaacgttgccatctcacatatgcaaagcttaaaggcttactaagagttaattgagcacatgggaattatatattatttgtaattttattagctgagtctaaaaccaaagaaaggctgaatgtcaactctcctttcattattaagttcagtgttatgaatttaaggtctttggctctgtttctgagttatcattagagtagattataggattcgttatctatagattcccagctgtagaacagaggggaatgtattcatttagagttttagaaatgaaattaagaagagttgtcttttgaaatatctgaaaagtttattgagctttggtgagtttaatttcagtgcatttaatgaaagtcaaaggtggattcatttagttaaggccatcagatggagccaactgttctgtgcaaagagaaagtaagactggaaaaatgacatacaattaaccttttgcttgtaattcagcaaatggtcaggcaaaagctatatagaattggttggatgttaatatagtagaaattattgacaactgacctcagcttccaggttgttctagggggtgttgtttgaatatggtgatataagtaaagatatagtaattttctggaataagaaacctggattaattcattggttctgccacttgagatggagggaatctacatgaggtagatgaacacatacacacttacaaacgtgcaggagcaaaataaaagaaaacacttaaattgcttgattgatgacagtgtttattatttactagtctgaattcttccctttgcactcctacagtttccggtccataggagtatagatctctcctctttaatacttagattcagtgtgcctgtgtgcgtgttttgtgatgtgatgtcttaaaatatccagcacaaacgtatctcagagatattataggttcaattctaggccacctcagtgaagtgaatattgtaatacaatgagtctctcataattttttgttttcccagtacatataaaagttatgtttacatgatactgcagtctattaaatatggaatactattatgtctaaaaaacaatgttcataccttaatttaaaatgctttcttgctaaaaaatgcaaaaaatcatctgagtcttcaatgaggcataatctttttgcgggtggaagatcttgcctcaacatacgtagatagctgctgactgatgagtagtcattgctgaaggttaaggtggctgtggcaatttcttaaaataaaataaaatgtttgcatgcagtcttcacaaaagatttctctatagcatgcaatgttgtttgattttacccacaatagaacttctttcaaaactagagtcatttctttcaaatcctgctgctgcttgatcaactaagtttatgtactattcttttttttgagttggagtctcgctctgtcgcccaggctgaagtgcagtggcatgatctcagctcactgcagcctcccaagttcaagcaattctcttgccttagcctcccaagtagctgggattacaggcacacaccaccatgcccagctaatttttgtatttttagtggaggcaggatttcaccatgttggccagactggtcacaaactcctgacctcaagtgatccacctacttcggcctcccaaagtgctgggattacaggcttgagccatcatgcccggccatttatgtactattctaaatcttatgttatcatttgaaaaatgttcatagtatcttcaccaggagtagattccatctcaaggaaccactttcttcacttatccgtaagaagcaactccttgttagttagttttatagtgaattcactgcagaattaaaatgctccagttctaattctagttctcttggtatccccaccacatctgcagttactccctccactgaaatcttgaacccctcaaagtcatccatgagggtcacaatcaacttcttccagactcatgttaatgtagatattttggcctcctcacatgaatcatgatgttccaaatggcctctagaatggtgaattctttctagaaggttttcaattttctttgcccagatctatcaggggaatcactgtctacactagctatagccttatgaaatatattatcttaaataataagacttgaaagtcaaatttactccttgatccatgggctgcagaatggatgttgtgttagcaggtatgaaaacaatattcatcttcttgtacatctctgtttcagctcttaggtgaccaggtgcattgtcagagagaagcacccttttgaaaaaaaaatttttgggggggtacaccaggtctcaacaataggcttaaaatatccagtgaatcatgctttaaacatatgtgttgtcattcaagctttgttgtcccatttatagggcacaggtagagtagatttcgcataatttttaagacctttgggtttttgcaattgtcagtgagctctggcttcaagatgaagtcactggctgcattaactactgacaagagagggtttgaggttttgaagccagacatgacttctctgtagctatgaaagtcctagatagtatctccttccaaaagagggccatttcatttacattgaaaatttgttgtttagtgtagccatttttaccaggcatcttggccagatgatctgaataacttgctgaagcttcttcatcagcacttgcttcaccttgcactttcatgttatggaaatggcttctttatttaaacctctggaccaatctctggtagcttgcaacttctgcagcttccttacctctttcagccttcatacaattggggagagttagagccttgctctggcttagtctttggcttaagtcaatgttgtggctgtttgattttctatccagatcatttaaattttctttatagcagcgataaagctgtttctctttcgcattatttgtgtgtttagaggaggaacacttttaactagttcttcaagaacttttcctttgcattcacaacttggcttattttttgttgcaagaagcctagcttttggactctttcagcttttggcataccttcctcactaagcttaattatttctagcttttgatttaaaatgagagatgtgggactcttcctttcactgcaacacttaaagaccattgtagagtgattaactggcctaatttcaatattgttgtgtctcagggaacagggagacccaagtaggggaagaaagacaggggaatggctggctgatggagcattcaaaacacaaaacatttattgattaagttcactgccttacattggccaagtttgtgacatccctaaacaatcacaataatatccaagattaccaatcatagatcaccataaaaatatgataataatgaaaacatttgaaatattgtgagaattaccaaaatgtgacacagagacacaaaatgagcacatactgttggaaaaatgacatcaatagacttgcttgatgcagagctgccacaacctttaatttgcaaaacgacagtatttgtgaagcacaataaaatgaggtatgcctatatagggttataggattaggggcatgatgtttagtttcaagtcttttttttttaacttttaggtttgggggtccatatgaaggtttgttacataggtaaactcatgtcacgggggtttgttgtaccgattattttatcacccaggaatgaagcccagtaccaatagttatcttttatgctcctctccctcctcccacttccaccctcaagtagaccccagtgtctgctgtttccttctttgtgttcataagttgtcatcatttagctcctacttagaagtgagaacatgcggtatttggttatctgttcctatgttagtttgctgaggataatagcctctagctccatccatattcctgcaaaagacatgatctcattgttttttatggctgaataatattccatggtgtagatgtactacattttctttattcagtctgtcattgatgggcatttaggttgattccatgtctttgctattgtgaacagtgctgcagtgaacagttgtgtgcatgtgtctttatggtagaatgatttataatcctctgggtatatacccagtagtaggattgctggtttgaatggcagttctacttttagctctttgaggaatcgccatactgctttccacaatagttgaactaattcacactccctccaacagtgtgttagtgttcccttttctctgcaacctcgccagcatttgttattttttgactttttaataatagctattctgactttttaataatagctattcagagatggtatctcactgtgattttgatttgcatctctctaatgatcagtgatactgagtttttttgcatgtgcttgttggctgcatgtatctcttcttttgaaaagtgtctgtttatgtcctttgcccacttttttttttttttttttttttgagacggagtctcgctctgtcccccaggctggagtgcagtggcgcgatctcggctcactgcaagctccgcctcccgggttcacgccattctcctgactcagcctcccaagtagctgggactacaggcgcctgccaccacgcccggctaatttttttttttgtatttttagtagagacggggtttcaccgtgttagccgggatggtctcgatctcctgacctcgtgatccgcccgcctcggcctcccaaagtgctgggattacaggcgtgagccaccgcgcccggccctttgcccactttttaatggggttgtttttctcttgtaaatttaagttccttatagatgatggatattagacctttcccagatacatagtttgcaaatattttctcccattctgtaggctgtctgtttactctattgatggtttcttttgctgtgcagaagctctttagtttaattagatcccatttgtcaatttttgctattggtgcgattgcttttggtgtctttgtcatgaaatctttgcccattcctacgtccaggatggtattgcctaggttgtcttccagggtttttatagttttgggttttacatttacatctttaatccatcttgcattgatttttgtatatggtgtaagaaagggtccagtttcagtcttctgcgtatggctagccagttctcccagcaccatttattgaatagtgagtcttttccccattgcttgtttttgtcaactttgccgaagatgggttatattaatttgatggctggttgaatcagaacatgtttatgaacttcgtcttctaatttttctacttagttttctaatgcctttttaaacaaccatctttaatacccatggataattagcttctctcctatgtagttatacattcaattgaaatgcaatagtactatgcaggataatttattaccatacagaattgttattgtgtagaatatggcacttaatgagccaagttttttctcacatccaaacattataggtactgaagtagtctgaatgtcagagtctggaatctgtcctggctgcttgtcttatggagattctactctcttaggaatcggagaggcagaggaatgggaacagggccagcatctaaaactccaggccggctctgtcagttaatgtgctcatcggctgctctctcgactactgcatcatcatcccccaatatctctgctcttagttgttgacttttcccttgcttcctgccatgtggctttgtcatgcatgatattcttctcctctgcaattgagctttttttggtgcagtctctgcttttcctggcttggcccccatgtgatgctctgctgggatgtaagctctgtgagggggaggttttcattccttttgttcaattctgtgccctcagtgcctagaacagtgtgtctggcaggtagctgactctcaatcaataagtatttgttgagtaaaatccttggacttttgtctatatctttttattttaactctcacttttgcatttccatgagtagcctttgtcatcaggtacataacttatatcacctagggtgtggtataggaactttagacaaaatctcctccttctcagagctcatgcacatccagccacttccagcccatgaatgtccactgcaaggacgttactgttgtagggtgttatcacccattagaatatgttgcagctggcacttaaggataaatttgactccaagtgacttttgcctgtcccagattagatattcttgtggctaagaaattcttaggttttatcggagagcaacttcagtaaatgcttagataagtgaacttatttgtctaaattctctaattgggttggggtcagtgaccttttctgtgatattaacaattatttttaggaagagggatacaggtccagatgaattatgcagatgtgtgacaggctttctgcaatcctaggaagtctacaaataataatgatattattatggtttgggtcaacatatgcacagaaacttgctttttaatatctggtgacactattcctgctcctgagaattaatctaatacagttatctgagtggaaccttaaaatcccataagacagagtcttataggaatatatgtaaaattagtttccaacttaaaaccaaaaaatataaaaatatagatcttattgctgaatggaaccttgagatcatctgtttcagatgcctgcccactgccaggttaggtgtaattcaaatttctcacaaatcatctatctgagactcagaggttgaatgattttcctgccaagggtgataaaacaaagttaaatttcatctattgaattacagtacaaaagagaatatacactctcataatttctgtttaaattctcctttcatagtaaccttttacaacaatctgcaacttcattagcacatcttatagtatgtgcaggactttcagtctgtatagtttcagtttgaatggaattaaaagataaaattaaacttcattccctttcttcaaagcaggaagtttatattcttggtaagacaaagcacaacaaatctaataaaataggttttattagtaggctgtaaaagttacctgcagagcctcagtcttgattgggaattagcatgccaacatttttaaatccctcttaggaaagtttcgaatgctcttagaaacacatgtgttagaattagtaaaaagatttataaagggagacagctgaaactaaaactaatttcatttatccttcttgttttaaggagtaagaactggaccctagcaggtgatgaggctacatagttcaacacagttgagaaaaaaagtgatgaggccccaaaagtttcatgtgagactactcaatagcaatgctaacactagaacaccttttttttttcttatgcagtaagaagctttaataataatttcagggtatgggcaaacaagaggtatgagcaaagcagacagtctggcacatcaagggcagctccatgggtcttttctccccacctcatacatgtattctctgacccagaagctggaacgctatattctgaccccagcttcaaggctttttccattttgatgaagtgagtccctccctttaagtcttaaatcttgtataatactcaatgttacctcatctagtgtgttcagtactgtggtttaacttcagatctatttagacacttcttttgttaaatatacacaaatgatttttgaagcatcagtaagaggcaaatttgttcttacttttttcttatacttctggaaatattcatcatatagccttcaaatactgacattgaattgcatgagctacataactttacatcttaagtcttgggctgtcttcatttatcattatagtttgcagcactaccagaatatctaactaatgcaattctgctcctcccttaatcaagaactgatttcgcttgtatcatttcctgctattgccaaaaagaccatacaaactggtattgctctgaagtctacttgaagtctaggctagcaggtgaaattgaatagacctgtattttctcggatttctgcagtgataataataaaataaacatctcatttcagtaagtagcataataagagtttaagcaaaattaggagcaaggggctaattatgtattttccctttacatgctctttatgccattgtcaaagatagaggattaagtcaaccaaatatggcattttgtttggcattttttgatgtatagaaatattttaacactcctgggaagtatgacttcccttgtcatcacgttcactaccggttctattcatatctaaatattctattattaaatgatatcatctaataaagtcttaactattctggtattagttcctcccttttttaaatcaagatacagtaatttgtatattttcaaagtgctttataaacctcaaactatactgtaccatagccaagtctttgaaaggaaaggcacatccagctatgtgtgtatgttagaataatgcccgtgttgacaggaaccatattctccctgaaaagtatgattgatgaagtcagttttcagacaaagagctcatgaccaatttctttcaagcttcaaatcaagcttgacaacatgaagaatttcacatagcatatgagaaatattcactttaccttttcaactggtatcacaatcattgtgggcttccagacacatgcacaccgcactcctggttcaagccataagaaaccctgtcatgccagagtgttagttcagtacagccattaaagagaacatgtggctgggtgtgctcttgaaaacatgaaccctgcaggattctgtttattgctagttttatgtgcagaccactagtccaatataaaaatcaaagcacaaattttcacgtgctacacagtattgcagtttttggccgaattgcttcgtgcttatctgttatcttttgggttgatgggttccagaggaagccagctgtgcaattagagatgtttgggcacatctgttccaaagttgcagcctgaagatgctcagagagtgatattcttgtgtgtgtgtgtgtgtgtgtgtgtgtgtgtgtgtgtgtcctctgcaggtgctgtgttttcaaggagagaagtgttcagcatgaacaaacatgactaatgattgtgagaggtttatttgcaaacagacaggtgttggcaacacagaatgtaaagcagaaattattacattagggaagtgctatgggatttggggctataaatattttcctcacagacccaggtctttcttctaacctttgtttttgaatttcaacactgtatttatttgtaaaacaattaacactgtatattaaactatctctcattaatgttatattttaattgtgcttctcccttctactacattatgataaataatgactctgaaacacaaaaggatgtttaggtagtgaaatcaccattctttcatcacatttttcttcttacactcataattgtttaaagaactcatttaattaactgcctctgctgaactcgaactccctgaaggcactggccatgccatttcatcttgtattcccactgtctgacacagtgcgtgacacataggaggtgtttagaaaacatataatgaataaactatgatgttattttcactgtttgttcaatatgtgtttgtcctttaaatatttaaaagttttgtcatcaagtatggtatgtaggagaattctccattagcaaataccttgtccaatcatgtaaataaagaacatgttttcctgtaagaatattttcaactattattcttcgatgattatttatgagcctggtcaatagtgaaaactgatcatcttagttattatatgcttactatgttctcaggataagggatatcataataattttagttaacataattgtcttagagctaagaagaactttagatgtcacatcaccccaagaggaataattaaggtacagaaaggtaaaaagcttgtctagtaacattagtaggttttggttttcagttgtgggtttcttaattatgttttttaaaaaaattggtgggatttcaagaatcttttttgagcattaagatcaagcatagaaatatcataattactatcattatccaacttactcttcaagaatttgtctttactttcattaattaaagtgaaatacttcttttatagagtactgggatttgagatcgttgttgttttttgtacactggcatcctataaagttatacaactagttcataaattgattatgtgcttttgtttgctatgttgtatttaaagcatttagtttgtgtctaattcactttcatgttgaaagtgacataattatatgttacagaattcaaatgaaaattttctcaactttgaatatgcactaattcaaactgaaatgttttcatctttaatattttccacattctgattttatcatctaaccttttactcctttgtggtttgcatttgccttctttttttaacagctggcacatttaaaaatatcacctacatacacatatctcaaagctgtatacatggaaagactagtttttttctttctttctttttttgagacagagtcttattctctcgcccaggctggagtgcagtggcgcgatctcagctcactgcaacctccgcctcccgggttcaagcaattctcctgcctcagcctctcaagttgctgagatgacaggcgcatactgccacacctggctaattttttgtattttagtagagacagcgtttcaccgtgttgcccagggctggtcgtgaactcctgaagccaggcaatctgcccaccttggcctcccagagtgctgggattacaggtgtgaaccaccgtgcccggccattatttccatttttaaaaattaattgttgtagtaattttcatttctaagtcaattgtttggaatgcaattcacagactcagagaaatccaatttcaaatatgggctatatccatactgagcgctgttagtgccgtattatagatacattgtgggttaaatagaattttttgagttattttcaagttttattataatttcactaagaaaaatattttaaattctaacacagagcttgaagaaaacatcccatttctgcagtactggtggttctctaagaggcaagaagggctgtggctaacagattaaatacttctgggactatttaatcccagaagtttataaacttgttatatctctgtgtctgaataagagaaacaactggctatgattatatacctagatgttgggatatagactggagcaaattgagatcaaatatgtaaattggggcaaaggacctttgcctctgtggcttaaagattcttaactcacactcctccaactttcctctttgtatctattgtgagccacttcttattattcattattattatattattgtaatagtattattattattattgtactacatatctgtggtggaaaaaaggacaacagtgtgtaacgtgaaaagtaaaagtctccctccaccctcattatcccatcattctactccacagaggtaattagtactattgatagattcttgtgtattctaacataaattttctgtatctgcaaatatatatttcatttaggtgatatgaatttcaatttttctttctgtatatgccatttataagtctagtattaatgaacactagattgccagcatcctgattttaaagtgtcctggaattttgatcttcttaatttgaattccatgagcagcagcagagttacccttgtcctgagcctagaagtcgtccctagttaatcataatcaccctccacagagaaaagactctttttttatttcaagtaaaatcattgcatttcctaagggtaagggactaattcatttactagctttccaaacaggactgctaaattttttagatacatcctaggtaattgaattctcctgaacttgggaatatatccaattcttactcaaaaagttgtcccgattggatcaaatagttaaatggacagtaaggatgtgggaaaagaaagataactcagaaagcaggcatctgctatttatctcccagattgatgagtgcaactctattagaagagtaagtactaattaactcattaaacagttcccagtgtgattcctcaatgtaattttaggtgaatctgatgtttagagatttaaaatctaactgtagaagcgtatcattgcaagctattgataaaactttcagagatattagaaacatttcttaggccataaagtagaaaggaagtaatataaagctaaaggctcttgttgtatagaaagtacttaaaaacttttttagcttagttttctgaatgctaagtcagatgaccaatatgagcttaaaatcccatgttaataagagctctgatggcttgggaatttgcatctgtgtccaattctgaagagttatgttcctcaattaaaatctacccaagaagcatgttcagcatgtaatctaatggtaaagcaaatttagtaaactacattaaaaaagaaagacagtaaaacgaatgttccataccctgttgtaaagcgattattgtatggatcagcatggtggccctatttctccagggcacatatagcatggattagaaccacaaaagcatgtggtcctactccacagtctgctatgcaaacctcagcgttgtgaagactgtccagttatgagtgtcatacaataagcataagtctggttactgagtgtatagcacattgcttgtgagacttggctaaagtcccatggttgtgcatgtcttggagcatagaaattacagcatgcagctcaatactagttctttcagtagagagaattcttagtttcctgaaaaagatctgtggtcttctcagatgatcaggagaagagcaatattgaagggttttcagttttttctttcttttttatttttgagacaggtatcactctgtcacccgggctagagtacagtggcctgatctagctcactgcagccttgaacatgtgggcccaagcctcagcttcccaagtagctgagactactggctcataccaccatgccccagctttttttttttttttttttttttaagaaatggggtttctctatgttagcccaggctggtctcaaactctgggcctcaatggatccttccacctcagcctcccaaagtgctgggattacaggcattgagccactgtgcctggcctcagttttttcttgaaggccccacaaatattgttaaatgtttaaaataagttttctaagagtgatagacatatagtggaccatcaaagttattttaggagacagtctattaatcttttcaggaactagggctttgaaggtagagagtctgatagtataagactttatcactcactagcagtgtgactttgagaaatgatttaatctgaatattctttttcgtctgggtctgtaaaatatggatacttatatcaaccatgcagagtactgttgtggtacaaaatgcttgttaaatggtacccatgactagtaatgtgcatagtgataatgaattgttttccctttctcatagcatgagggatttctactagaaatgagacattcttatataggtaaactcgtgtcctgggggtttgctgtatagattatttcatcacccacgtattaagccaggcacctattggttatttctcctgatcctctcccttctcccaccctccgccttctggcaggccccagtgtgtgttgttctgttctcatcatttagttcccacttatcagttatgtatcaggaaaaagaattttaaacaaaaacagaaaaaatataatggcttgaataggataaaagtttcttactaaaaaaaaaaagaagtgagacattcttataatgagggtttataaatggtgaggttttccatgaaaatctttaaacaagtgatgtgcatatagtttctgtttatgtacttcaatattgcttattttagaatctaagctcttgggggctaagcactgtgtcagggtatcattgactacctgtaatgccaaatatgagtagaaaaatgtggtctgttatgtggcctaaatggcgcttaatgcataagcattttattgaaggcttaaagatgtttccatggaatgttgacacaacagattgaaaagtgaccgatttaggtaaatctggctcttataaaatggctgtagttttgtagcattcttttctccctctgtgtcaatgtagagaaggactgatccatttatcagcggctggctggcactctatgcgggacctttgttagttccaaattctgtttggcaacaaacatccaggacttatttattttcatcttctaaaaataagtctatgtttctgagatcttttcaaatgaataaatactatactaaatttacagtgattgctcattattcaaccaaagagaaaacagtaaatattgagcatggtgattaatttgccactaatcatgataaaattattcacagtcctctcttctctgctcacctacagtctactttttcttatttctttctcttgtccccaagaacatctattcttattttaatatcgttctaaacatgtatgactatatgtagtttccagttccagaaaacagctgatgctcaataattgtttttttggcgaggactctcctggctgctgagtgccacaatatccagtgtgctcaatgacatcaaagaatttctcattccaccagcatttgaaaatcaattcctggtttttactcttttgccttgtgaaagaagttttaaaacttaatgttggcttttcttctttgaaaaactaatacttttgaaatctttttcctttaagtttgagaattcacagtggtatatggaattgagcacatgagtgtgcacgtgtatgtgtttttaaaaagaataggatttatagctctaatatataactgcaccactaatgaactgtcttttctagtgccactgtctattccatagaaaatataattacctatgtaatggttgctaataaagaaactgttgcaatgcccttgactatgaacgcataagtaggaattgaaatgaaatgtttagtttagtgtctcccacatatagtcaccatccaaaacttcactgaatgtaataatacatttctaatacaaaaaattaaaagtatattttttgaagcatatatgtattaaacacattgcttggtgtgcttaatgaaatgttttttaataaaaatgttcttatgtagcagaaagtagatacaaagtcctgctttaattctgtaaatttaaaaattatgtagactgtgttatgattagaagacatggatgacatttgcttttgtataatgagcaaatcataatgcacaactataaaaatagactctgaaatttacaaagaagaaacaaattctatggaaaaagatcaatacctcttataattagggaagtacaagttaacattaaattacaaatcaaattggcaatggtacagtgaattttaatgcctgatactgggtaaagagcagagtaagataactgtatcacgctacagatagtaatataaaaattggcacaagttttttggagagtattcgggaaggtccttcaggaggcttgaaatatgcctaaattacaagatacgtgactgtagatttacctttacactggaaataacctaaatgttcaataataataatttgcgggttaaagaaatcccattcatttattcattcattcgataaatattttgtctgtacttaacatgtggcagataatgttggagtctctggggttattgctgggaacaaattatttgtacatgattacataattagagtataatcacggagattacgtgggactgttggtcatatggtttaactttataggagactgcctaactagttttgcaaagtgattgtaccaatttgcattcctaccagcaatgcatgagagttccagttgctctgtattctctccaacatattctattcttagtctttatcatttttaccattctgattggcatgtagtagtatctaaatgtgattttagtttctattaaactgattactaatgattttgataattgtttttgtttttattagtcattagtatactgttttaataaagtatgttttgggctgactagtattgtaaaattgaagttcccagtacctcaaattcctacatcgaagttcccagtacctcaaaatgcaaccgtgtttggagacagcatcttcaaagagataattaatttaaaatgaagttattagggtgggtcctaatctagtacgactagtatccttacaataagaggaaattcggacacagatatacacagagggaagaccatgtgaagatataaggagaagacagccatctataggcaaggacagaggccccagaagaaaccaaccctgctgacatcttaagcttgaacttttagcatccagcacagtaagtaaatgaattattgtttaagttccccagtcttggtactttgttacagcagctctagaaaatgaatgtaaaggaccttcaaactttttgctcattttaaattagattgctggtttatttattgagttataagtattctttatatattttgtatattttctcatacaccacatgtattgtgaatatttgccctcctcgcctcagactgtggtgtgaattttttgtctaatgatatttggaagtggagaaagtttaaattgtcaagaagtccaattatcaatttaaaaaaatattttgtgattatgatgttctttagagataatttttactccaaagtgaacaagactttctcctatggtttcttttttttctttttttattttattattaatatactttaagttttagggtacatgtgcaccatgtgcaggttagttacatatgtatacatgtgccatgctggtgtgctggacccattaactagtcatttagcattaggtatatctcctaatgctatccctccgcccccccccccatccccacaacagtccccagagtgtgatgttccccttcctgtgtccatgtgttctcattgttcaattcccacctatgagtgagaacatgtggtgtttggttttttgtccttgcgatagtttactgagaatgatgatttccaatttcatccatgtccctagaaaggacatgaactcatcattttttatggctgcatagtattccatggtgtatatgtgccacattttcttaatccagtctatcattgttggacatttgggttggttccaagtctttgctattgtgaatagtgccgcaataaacatacgtgtgcatgtgtctttatagcagcatgatttatagtcctttgggtatatagctagtaatgggatggctggatcaaatggtatttcaagttctagatccctgaggaatcaccacactgacttccacaatggttgaactagtttacagtcccaccaacagtgtaaaagtgttcctatttctccacatcctctccagcacctgttgtttcctgactttttaatgatcgccattctaactggtgtgagatggtatctcattgtggttttgatttgcatttctctgatggccagtgattgtgagcattttttcatgtgttttttggctgcataaatgtcttgttttgagaaatgtctgttcatgtccttcgcccacttgttgatggggttgtttgtttttttcttgtaaatttgtttgagttcattgtagattctggatattagccctttgtcacatgagtaggttgcgaaaactttctcccattttgtaggttgcctgttcactctgatggtagtttcttttgctgtgcagaagctctttagtttaattagatcccatttgtcaattttgtcttttgttgccattgcttttggtgttttagacatgaagtccttgcccatgcctatgtcctgaatggtaatgcctaggttttcttctagggtttttatggttttaggtctaacgtttaagtctttaatccatcttgaattaatttttgtataaggtgtaaggaagggatccagtttcagctttctacatatggctagccagttttcccagcaccatttattaaatagggaatccagagatatagatcaatggaacagaacggagccctcagaaataatgccacatatctacaactatctgatctttgacaaacttgagaaaaacaagcaatggggaaaggattctatcctatgttttcttttagaaatttctagctttagttttaccttcaggtctttgatctattttcaaaatttttacatataatgtgaagtaagaatcagtattctttttgttttatgtggagatcctgttgttctacctccatttattgtggactactgtcttttctctatttaattattcatacttcagcaaaatcaattgaccaaacaggtgtgcttctatttctggactctattctgtttcactgattacatatttacccttatggcaataccctgttgtcttgataaaggtcgctatatagtatgtgaggttttgtggattttattgtccaggatttatacatattcagttaaatttatccttacatttttctgctacttgattttttaaaaatgtcagtttttctaacttttcaactatttgttggtagtgtatagaaataaaactggatttttgtttgttctttttgtgtctttctatatgactatattcacttgtattgttcatattgcttttgatagatttattaaacattttctatttgtgcaatcatatcctttccatgtaaactatacgtcacctttctaattggtgtgtcttatttctttttcctgcattattgcactggataaaatttcaacaaaatatataatagaagtggtgagagtgagtatgcattatttactttgaatcttagggtaacatcttaagtctttcactattaaatatgttatcaactattagtttctcagagattccctttatgactctgaagatacttccatcaacatctagttttcaacactttgtttttttagacagagtctcactctgttacccagtctggagtgcagtggcaccatctcgactcactgcaacctccgcctcccaggttcaagcaattctcctgcctcagcctcctaggtagctgggattacaggcacatgccaccatgcctggctaatttttgtattttcagtagagatggggtttcactatcttggccaggctgttctcaaactcctgacctcatgatttgcctgcctcggcctcccaaagtgctgggatacaggcatgagccatagcaccaggccaacatttcttaaaggaaggcaataaaacctaatcaacaacgtaacattgacaatttctaacaccaggctggtcttaatctcctgacctcgtgatccacttgcctcggcctcccaaagtgctaggattacaggcatgagccactgcgcctggccacatgcatgtatctttataatagaatgatttatatttctttgggtatatacccaggaatgggattgatgggtcacatggtatttctagatctttgaggaatcgccactgtcttccacaatggttgaactaatttatattcccaccaagagtgtaaaagcattcctgtttctcctcgccagcatctgttgtttcttgactttttaatttctgagggctctgttctgttccattgatctatatctctgttttggtaccagtaccatgctgttttggttactgtagcctagtagtatagtttgaagtggggtagagtgatgcctccagctttgttcttttggcttaggattgacttggcgatgcgggctcttttttggttccatatgaactttaaagtaggtttttccaattctgtgaagaaagtcattggtagcttgatggggatggcattgaatctataaattaccttgggcagtatggccattttcacgatattgattcttcctacccatgagcatggaatgttcttccatttgtttgtatcctcttttatttccttgagcagtggattgtagttctccttgaagaggtccttcacatcccttgtaagttggattcctaggtattttattctctttgaagcaattgtgaatgggagttcactcatgatttggctctctgtttgtctgttgttggtgtataagaatgcttgtgatttttgtacattgattttgtatcctgagactttgctgaagttgcttatcagcttaaggagattttgggctgagacgatggggttttctagatatacaatgatgtcgtctgcaaacagggacaatttgacttcctcttttcctaattgaataccctttatttccttctcctgcctaattgccctggccagaacttccaacactatgttgaataggagcggtgagagagggcatccctgtcttgtgccagttttcaaagggaatgcttccagtttttgcccattcagtatgatattggctgtgggtttgtcatagatagctcttattattttgaaatacgtcccatcaatacctaatttattgagagtttttagcatgaaggttgttgaattttgtcaaaggccttttctgcatctattgagataatcatgtggtttttgtctttggctctgtttatatgctggattacatttattgatttgcgtatattgaaccagccttgcatcccagggatgaagcccacttgatcgtggtggataagctttctgatgtgctgctggtttcttgactttttaataatcgccattctgactggtgtgagatggtatctcattgtggttttgatttgcatttctctaatgatcagtgatgttgagcttttttacatatgttcgtttgctgcataaatgtcttcttttgagaagtgtctttttgtttgcctactttttgatgaggtttttttttcttgtaaatttgtttaagttcttgtcaatattatgagccatttttaagaaacacacgtttatacacaagatgctacattccttttattatgagtttccttgtgaagttaaaatcttctgtagtagtaaacagatatacaaagtgtcccgcaaaaacctcacttctttgggaatgaaagtccaggaggtaaactttagtccatgttcagttctttcttctgtgggaggatatgtttacttgttttaaatataaattatttttatcattagcctcaggagtttcaggtctcctgcatgcttaagagttagtgcatattgagaccccgaaaatatgatgtcatgttgcaagcctgggatcataattaaaaatagcaaaactagacccagatcagtccttggagcatggaccatcaattgagccatgcattcacagacatcactttgtgtctgtcagcagcagactggtgacagtcaccccttgaggcttgtagattctaagggctgttatcatttcttgttatttctagaccactttgttcctttcattgcggggaaaaatattgaggaggatttttgggcatgtataataaacagatagggaattgtattattttcttctataaatcttttcaggtaagtaaaaaaaataattgtttgatttcttaaatgccttcaaacgctatataattcaaagcattagataatttacaattatacttcccatatgtaatgtctgtgatctagccagtaggacaactcatttttattcagtgctcaagtgggtataatatattgacacatgcttgaatctgatttatatattgttcttattttcagataaatcatatgaatttgtctgcctaatacctgaaacaattacaaaaatcacttctttcactcaagagccacattctagacctatgcattggtaacaatataaagagctgtccttcatgtatcctctatttttaaattatcattattttgaaactgtcattccttttttaatagcttaaaacaaattaatttttacacttgagggtatataacatgccaaattagaaatttacatttgcattttaccattttctttctcttccttctcttcttcttcttcttttttttttttttgagtcagagtctcgttctgtcgcccaggctggagtgcagtggcgcgatcttggctcactgcaagctctgcctcctgggttcacaccattctcctgcctcagcctcctgagtagctgggactacaggcgcccgccaccacacctggctaatattttttatttccagtagaaacggagtttcactgtgttagctaggatggtctcgatctcctgacctcgtgatccaccagccttggcctcccaaagtgctgggattacaggcgggagccttctcttcttttttctgtcatttccactgccatctcaccatactccaaggtcctcatctatttgtcactacctctgtcagttagtagaaggcaagttcttagaacttttctatatgtcaacatcacaaatttctattcattcagtgcccttatacagtgtgcactgagctaagagtagattttttctttaagatggagtcttgctctgttgcccaggctggagtgcagtggcatggtatctgctcactgcaacctccgcctcccagattcaagcggttctcctgcctcaacctcccaagtagctgggagtacaggcacatgccaccacgcccagctaattttttttggtctttttagtagagatgaggtttcattgtgttagctagaatggtcttgatctcctgaccttgtgatctgcacgcctcagcctcccaaagtcctggaattacaggcaagagtaggaatttaaagataagttgtatcttccttcatttcttttattatttggcatagatatttcaatgtaatactttaattcttgctccttaacatttgccagaaccatctttagggaaaatgttgaattaggtatcatagagattctcttttttaaaataataccatagagtgattaaaaccaccagcattgggcatggactgagactattttttcatctctgtgttatctgtgcatctgacacgtagtagaaaccaaatgaatatttgtagaatcaatgaatgaatgaccaggaaatgaaattgtgaaagaatcaaagaggattttttttcttttcaataagctggaagaagcttgtatatgcttaactgctgattagaaaattcccattgaagggagaaatttactattcaaaagggagaagggtgagagagatgataacaggatttcttagaaaaaggaatttaatgggatcagagcattggattcactgaccttagggatgccactgaacacaaacaatgactcagtctgagattttcatacaaattacctattcttcctgattctgattagtcttcttctgagatatgtaggcagagccaccctaaaccaatccttgcctaccacactgcttgtacagcccatctcttacacactgatgcacatggaagcatatatgtccttccacatcctttgcttatgtccttgtccccctcttctcacatatcataacaagctataatgcacattttcttgcctaatgcttagggctttctattcatttcaattcctcattccccagaatcaacacagctaatgtgtggtggtgtcagaactacatcctaaatttccaacccaactctattgttttagacatatctctaaatgaaactgtaaatgagacatttccttgttttccacaaggagagttttattatctcatattaatggagaagtaattgaactgtctttcaatcgatatagcttaatacaaattttagctgttatgatgttggagccccaccaaacaactttagcaagtacttggaaattgctcctctgggaagcttttcttaaacccccagtattgggtttggtgcccctccagtgagttcgtcttatagcaccctatgtagcatttgtgacactgaacagaaattgtttaactggctactattaactacggtttccctggggatagatgtgatcttttataccattgtattttagcatctcacaaagagtctggtacacagatgataatcaatattgaataatacccaataagccaatcaaaaaatctgaagacaagagcttgacatgtttgacttttcattttcttcacaagtggatgttcaattgcagtgaaaacagttttcactgatatgttatataaacagagagagcctattttaagatcttatggctaatgggaacaattttaaagtgtttattgagaggcagttttagacaatgattcaaaacacaggatttggggtcagaatacctgtgttggaatcttgacttcataacttactagcggtttgaccttgaacaagcaacctatcctctccacctttaatttcatcatctctaaagtagaaatgataatagacctatgccagagagttttttttaaggttaagtgagtttataaaagttatatataataatgactgtacatgtattattattaaattgtgagcataatattttccaaaatactttgtattaaaactatgccttatattttccagtggttaaaggtttccatgcattatcctataaaagatactcactgccttgcttttattttacatctgaaggctagaaaaataactagatttataaatagaataaaacttagacttttttaagttaaaaaaattattacctatttttatgtgtgtgatctgccactactcagaggacttgactttccttctgtgccatgccattaggacatgactactttggacacataagcttctaatcaaatgattcattactactcacatttaaatataagaacttgattcttcagatgaagaagtcatgacatttgtatatatagcaggtaaaatatccatttttaggagaaattctttacatgtgattgctccaagcagtcaaaaaaaattaccatcactttatgaaatgcatgagaatatttacagaagtgtttccatgtatgtgtgtcaaagaaaccagtggaggctaatttgtatgtaacttgtcctaagcagatgtgacactgagtatttgattaattggccaaaatggtaagcttgttgggagacttataaagaaaagaaatttacttacttcctaaaaggtctcttttgcagtggctgtagcatacactcgaagtagccatggacatagaaactatagatgtattcagttggtgcaaaagtaatcatggttttgccattaaaagtaatgacattacgtttaaatcttcaattaatcttgagttaatttttgtataagatgtaaggaaggggcccagtttcagttttctgcatatggctagccagttttcccaacaccattgattaaatagggaatcctttccccattgcttgtttttgtcaggtttgtcaaagatcagatggttgtagatgtgtggcgttatttctgaggcctctgttctgttctgctggtctatgtatctgttttggtaccagtaccatgctgtttcagttactgcagccttgtagtatagtttgaagtcaggtagtgtgatgcctccaagacctaaaataataaaaaccctagaagaaaacctaggcaataccattcaggacataggcatggataaaaacttcatgactgaaacaccaaaagcaatggcaacaaaagccaaaattgacaaatgagatctatttaaaagagcttctgcacggcaaaagaaactatcatcagagtgaacaagcaacgtactgaatgggagaaaatttttgcaatctatccatctgacaaagggttaatatccagaatctacaaagaacttaaacagatttacaagaaaaaaaaaaaccccatcaaaaagtaggcaaaggatatgaacagacacttctcaaaagaagacatttatatggccaaaaaacatgaaaaaaagctagtcatcactggtcattagagaaatgcaaatcaaaaccacaatgagataccatctcatgccagttagaatggcgatcattaaaaagtaaggaaataacagatgctggaggggatgtggagaaataggaatgcttttacactgttggtgggagtgtaaattagttcaaccattgtggaagacagtgtggtgattcctcaaggatctggaaccagaaataccatttgaccaagcaatcccattactgggtacataccaaaaggattataaatcattctactataaagacacatgcacacgtatgtttattgcagcactgttaacaataacaaagacttcgaaccaacccaaatgcccatcagtgatagactggataaagaaaatgtggcacatatacatcatggaatactatgcagccataaaaaaggatgagttcatgtcctttgcagggacatggatgaagctggaaaccatcattctcagcaaaataacacaggaacagaaaaccaaacactgcatgttctcgctcttaagtaggagttgaacaatgagaacacatggacacagggaggggaacatcacacaccagggcctgtcagcgggtagggggataggggagggataacatgtagataacaggttgatgggtgcagcaaatcactatggcacgtgtatacctgtgtaacaaacctgcacgttcagcacatatgtcccagaacttaaagtataataaaaataaaattaaattaaaaaattttaaaagcacaatgtgataattgctcagaaacagaatgatcatgagaccataaagaaaatccaaaaatagaccaaagataaatatgaattaaatgaaggtaatggcaaaaacagcaattacttttgcaccaacctaataggtttgcatctcttgttacctaacttattacctacttgccatttggcctgttgccttggagaatttatgaattgagtaaaattgttgaatgtctgcagcatgtcagacactgtagtaagagacctgagggcacaggagaggaatcacactgggactgggcaagttcctggtgggaagaatgtggaaggcttgagtaaatcctcagggaagctgcaggatagactagctaccacatgacatcagataaagtgccttccaggcatagagggtcaggatttaccccctcactcaatgattgatttgttcattctgcattgattgcaccaagtcctgggaatattatattcaatttgacagagaacagccggatctcaaggagtttacattttggagagagcgtcaggttatacagacaacaagcatattcacaatccaatgtcaggtaggggtaagtgttgtgaagaacaataaagcaggttatgtgcatggcataagggggtttctgttttagacggtgacatttaggagacctgaatgaagttaaggtgggaaccatgtaagcatgttctatgtgtcaggagcagaaaatgcatagctcctgcagcaggagggtgccaagtgggcacaggaatccatggggccagtgcctggtgaggaggaagagagggttagagatgaatttggagatgaagattgtgcagcctttggttttattctacttgtgataagagcccctggaaacttttcagcaggtcagtgacatgatctgatgttattttaaagtaatgtactagctgctgtgttgagaatatattgtaaagatcaaaataaagaactagttaggaggctattgtagaggtatagggaagagatgggttgagcatggatggtagctgtggatgtagttaagaattggtcataattatgattttttggaaaaacattagcaaatgttaaaaactgcatagtgtataagaagccagtggttgaatgtttgtggagcttgagttttggggtgtgaagtatcagaagatgaaggtagagattaaacctgtgggtgttaggaagccattgtaggagattcagaaggggagtgacatgagcagatttgtgttttagccaatccgcctgactgcactgaaccttggtgcggcagaggctatttttacttatcacgtatctatgtgcttctctaccttttgcagcctcccatgctgtgggttggggccacatgacggggctctgccagtgagaggtgggaggaagtgttctgtgtggccctctgatcctctcctctttgctgataaccatggggagatgaataagttgcgggtggaagcaagctgtatcccatttggggcatcactcctgggtaaatggtagatccacatttaccctacagaactataagtaaaagttggttactgttaaaatactgagttgcaggaggctttgtttccctaggaaaccttaatattactcagttcttactatcaggacatgattgtttgcaagagtatcaattaggaggctgttccagtaatttagctgagagaggagtacctagaccagggcagtggtaatgtggatgaggagaagtgaccaatttctgatctgtaaatggaaaggaatgcccctcccatatttgtcagaaggattaaatgggaacttgaaagcacctgtaaagtgaaagctgggacacttagctggcatatttcttcttcttcatattgttaatgacagctgtcagcctcagtcatgcaacctcttcatgtaaatgttcagttttaacctactgtcaggttatgtagtacctgacaggagccctgaagatctttttcatcacatgcttattatagttgacatttctgccacaatgatgtgcccggtagaatgaacttgatatggctttattccatacatgtcaagccttggcagtaatgatttattgaaaaggtgaacatttggtaccaagtgttgctagaaaagaataaaacttagtaatgtggtagacagtaagagaagaaattcagtaatgtgtcttacagtctttcataggatacagtgtttcatggggtacacagtcttgaaaattagaaaggtggggataattttatcaagtcaaaacttacactctttgaaacctattaaaccagtgccatttttgtgaaccttgcaggtttttattgattccattcatcataagcaattaactaaggttacttttcggccagcttctaatgaataggctgaagatagaaacattctataggcacaacactcaacgtttctccaaatcccagttcctaggaagtataataagtagagtaatatattctgcttcttaagtttccagatgatggagttttcctgtcttcatatgtcatcacatggatttgttctagttagatgacgatgatgattgtcaagtatatgataatcaattgatgattgctctttaaaagatccaatcttgttttacataggatggaatattgtctttaaaataagtcagtgaagtaccccatcatatataaaataacttgcagtgcttgcttaccaacaattaactttacatcagttaatctattgctctaagcaatgcacaaggtagctctaggaaatacacaattcctcgaaaatatgttttcttgtcttcaatacatttgcactttatgtagggcagtcaaaagtacacaactgaagggatttgaaaaaaagaattagaaaggaaccagtcaacataaaggaagagagtacagactgaatatgcagagtgccaagacagcgcagatagcccccgggccctccaggtctgcaagaatgtagctgtgttagagtcctctgacttaagtttagccactctgtcctgtgattcttcctcatttctattggtttacttatttctctcttcatctgctatacctgtgcgattccagattatcttcatttctttcctcatggagatggcgaccaatctggtagcttgtttacctgtcttcagtctctttcccactccagtccaacttgtctaaaactgcaagaataagcttttttttttttttttttaaatagcattttacccttattcaccagacactgacttaagactcaattaaaaaaattctgctttaagacccacggaacacagtggcagggaatacagagagtctgtgtctaaacccaacaagccttgtaaagaaaacatcaagccctgccaactcacgtagactgtccttcaccttgctctctgtcactacctaggttatttttttggtgaaattgaagttgggccttaccacctagcactcctactcttgcttttcttgtaagtaggcatggcctttcatgactagttccatctcgttttcagtctgtgacactggttggtgtagtaaacacctgtttttagatttgctaaaataggctcctctgttgctgcctgtattagcctcctgggattgtggcaacagcctctcatgtgccccaatgccaggacctgctccttcctgcctactgcagggattgtaaaacagttttccatggtgatctgcaaaatattcatagatttttaatgaacaaaaaaggttctaaaaacaaacaagcatgaaaaatggtgtcttactgcaaagcctctcagagcttttgatatgctaatatgcattgtgacatgctaatgtgaattgggactctccaagaggaagaattaatatgcaacattaatgaaacttatttgatccagaaactacttttttagataaacatctgttaccatcacagagaattacagtgttccaagagagtacagtttgcaaattttggactgctccatcaaataaaattccttccaccttgaccaactcatcttttcttctttgggcatacttggttcagctcagtcatataatttgcaaaattcactatccattttaaagcctcaggtcagcttagtctgtgtacagtcccagcaagaaaagaaaacagtggtttcaggttctagagctgtgtttttatactttatgttcattcagatgaatgtgaaaaccagtttggagaagagtgatattctccaaattggaaattgacctaattgctctttacagagaattatagtttctacttttctgaaaaatataagtacctattctttatctaaaaattattcagggttattgtaaaataatcaattaatacagaaaagtctttatacactttttaaaaaatttgcttctttaaagcaaaagaaccccacaaatcctattgctcaaaagtaacaacgttaacattttgtaagcatccccttagtcatgtttctaggaattttgcctcttggtcatgtacagatggtattataacagagaatagaagtaaggagaacaattaggaaagcattatggtaacctatggaatgataagaccatactttgggatgtaaatagaaaggaggccatgagtataagaggtaattgtatactcaagaggtgcccataaatcattcaccctcacattcagatacatataaaaaagtatacatacaaattaagtaaatttttagacaaaaatatgccattaatcttttcagatctgtgcctagagatccccatcattaccttaatggctgcctggtttacaactgtattaaggtgccaatgtttgtatcacctaatcttcattttgaaacattttactgtttttcttatatagcatataaaatttcagtgaatatttttatgtattatttttataataccatagtatagtctctaagaaatgaaataattgcactaaatggtaaacccatttgaacttttaatctatacttggtagaggcatctcttcttgattaatttctgaggaagtctttatatactatggcttataatatatttttcataaactgccaggtttcaacaattgatgttcccaggttttaatattcttggaagagattaggagataattttcaccttgtgattagccatagccttgtgatttcatccctcttaatggtttgttttttgtcttccatctcttcagactggcatgtcagagtactttaaaagtattctcagtcatatttaaactgggatggtggttcttgtgcacttgctgtttactttgctacacaaggagaatatttaagtttaattccatttgtatctttgatgtaaatatagcatagttatgtgtccagaactatgctgtcaattatagagagatgtaaggacctcattagatttatagaagatatgtcaacacacgttaaagactataaagcaagatgaatgattaatattttaaacagtggtatgttgctaggttctgtagaagaatagaaagaaaaatttcttgacccgggataaccagaagaggtttcatgaagaaaataataggccctgaagagtgtctgggacttaggaaggatggagcaaaacggagggctttcatgggagaaagatgcatcggttgtttattgctgtctaagaaatgactccaaagtgacctaaatccacacccattcatcatttctcatgatcctctgggttgactgagcaattggttcttctgctcatttagcttgggtttcctcaggcagctacatttagctgatgcattagttgggagctaggttcagtggggactacaagaataactagacttcgctattcttgctctcttgttgtccctcagtacaacccagacttcttcagggtgatgatttcaaggcagcatcctaagagagtaaaggcaaaaacttcaagtcttctgaaggtctagctctggaagttgcataatctcatctctgccacatcctattggtcaaaggaatttacaaagctagggaagactcaaggaaatagattccatcttttagtgggagaagcagtaaagtcttaccacgaagggatttgcataccgagagaggaaaaatttgtggtaatgtttttaaacccaccacaagggaactgtatgaacaaagatttagaagcaaaaatgaatttttttgagaatcagccagaagacatattaagacatgatttctcagaagttatgagaagctcctggctattccatagggatcattctcaggaccccaaactatttaggttattggcagtgccggccacttcagtctttgtatctcggatcaatcttactggtattttaataaaatttcagtattattttaagtattatcctaatgcttccatatttaagtaagcataatagtaacactaactttatagataaatagaaaaagtgatgtaagttatattctgtatttgttgcttcttttacatgctggtgcttatgattggagaaatggcttgcaggtatcaccacggaaaagcaaagattcctgggtcatttaaatgtgtttctagtacaaaataaacagagaagagccataaacaaaagaaattcagtttttcatcatagtaagagaggacttgttgtattttcttattccttttttttcttctgtagctgataaagctagacttataaataggtaaggtaatctttgcattttataaattcaaggtcataggaaaatctctgtatcgaaataatggattgctacatagctgaagtcttatcattgtagttttcttattttgtgctttaaagttgttttttaaagatgcaatcaaagaatttacaaatatcctgaaagatacatctcatgctattatcaatcatcagatcagatcataattataccgtgtgtgtgtgtgtgtgtgtgtgtgtgtgtgtgtgtgtaaatggagatggtggggggaaatgtgccttttcctaacttaacataggaaaaaaatagaaacaaaatagaagcgacaaagacatgtgtcatcagctacataatttgtgaaatatgttatactttcagttgttccttgaatctataaaaatagcagttttccagcctgggaaccatagcaagaccctgtctgtacaaaaaaatgagccaggtgtgttggcacatatctgtgatcccagctactctggaagctaaggtgggaggattgcttgagcctgagaggtcaaggctgcagtgagctgtgattacgtcactgcactccagcctgggtgacagagtgagagactctgtctcaaaaaaaaaaaaatcaatttttagagatagaaaataaaagcaaaccaaaatttcagcggcaaaataagtcagtcctactatcttttccaagttggtgttctgctccttgagaacataaagttgtgtgttggtgttgacccttgtccagctttgcatcttttaacacagacctatctgatttctccttagtcatttgtattcagctgaagttttagtctttgtaactatagattttgaaaaatcatgtcacaaaaaaggcttcattttccttctgggaacctctgagtgactgtgcatcatcagcagtctctggctgtgtttcttgtagaacctccctcactttctttcttcctctgcttctttccaagctgggtttaaaatttctgagaaacatggagaagtgacgagtgttccaaggttggcatagatagcattgcactcacttgagattgtggcttagtgcctaagacagctcccctccagagaatcttttagtgactaagttagcctttgtattagatgggcaactgcaccaactaggagggtgtgatgccttaagcaatggggtaggtcctgtgagaagggggcttagagtgatggtagcaagtaagaagttgggaaaagatgggcactaagaggtagctgggggcttctaaagatagcatagagttttactctctggttgtctatggtggcctgacagttgttacatttaggaactattgtttgatccataataaatgagtctgaaatggtgagttcagtattccctgaacatctactattattcctatttcagagggatttttctatattgcccagatagtttttaatcaaagttacaaaaaaatctgtagctgtgtaagcaaggcaagtgtactaattttattagaagctaaatgagttttgctggattagagagaataaagaaaatgaatttacttagtgactgagcagatccaatggtgcttgaggtgtcaatggtagatagggatgctgtttggagcctttggcaggcccccatagatgaatcacagtggaggcctctaggattttggagcaaggccctgccgtcttctgcagataactactctccttttgagagacagctcttagcctgttactgggctttggtggaaactgaacatttgactatgggtaatcaagtcactgtgcaacctaaactgtctatcatgaactgggtgctttctgacctatccagtcataaagtgagtcatgcacagcagcattctatcatcaaatggaagtgatatatatgtgatccgactcaagcaagtcttgaaggcataagtaagttacatgaagaagtgtctcaaatgcccatggtctccattcctgccaccctgccttctcttccccagcctgcaccggtggcctcatggggagttccctatgatcagtttacagaggaagagaagactagggcctgattcacagatggttctgcatggtatgcaggtatcacccgaaagtggacagctgcagcactacagcccctttctaggacctccctgaaggacagcagtgaagggaagtcttcccagtgggcagaacttcaagcaggccacctggttatgcactttgcatggaaggagaaatggccagatgcgcgattatgtactgattcatgggctgtagccagtggtttggctggatggtcagggacttgaaagaagcatgtttggaaaattggtgacaaagaaatttggggaagaggtatgtggatggacttttttgagtggtcaaaaactgtgaagatatttgtagctcatgtgagtgctcaccaacaggtgacctcagcaggagaagactttaataatcaagtggataggatgacttgttgtgtggacaccccttggcctctttccccagccaccccgtcatcgcccatgaacaaagtggccatggtggcagggatggaggttatgcatgggctcagcaacatggacttccactcaccaaggctgatctggctatggccactgctgagcgtccaatttgccagcaacagagaccaacaccgagccctcgatatggcaccattactctgggtaatcagcccgctacctggtggcaggttgattatattggaactcttccatcatggaaagggcagaggtttgtcctcactggaatagacacttactccaggtataggtttgcctatcctgcatgcagtgcttctgccaaaactaccatccatggactcatggaatgccttatcctccatcatggtattccatacagcattgcctctgaccaaggcactcactttacagctaaagaagtgtggcagtgggctcatgttcatggaattcactggtcttaccatgttccccatcgtcctgaggcagctggatgaatagaatggtggaatggtcttttgaagtcagaattacaatgccaattaggtgataatactttgcaggtcttggccagagttctccagaaggccatgtatgctctgaatcagcatccgatatatggtattgtttctcccatagccaagattcatgggtctagtaattaaggggtggaagtggaagtggcaccattcaccatcacccctagggatccactagcaaaattttcacttcctgttcctgcgatattacattctgctgacctagaggtcttggttccagagggaggagccaggagacacaacaaagattccattaaactggaagttaagattgccacctggacactttgggctcttcctacctttaagtcaacaggctaagaagggagatacagtgttggcttgggtgattgtcccacactttcaagatgaaattagtttactactccctagtggaggtaaggaacagtatgcatggaatacaggagatccattagggcatctcttagtattaccatgccctgtgattaaggtcaatgggaaactacaacaacccaatccaggcaggactacaaatgactcagactcttcaggaatgaaggtttgggtcactccaccaggaaaaaacacgacctgctgaagtgcttgctgaaggcaaaaggactacagaatgggtagtagaaggtagtcatcaataccagctactgccatctgaccagctgcagaaatgagggctgtaattgtcatcagtatttcctccttttgtgaaaaacgtgtttgtgcatgtatatacttgtactaagaaaatatcttcattttatttccttttttttttctttatcatgttgacttcatatcagcatttaagtattgttaactttaatagtatttgggttggggattggtgtgtttctggttgtacaaaggatagttgtattatattaggtgtaattatgactttattattgtctttatttgaagattatgatctcaggagatgtatatgggttcaagttgacaaggagtggacttgtgatgggtaataatgagtgtcaccttgattagattgaaggatgcaaagtattgatcctgggtatgtctgtgagggtgttgccaaaggagtttaacatttgagtcagtggactgggaagggtagacccacccataatctgggtgggcaccatctaatcagctgccagtgcagctagaatataaaacaggcagaaaaacataaaaagattagactggcctagcctcccagcctgcatctttctcccatgatggatgcttcctgccattgaacatcagactccaagttcttcagttttgggactcgggttggctcttcttgctcctcagtttgcagatggcctattgtgggaccttacgatcatgtgagttaacacttaataaacttccctttatatattaagattaatattaagtgaagatatatcctattagttctgtccctctaaagaacactgactaatacacttagcttaaaagagaataactatcatagaaggataaagtggagatcaagccatctgaatactttgattctttgtttttactgttatgttaatttcttataattttttcaagtaaacaatcttcccacatctttcccttcattcctcttcctctctccatttcttccgtctttgttacattagtaattgattaatgcaggtttgtgattaactttctaaagttaagtggttctttagggcatataggaaataatatcaatagtcgttgccatgtaattattggggctattttgacaaagtcagttatggtaatcacaggatcagctctaagataggtgacatctatccaatattatactaaaatttggtaagttccaaaagtgatcctgctgtgtcctaactaattctactagttgacagttcattcaaatagtgattcagtcaactcactgtatcacttggaatttccctttccaaattccagcatctcttagagggaaaatgcgtcaaatagttttcagtatttaacacttaaagttattgatgagaccagtttctaacaaaacagttggcacagcccagatactagatggaatggggtgtagattaagtgaagattggaaaatagaaattgcctggctcgtagcagatgcatagagggtgcctacatatatgggtcactgcaaaagagcatccagcgaagccaggagccattatgagagagatggaaggagagcaacttggaaactggaagtttctgaagatgagcttctccactttgtgctaaggccaaccggagccatttcaaatgttttaacaagctgtgtgctacacagatgatcacagattgctggaacattttccttccacatcataaatgtcattattaaaggtgaactttaatgaatagaaataaaagtagaaaatgatggttggatcacctatgaggccttaagcgttactgccaatgcattatcatatcaatagtttaaactgcttagcctaaggccaatatcacttggcaagatttataaaaggaagataattaggaaaagttagtactggttatcattatggaggggcacaaaatataatatctaagaaggaaaaattactaataaggagatggagagatgcagcttgacctaatgagcaaacgaaataactggaccacatttttttagagacctgaatatcactatttgatctcttatcatgagcaatttataagagtgaaggccaggttacagttaattagcttaacatgatttttctttgactctacaaattgtttaaccccgagaaataaactatattgtttatatgcttagattggctatatgaatttttataaactataaaaagagaaagattcatcttctttcaaagaatataatttgggagaattaaggatgaatagttttctatagggaggagtggatactactggagggtggggattatgtctgtcttttttatcattgtgttcccagaggttggtatagtggctggcatataataggtgtcaaataaatatctactaaattcagcaatgcttgaatgaatagtgatgtctgtgatgagttataacattgttcaatcttctgacctgtctctttttgataacattgtgtattctttcatgtctttaatgttcatattataaaaaggcatttttccattttaaaatataaaactatattacatattaaaaattgttcttcagagtattctcttgggctgtgatgtgtgtcataaaggactcactaccctcttcctccaggacctctgcccaattgagaaccactctgtgttattaacgttaaattgatcatagttacataactaatcacatttagtggcttaagaaaagaataattatttattttattcatgaatctacaatttgcacagggctatgagggtatgacttatttcaagttcatgtggtatcagctaggatggcttcagtggtcctgaaaactacttagttgactcagccacatggctggtaggctgatgttctcaagctgtatcctgcacatacaatcacagactgatggaacattttgttttatttcttaagtatcattattaaatatcatgaatatgaaaagaaaaaacggaatggtcgaaccacctacatagtcgtaagtgttaaccagaaatgtatactcacatcaatattgtaaattgctcagctatggccagtgcttagctgggagttcagccaaagctattggccaggggcctttattcttctctatgtgggcctctccagaaaaatgctcgggcttcctcacagcatgaaaactagattccaagagcaggtgtttcaatagtgaggaattagaagtttctagttttgtaaggcctctgggcctagacattggcacaaaatcatggtcacaatattctagtggtcaaagagtcatagggtatgcctacattcaagggatcagaatatagaccttgcctctcaatggaagagttctcaaagaatttctgaccccttccattgagaggcaaggtctatattccatcttttgtgtgtcataattatcttcaaaataatccttttgtggtgaataagaaaaatataagactttctatgtaaggcatttgctggtatgtatgccagatttactaagaccttaagtatgattagcttgcacaattagcagttatctgaagtctgtaagtctgcaggagagcatataaaaagacccttatgaaattgtcataaattaacctaattattactattaacagtaaagtacatggattgactatatgataccttcatttaaaaggtaaaataatgtaaggggtctctataaaactgacaaaactggccagaccatgggaattcatgttcaatgaatgacaatggaacttccaatttatttttaccttaatatggttaggacatgaataaccttagcctttaaatgtttcactcccctacctgccttaacagtgtatattccttctgtatatttataacactggtagtaagattttgatatgaaaataaaatgtttctgaaaaactgttttttagtttttggtgtgtgaatttacaggaaaaaaatatttgaacacttgccatgttctaggaactggtctatattgggaaaatacagcagtgagccaaaaggaccaggcccacacctgccctcttggaatttgcattcctaggggaaaagatggataataaatgaataaataaataaataaataagtaatgtaagttaaagtagtgataaattatgataaagcatagtaaggaggtggatagtgatagtgagggaagaggatgtttagacagcatggtcagggaaggcctcagtgatgaatgagggttgttttttttgttttttttgttttttttttttttgacagagtctcgctctgtcgcccaggctggagtgcagtggtgctatctcggctcactgcaacctccgcctcccgggttcaagcgattctcctgcctcagccccataagtagctgggatatcaggtgtgcaccaccatgcccagctaatttttgtatttttagtagagatggggtttcaccatgttggtgaggctggtattgaactcctgaccttgtgatcgcctgccttggcctcccaaaatgctgagattacaggcatgagccactgcacccagccgatgagtcaggttttgagcagagacctgaatgaggagcggaaacagaccaagtgaggatcatggagaagagtgttcaaggaacagctagtaaaggggctctgaagaatgagttagtttaggttgtttgatcagcatcaagaagatgtatactgaagcagagggaatgaagagaagactgataggagtgatggctagtggaagaggcagtgctatgattatatgtggccaagattatatatatatatgatatatatatatatatatatatgattattctttttgtttgggaaatgattttgtggtgataatgatgcatagcatttctggatacctagtcgctactagactctttttttatacttttttatatgcgttatctcatttagcgcaacccttttgtgaagattccagtgtaattttaaagttctaagtgaggacatagaggccaacggaggtttagtaattggtccaaagacacgcactcttagagactgcaaggatgctggtagaggtagtgagaagtgattgaattgaagctatacgttgaaggtaaagccaacaggaattgttgatggatcagatataggagatgaatcaaagaatggatttaagaataactttgaggtttttgatctgagcaactaggtatggctttgctgtttgcagaggtgaaaagtgcatttggctgttggagagagggtgctatagactgagtttcttttcggatgtgttagatccaaataatgattagacatccaagaagataggtatgtctgtaatatgggagggaggtattattttgagagttagcagtttagagggagcttctactgagatcagtttccctcattattgtgtgtcatgctccaaggcctctctcattaaagatgtgcccatttgttcaggcagtgctgttgttgcttgctggagtatcatacatgctgtcacattatctcttttgaaatgtattccagactcaagattgaagatattcataaggaagaagtgatttctctttttaaaaatatatgtaaatgacatgaatctatatatgtgataaaattttataaaactatacaccgaagaaacaagtgcatacgaaaaaaagaaaaactggccaaaaaaaaaaagctctctagtttggttaattgtactgtgccattatcagtttcctggttttgatatattactataattgtgtaggatgtcatccttgcgagaagctgcatgtgggcaatgcaagctttctgcagtatttctgcaacttcttttgagtctaaaattatttcaaaataaaattacaaaaatgtaaacatacaattgaatctctgactttaaattattatcttgtttagtcttatctgatgtagggaccctacattcacatgaaaatgagaagcagtgagggataaagagcagttggttaatgggtacaaaaatacaagtaagatccaggttcagtagcacaatagggcaactatgggtaataataattgattgtaaattgcctgagaactggaagagtggaactggaatgttcctaacacaaagaaatgataaccaattaccctgatttgatcattatacattatatgcttatatcaagatatcattgtacctcataaatatgtataagtattatgtgttcataaaataatgaaagtgaaaaatgaacaaaatggatatttttataataggccaaacttaatgggatgttgataattcttcacttattagtgctgcagacttttaatacattagcaggttcttcatattttatcttaaacttttatatgagcagaatatattttgtgtgtacatttaatgtaccctaaaagatgaaatgtgtcgtaatttgttaaactagaaggcagtaataagacatttggcaaatgtagcatatcgcaagcatcttagagagccaaacaagttaaacatgtcaaaataatagatagttctgtgacatttattgacaatttatgatagctgagcactactaaaaatcgtaattgcagcattatttcattaacccctaaatactcattattttaaaaatttaaaattttcttatttctcttttctgaaaatgtaaaattccatatttgttagatgattctgctatcattaatttgttaaccttatttctgtttgtttttcttaatagcaacaatggtggaatagagatgttaagtctgtgattacctttaggtttttttttttttttttttaggaaagacctctatatcttttaataaacttcataattctttatagaatcaagatctcaggatactataaccagaatcctagtaacctcttcatttcaacatggaaaactgatacattaaagataaacacatttattttgaactattaaaataaatatatgcacacaggacgttgaaagactgacaaaatgataatttttttgtttttaaatatgaatattgaaaggtataaagactcacttgggaaatgtcaacactgtattcctcctacacaggtctaacaaaatctgtcttaaaaatctgtcttaaaaaattgtcctgcactggcatcaaataatagcagaaaaactgactacatttttttaaaataatagctttctgttgtgaaattgtaatttgttatactcagaggagaacagctcttcttgaagaaaacaaataattttctaaaagcagtatattaaagatcttaagttgcttcactagcttgattttataccacttccatcaaatgggatttggctgatgaaactgcaaagtgaaacagcctatattttgtttacagtcatttttcaaatgcttggaggatgtaggatggaaattatcgttgcctgtgagtctacttacttgtgaaatgcttatgaaatgcctgtgtactgaacattaaggtgaataaagtactgcccccttttcaaaaaagattccagttaacaagagagtgaaaccagaggggcagggaagttgcgggtagtgtgctattgaagattggaagtttgttcagtttaggctgaactgtaccctaaataagcttttgtaggatcctgtcagcattaatagcctgactaggtctggagaaagaagagttggtgaattatggattgaggaggagggagcagttggggctttgaaataccctataccacctgtagtcccctgtagatgaatgacaattgtcagtgggctaactttacatttaattaaaatgatggaataaaaaaaatcactggaataattacatgaatttaataactggaatttctcggcattgccaaagttttattttggctaaaaactccaaacctctttatcttcagaaccttctaaacatgaagcacattaatttgtctccactccctaaatttctgatgttctgtcaaaaatatttataaccagggaggtattccaaaaattggaaggagcaggcagtgagaaagagcatatgtttctaaactggatcatcaatccctgaagaatttaaattgattaggcttcattcaggaggacaaagtggaggataactttaatctactaacaaatagaatttcttaggctaaattataactttggatcatctgattcttcagaaaattataactttggatcatctgattcttcagaaaagatgactcttacattttgtcatgttgactagagctctgcatgctcataaagtcatgtttctcctactgcaggtaatgttttctgagtgaataccaggtgtcaggcagtcttctcagagttcaacatgtatttacccctgcaagtttataaggatgtctctgtcaaattattcattgatttagcaaatatttgtatttttttcacatgagatatttgttttatttttatcatttcttctctttcagctcttctttatgcaactatttttggaaatgttacaacaattttccagcaaatgtatgccaacaccaaccgataccatgagatgctgaataatgtacgggacttcctaaaactctatcaggtcccaaaaggccttagtgagcgagtcatggattatattgtctcaacatggtccatgtcaaaaggcattgatacagaaaaggtatgggttattattgttattatttagtttctattttagtaggatcttcagatgcattaagcttttccagtcacgtattgcttgtataattgcttcgtaactgttattctgtatttgtaagtgacatatcagtcaatcagtcatatttattaagtgcttagaaggtgcaaagcactgaaccattaatcatcaattattaccagtcatcacattcaatttagaaaattcagttcgtgaaaataactcattattctatttccccaaaacagtcttattacctctcacagtaatttgttgcattcctctaaaactcagagtgctgccatttttcctgctagaatttattcttgattttccctttgccttttttgctcatttaaaaattagaaagagacttcctgcctataaatttaaaatgtatgtgtcttctatgctgtcctccacctaaatttctcctgtctcatatgttttataaagaacttataagtctttattttccactttaccttacacacatctataaaatagatatctccctctccaatcatctggtatctctaatctcttccttgccttttcatggagctgattttaatttttctcatgtatctcatatttggggcaaagaagaactcaagatcctccttaaaataaataaaaccaaattttaaaaaatcctcacttcctacacccagctgattcacatcaaatacagaagatgaaaaataaagcttgtacacagagttttagaggaaaccagtcttgagctattttactttataaacatcattggagactattctttttaggtactgatttttgacacgtgataattagatggcataatactttcctggccatttcccacaatttttttttttgttcttttaaccttgtgaggttgacttacggtttttctttaagacctgctcaaaaagcatctttcaatgtcaaagggaaaaagcaaatgagcaaagtagatgtttagttaggagaatttcatgaagcaacatgtaagtaagttgttttaagccagggcaggtgttgttaggaataggttgagtggaggcatagggaatggacgaggaacttaggagttgagggagagaagccttcagagggagtgcaggtgagatacttgggggcagctatgtggaggaattgtgaaagggggtgagatttactcccttttcaatattttacaagatacagtataaattttccagttaaatggccccttgaagtagtacgcatgaaaacagaagggagaaagcaagctacatttctatggaatttcattaatgtatatctgagccaatatatggttagtagagagagtatccaaagaagaaacagaatcttccttggagtgaaggtgagagtaacagaatttaagtcatcaaaagcagggtgtctgttgaagtccacattaaatgaaacagatcaagaggcaaccaccggcctcgtcaatcactatctcagcaagaagctttcctttccagaaaatgcaatagagccacatggtaactaataaaaatcagtaaatgatggaataatggccttttacgtatttgaaaagagtctgagccagggcctctggcacaaatctagtacagggcagagttttgagtccttgctctctatattcttgaatactgagttattcatgaatggagccgagtagattgtcttcaagcctccccttgaggacatgcttaactgtctgattcaagatggagttagggtctgatgcactggcatgcagtgtgtctcaaagtgcgcatgccatgtggcagggaaaaatttctgggtacctaccatggactgccttaaataatattttgtttccttgttcatttgcagttaaagaaaggtacttctgattagcaaagtagccaaggaaaatggagtaatagaacgaatatggggagactaatattaaaagtgaaataaaaatttaatttcaatgaaaagattttttaaggggatattttaagatatcaaaattgattagcatttggataagaaaaaatcatggatgtagcttttaattgagtgaggaatccttaaagttgtttttgactaataggagaagcatatttaaataactgtgacaaatataaaagtttccttgttcatatatgaaacatactctatgcctgtattgatttatcccagtctattaagaaaatccctacccagatgcataagttctaggttaacagcactgaaggaaagagaaggaaggaaagacatctgccaaattctgggcttagaaagggggtgtagggatttctagtattgcatcatcaaagagactgaatttaaaaatgattcttagattacacaccatatgctatactaaacaagaggaaaacaaaaactgtcattcagctctctggttttgtaaagaacctgacaactagagcagaagactcctatgcctgttaggcattcagctatttaacaaataaattatatatataatatatatatataaaaaatatataaaaatatttaattttaaaatacaataataaagatacaatacagggccgggcgcggtggctcacgcctgtaatcccagcactttgggaggccgaggtgggcggatcacgaggtcaggagattgagaccatcctggctaacactgtgaaactctgtctctactaaaaataaaaaaaattagccgggcgtgctggcgggcgcctgtagtcccagctactcgagaggctgaggcaggagaatggtgtgaacccgggaggcggagcttgcagtgagctgagatggcaccactgcactccagcctgggccgcagagccagactctgtctccaaaaaaaaaaaaaaaaaaaaaaaaaaaagatacaatacaataatacaatacaataataaataaagacttgaagcatagacaaaagaattagtaattaaagaaaagagagggaatagatatctcagaactagattccactataaataaggactgaatataagttaaagaatgaattgtaaagatggaattgacatactacttaatatcattataaaatgaactaaaaatctaagaaaatatttataagggtcttcactcatgacctaacataaatatcagaaaaactgagaattaaatgcaaaaaaacaagaaactgtaaactattagaagaaaatatgtgaatatatttaatttatctttgtacatattaaagtaatggaatatataacaaggtaactgacaaatagattttgctaaaaagtgtaaaatctttcacactagaaaactatgaaaatgaaaatgacataaagcatttgcaacaaattttgcaagtgaaaggttaattaccttaatatgtaaagtgatttattaattaataagaagaattagaatacttggggagaaaaacgatctgaggacataagtaatttatggaagacagaatgcaaattactaataagcataaaaaaggcttattttcccttggaacaaagagttaaaacttaaaaaaacaaacaaacaaaaagacatagaaacatttttaatatggtaaatggtcaaagatgatgcccaatcttagcaaaggttggtgactggcattattgtatgattctgggaggtgtgtaaattggtagcacatttcttgaaagcaatttgaataagataatattttaaatttggtggtattttagagttcagtccttgtgcctcgtcccttttctgtctgtattccattctttcatgatatcctgcagtctcattactttaaaccaacaccacccagtgttcatacttctcttgaacttgattccctgaactatagactctcccctccaactgcctactcatgtccagtgaagttgtccaaaaccaaacttccaatcatctcctaaaaacctgttttacacacatttttttcccattgaaattaacggaaacactacctttcagttgcttaagacaaaatctcccacatttaaacctctgctgaatccttttggctctacctccgattctcaccaccttcattcaccttctatcacctggtccacatcaccatcatgtcttccctggatttttctaataccaactaactggccggtgcttccacctttgtcccctgtatagtctgttctcaaaagagcagcgagtgagcacatatggcttttgtaacaaaactttctatgtatgtgtgtgtgtatctacctatctatttatgtttatatcaatcatcaattatctatctatgccatagacttttgattatgagttaaattgattaaacctgttaaaatacaagtgtaggaaaaataaaatgaaaggttgatgacagtaataatataaattccttaattgcagtcaccatcttagaattatgtatgtacttttggatgtagctttaataaacggtatctgaattttaacaatcacccagtatttaatgttcgagacctctgttagacttcctgttcctccataagccaaatacattttattactttatgtttcttattttatattttattgataatttttttcaaatattttaaatagaggttatcaaatttaactatgaatatatactttaaaaggaaatataatatatgaagccaaatgtctttgttttaatgcttctcttctctggttagttttaaaatagctgtatattttttcaattgcttgtacaaagaaatttaatgattcattgaagctaattagagaaaaaaccttcgccccaatgactgagatttccttctatcatttccacatatttagttttatagatttttgaattcagctttaacccacaagcaaattaatcactgtgatttaattctgtcttaatgtgacttatgtgaataatgctttctctaatataattgtggcattaaaatctgtactgatgtggagattgcagcatttctatcatgaaagtttgctttaggcaatattttttaatatagaacagtgcctagttcaattttatttagttgaaaatatgttattgactgctcattagtacggttgctttagattttttttaaatttaatagccaaatccatcatctgggctttgctgcttgctaatattctgtgtacatgaaggaagaagaaatgggtggaataagtgaggatttaaaaggggaagaggagattatgggaaaaaatagaaaggatgatggttgaagctcaacaaattcgaccccacagtttgaaatgactttgctgggaaataattcaaatgaagtaaatggctggggactttattttcagctttttggaacatgtgaaaaaatgtaagacctgtaaaacaatgtgtagaccacatatttcccatcatactggatttttttcagcttgttgcatacaatgaaaggtctaaaaccttaccttttgtattttccaatatcttacttttttctctaacatgtagcttgaaaaaaatcagaaaaagctctttagtcttcatttttgtttcatatgttttataataaacataaggtatcagtaggaagatgctattatatgaaatgtcccagcagaattacacaaaaaaatcaggtaggagtatgcctttagaatttaaacaaattgaaattttgaacgttttaaaattttttattatcttttaaccgaatctatcagagaagcactctgctttcaaatacagtaggcaatatatatattttttacaagttaatttccttttgacagtttaattttgtatatttttttaatttgggaaatgatgtttaaatatttcatcgtattactagatatgaaaaatggattatattttcatacatgtcatcattttcttggttcgatattaaaatacttcaagaggttcccgtgatggtatatatcatagttgaagccaagaccaaaggcactagtcttgtaagaaaactccaccgacaaatgtgctgtatttaaaagccatgtaggggccgggctcagtggctcacgcctgtaatcccagcactttgggaggctgaggcaggcggatcacgaggtgaggagatcgagaccatcctggccaacatggtgaaatcccgtctctactaaaaatacaaaaattagctgggcgtggtggtgcacgcctgtagtcccagctactcaggaggctgaggcaggagaattgcttgaacccgggaggaggaggctgcagtgagctgagatcaccccactgtactccagcctgggcaacagagtgagatactgtcaaaaaaaaaaaaaaaaaaaaagccatgtaaatatatccatgtgaatataataaaataaagctgaattggtcttaagatgcactaaaagtaatctagcctttgaatcaagaaagataatgatcatgccagtacagcccattttaatcagatcatagattgtgtttggatattgtgttcaacttctgctggatattttaaaagaaatgtcatcctataaagcagcacacttaccaggagataagcatgatggcacaaagttcttggaattttgttatatgatgggtagttaaaataaatatgaatatttagtttagctgagagaagacttgggagagatatgacaggtaagttgaagtatttggcatttttaaaaatggaatgatctgtttcaggaggaaattcacagtctgccagtaaaagatttaggcacatatgtagaacatagtactaaatgaacttgcaggtcctgacagtaagattatatgattgtgtctgaatgatttggagtactattatatattacatctcatttacaatttacatatatgtatttaagggattttatataaaaagaattatagtataaaaatctgtaataattcactaattattttccaacaactttttattaggacagctaagtactgtagttttacatatgacatgaaagggcttttccaaggtgatagaacatatactaccttaaaaaattaggattcagaatgtctaatagaggggctatgccaggccagtatgggacaactgtagtagttttccctgtggtctttgagttacctgcttgttgagcaagagacgctattaagaaactattataagaaaccagcatatcattgcaagaaactattcttcagcttattatttgaaagcattatgcaacaaatatatgaaaactataatttttccatcagtacctaaacgtaatcagagaacttaactattgttacatctacatgtgtttctcagttgttacctactgaaatattacaaagtaagcattcagaattattattgacatttttcttttctgactgacctacacattttatgtgagaaagtagactttatttgaaacctcagttttttcgtttcacgtatcacaagttaagtaaaataacagccagtggcttattgaaaacattacaagcagatgaaaactttaagcaatactttttataatagtaatttcgaacactcaaacatatatattagttttcatggcttttagcgtagtttaagagggttccattgcaagctttacattattgtcagctaatataattattagtaaacttttcatgtgtcaaatcttaggctgtgttatttgattcaaacctatctttggggataatattaagcacattcttttcttgtatcacgttgaaatttagcgtaatagtgtgggctaatttatatttcattttctcatcactctgatactagcttctgaggaaggaccaaaggaatcgtttgatagccacagtccagaaatgagaaggtaggattgtttacagaggtccatggataacttgctcagtaccctacttcatctagaccataagcatcaggttccacgcttttgtgttcacatctgtattggagttaccaccagccacatttacttagttggctgggaggtgaaaaatgcccacatggtgcttgcgcaaggtaggcaataataagaggtagcagataatttagtctattgcggttataatacatttcatcctttacaggttataaactacaggcactgtgttatgcctggcaccattttaaatcttagtttttgcttggtattcagtgggcactgttttatttaagcatagatgaaaatagaacatcaattgtggagtaatttggatgaatgacatatttctatatatatacacattgtacagaaatatacgttagactttggggaaaaattaaaccatgaatacttccacatgctgcagacagtgttatagtatgagtaggtgtttgtatccaacctattattgtattctgagctgccttgattgatctgttttcaaacttccactgccgtaaatctgcagtaatggctattgatacacttatttttaaatgagaccataatgcttccgagactttttcagtttttaaggtaaaagtagaattatgcagatttgaattttataaactaaacttttaagaaacagtgtttcaatttctttgatttctgttgttattattatttgactgcgtttgttatttttcatttctcatccagtgctttttgtagctttctcctctccactcactctcccatctctttcttgatttttttttaatggtaatgactaaaagatgcctgtcttttggctcaggctgattgcttttgattttgtattcatttatataatttatattcagtactgaaaatccacttttagttcctttactagtagtgccaaataaccatgggcatcattgtctggcacagcagaaggcagcaacaggttgtagaaaaatatagtgaatagattgaaataaaaggaaaaattgttatgtaagaaagagattctgcagggtgtggcagctcatgcctgtaatcctagcacctggggaggtcaacgtgagtggatcatgaggtcaggagcgagaccatcctggacaacatggtgaaaccctgtctctactaaaaatacaaaaattagctggatgtggtggcgcgtacttgtaatccagctacttcggaggctgagacaggagaatcacttgaacccaggaggcagagtttgcagtgagccaaaattgtgccactgcactccagcctggctacagagcaagactccgtctcaaaaaaaaaaaaaaaaaaaaaaagaaaaaaaagaaaaaagaaaaacaaaacaaaacaaaacaaaaaacagaaaagaaaaagaaaaaagaaagagatgcatctggttcattgccagctgcctggggtgctgctccatgtcccctcctgggcatgggtctggagtcaaggagagggctgcatggctatgcaacctgttggcttcctctcagctttgctttttatggttcttgacttctttcttaagaccttcaggaggcattttcttcttttctcataatagcaaccttccttatttctctataccttatacttccttgaggaagtctttatgtccctagtttatactgggacatctctgagagatggcatatataaatttaagaaagatctatataatgggagaatttaaaaatatggacatagccatttttaaaatttgcattcatatggaaggaaactatggtattagagggttttgtggtccttgctatagagtgataaatagaaataaacataatccctgctcttatgttgttcagagtctgatgggggagaaaaatcttcaatagttaccctgataaacatatgattttatattgtgatgatgcttgaaatacaatacaggaagccatgtcagattttaaaaaaggagagactgcatttaagttgtgaagatgagagtcaaggaaagtaatagaaaaaaacaatagaatttggacgtgaaagattgttagaagctgaaacttttcacctattttataataaaattcaaattacctgtgtgctaacagtcaaataactggtctgaaggtggaaaacaaatgtaaggagggaattcaaatacctagttaatctattaactactaataactcattaaataaattaataatattaaatggtctgtgtgttccatgtaaataatagaatgatttccactgaatagtcatgatggtttaaaatattactctaataccaataacaacacgtaaattgatccaggaacatattggtacccaaatatgattgaactaatcatcacatatttgtttagaataatgctaaataaatatgtgggtctgctgcctttgagggcattatccacagacttaacccatatgtattgtgacagcacagatggcacaggggagtctgcagggcaaatatcagaatatattcagatcagggtatagctttactcccactactacttctctcaaggataaataaatgttagaatatattatttattatgaataagtgttaatatttatataaccattttgttttcaaaagtgcttgtttagttgaatacatgactgttacataaaattagaaaaaagagctagaaaaagaaaatatgatgtcactcataatgctacgacttacagaagtatattgtgccacatttatctgtatgattttgtaaacatcaatttatgttataagtatacaatataataacatttgtagtctattctatgtctgtattacatcatccacatattattgaatatttaagatgtctaatgagtacattaagataaacactgagaataaggggtgccaagtccaaggttatgtacatttttttgtttttattatttttgtagcttatttcttctaaagtatcaaatgagctacaaccaacattaatttacatatgtcttttttcagaataacattgtcagtactaggtattaattttcttttaatctttgtgaattcagaaggccaataatcttagcatgtttaatgtttactctttccaacacatgtatactataattattcccatttactgatacagacactgggctgtaagaggttaaatgacgtggcttagatcacacacagggaaacttggattttgtactatgtctgcactgtaaaggcaatgttcttagtcactctgctgcttgttgaatatcagtatctggtagacaagtgtctccttatcacaccttaattatggctcttttcaatgtgtttattcttctaaataaactttccttatccttcccactcatcttcatactacgcaccccagataaatcccattagcttttgactgaaattgtattgtcctaatctcagagttcaaccattcagcagagaccatctgaaaacaagttcaggttgcttagatgaggcatgatgggctcatgagaaacaattagagaccttggacctagattatctaatgcagggttagagattccactcctagaaaccagcatgaaaaccaaaggattccacagtgtgagtatgaatcagaggtagtgcagttggaatatgatgaataaaatactgcaccagcagtagggagtctcctgttctagttaacatgtcttctaggctagttcctgtattccggctggatgaccaatcagacttagtctcagaatatatatgcttgatgatcttttccaagatttttaaggttgaaaattaaatgcatgtttcgaaagagttagtgagaaatattagtgatttttggtgccaaggaagaagtcagaagacataatttaaatcagtagtttaatattgtaacccttgtatcaaacttcatcttgataataaatgagaagttaatgggaagcagcctgcctagggaaaaccagtcactgttaaatgagaaacaacccagcccaactcccagtgttacatccacctgtttcaattaagatccctcttgtctaataacacaatttgaaatgtcagtacatccgtagagacttcacttgtttaatctggtagttattatttggtttcagagtgcctggtaaagtagtaaaatcaactgtcacataattttacaatgtttttactgattcatataatttgataaatcatagaagacagtatgatcagaagtagttcatttattcagccattctcaatacacttgagtgctgtccttccatataacagggaagcaaacaaaactccaaacctcaaacttcaaatcatttttactattaaggattaatgcttcatcatcatttaagttttctgttagagaaattttgatttaatgatggcttatttactatgtaataaaatattttatgcttagaggaaaacatggaaaattgtaaaaggaggtaaaattcttttatgctgaaagctgaggcctgaccggaagtttaaccaagaattcacaaatatttaggtagatattgatgtatgtgttgatatttacttgaaagatatacttccccatttcagtatttaatagtaaatgtccattaagcccctgcttacattcaagacattgttccagtctctggaatgacagtggtggatatgaggcagttcctgccacgcaggactcacagtctagtaggactgaacaagtacatttttactttctttgacctcctggcactattttgtggttacacaaagagacacttggccttcaggtgtgggccacctggaagagtgcagaccaagagtcagagggtaagggaacacacatttagggactgtgcccatctctaagcacttcttagtgttatatattcctgagttcctgtaatgatcacaaacatcctatgtggcaggcgttatagtctccatttaaacaataaggagattctgaaaaataaataaattatccaagattatacacctaataaacggtagagtcaaagtttgattctgatttttaggattctgacttcaaactttatgccctctgccctaaatcactcacctactccatgccccgtatgttccaggcagtacatcaggcactggagatgcacctgtgaccaagataggcatggtccttgccctcatgaaacttacaatctagtagaggagacagataaaaataattgcataaataattaatattttttcaattccctaataaaaattaaaatgcttatgcagttgttagtattttaggtgaaagaggagattcttttatccttttaactttggttttctttcttaacatagagaaggatggctcttgcctgcattgagaatagtgagtaaatacactatccctaaacatactgtgctttgggatatattgaaatctctgaatccttacgaatatgttataattagagtgatctttactactttgcaagtactctgaagccaaataatagctatgattgtaatttttgtttttgtttttattaattggtaagggatatgtaattttactgaactgaattggtatagtgacaaccaggaacaatgaaacttggaattttagtgagcttatgttgcctgacttgggatgaatatcagattaatactaggcttttctaatatttaaaaaatgttattgtacttttctggtattggtcttaggaaaacctgctttcatttgtacaggtacatttcaaaaatatatacaaattttattttctgaaattccttaagcatataagttcccttaaaaacttatcactttaatgaatagattgcagagaatcatgggatcttagtcaagccaagaaccacacagtactcctgtaagaaagcaccaagtgaatatattaataataggcctggtgtcaagcttgttatttacatagaacacatatatacaataaaaagacctgttctgtaatctaaattcggcagaattctagaatattcctgatattaaatttatctttttaaaaaaattcttgtaatgaaatcatcctacaaatgtacagaggaagaatttcatttatttcgttttttttgagggcaatcataaaaaattgaaacgtagcaaaagtaaaacaaaaaaaaccaaaacaagcaagcaagcaaacaaaaaccccttcagtctaatttttgtttcttgtaactttattttttaaggtattttataggagatcagaagagctggcagagaaacccacatcttaatgttatgacctttacttactaaataaaaaaaatgtgaatgttagtgtcaaggcatcagttatgccgtcaatatttgaagtaaagtttcaaattgactaaagcttacacttccatctacaacttttaaagaatctttttaaaaggctatgatattacatattttttcttaaagtattcctaagaatattatgtattacattaattgggtaatattttcatcatggaggagcaatgaatttcctcatgaacttagatgtgtacttgtttaatctcataattttttatcctataagagacaaaagcagttgggtcattacaattttaagaatgacctcttaaaataatacaccaaatataactcttccttatgtttgtatttgtaatgactttcacacaaaattataggcttctcataaaatgaaaatcaatgtaaaaagaagacagtaaaacccatgtacatcaacatttacacatacacatgttggtaaatggttaaacacaatagaggtgtccagccacctggaatgtcgttgttactgagcttggttgtattgagctttcgagtcttttggaagctgaattaaaaagtgaaattctttagtctactgaaagaaataaacacatttgtctaaagatttgtttattttcttattatattgaattcaaaaagacctttatcatgtgaagctttttgtttgcaagcagtagagtatattcgttaagatgagggatcagaaaattttttctctaaagggccggatagtaaacagtttagcttttatgggttatatggtctttgcctccactactcaactttgccatagaagcatgaaaggagccatagacagtatgtaaataattgaacattgttgtgtcccagtaaaacattatttgtggacgtattaatttgaattccattttttctcacataccattaaatgttattttttcttttgatttttgataactatttaaaaacatagaaaccattatatactcagtggctgtacaaataccgatgatgagtccaatttggccttcagagtttgctgacctccacttaagactttttagatctctagtccaattgtcagatttctatcctatttaaaaattacagtatcatcatctcaaaactcttatgtaccttgcctgccttggttttcttcatgaggctcatcaaaatctgaagtatgatacagaagttcacttatatattctttgttaattgtccctctagtacaataaatagtccatgggggcagggagttttgtatcttttgttcactgctgaataattattgcctagattagtgtttggtaagtgggatgtgttcaataaatatttattatatccgtgaatgtaattctggagttcagaaagacacataaatttggagccattaataaggccatgaataggtagttatgatcactcaaaatgacattctagctaggaaaaggaaaagagcttaagatcgagctttgaggtacttgtacacttagatgttaagtagatgagaaaaggccagaaaggatactcaggagtggctggtgatattagatgaaaagctgaattgtttgattttataaaagccacgagagaaaatgaaaaactgccttgcagtcttctaaaagataaataaagtaaaacgtaaaaaagttccatttggattttacaacatggagattactggtggatttgatacaggcagatttgttagagtagtagagacagatgcaacactggagtgaggtaaggagtaatgtaaggtaattaagacagtgggacttggtcaaagggaccatcaaactgacatatgataatggcacaagataatgattctaaaaataacctcatacatacgtggagattttatatatgataaagacaggcaaatttagatctgtggggaaagaaggaaacatttaatgaatgttattaggattaatatttacctgtatgggcaaaaattagtttgatctctcctttacaccacatcaatcaattctgaactttaagaattaactatttaaaaagtggcattttaaaataagagtagaaaaaacgatggaaccccaaaggactccaaataaccaaagcaatcttgagaaagaaaaacaaagctaaaggcattacacttactgatttcaaaatattttacaaactagaataattaaaacagtatggtcctggcatacagacagatgtatggaacagaatagaaagaccataaataaacccatgcacatacggtcaactaatcgttgacaaaagcttcagtagtacatagtggggaaaggatagcctcttaaataaatggtattgggaaagctggatatccatattcaaaataatgaacttaaacccctatattatacataaaaatcaacacaaaatggattaaagacttaaacataagacctgaaactaaaactactagaagaaaacatatgagaaaatcttctttacattggttttgacaatgattcttgaatgtgacactaaaagcaaaatcaacaaaaccaaaactagatagtgaggggaccaaaaaaaacagagaatagtgggactacatcaaactaaaaaacttctgtaggaccaacgaaacaattaacagaatgaaaaagcaacctatataataagaaaaaatatgtataaactataaatcagatatggggttaatacccaaaattgataagaaactatcaattcaatagcaaaaacccacaaataaccaaatttaaaaatgggcaaaggacttaaataaacatttctcctaagaaaacatacaaatggctgacaggtacatcaagtatatgcaaaggtgcccaacatcactaatcatcagggaaatttaaaccaaaaccacagtgagatattacctgtcaactgccaggatggctattaccaaaaaatgaaaatataacaagtgttggcaaggatatagagaaactggaatgcttatatattgttggtgggaatgtaaaaatgatatagctgctatggaaaacaggacggagtttcttcaaaaaattaaaatatagaaccactatatgatctaacaatcccactcctgggtatttatccaaaagaatcgaactcaaaatatcagatgtttatatttccatgatcattttagtattattcaccgtagccaagatgtggaaacaacttaaatgcccatgaatggataagtggaaaaagaaaatctgctaaatacgaacaacgatatataattcatctatagaaagaaggaaatcttgccatagatgatcaaaaagataaaccttgaggacattatgctaagtgaaataaaccaatcattaaaggacaaataccgcatgataccacttatttgaggtatctaaagtagtcaaacacatagaaacagaggaggaaaatggggagttgctattcaatgcatacaagtttcagttacacaagatgattaagttctagagaactgctgtacaacattatgcttataattattactactgtattatatagctaaaaagtttaatagtagggtaaatttcatgttaaacattcttactgtaatttaaaaaaataatatatagacgatttttatgattatgtgttttaaattgctttaatatgacacaagtgggctaaatggtaaagaaatatcgataaatgtaactattgaagttagtaatttaggccaagtgtggtggctcatgcctgtaatcccaacactttgggaggccaaggtgggaggattgtttgagccaaggagtttaagaccaccctgggtaacatagtgagactttgtctctacaaaaaataagaaaaaaaattagccagacatggtggcacatgcctgtagcctcagctactcaggaggctcaggtgggaggatttcttgagccagggaggttgaggctgcaggaagccatgattatgccactgtacttcaccctggatgacagagtgagattgtatctcaaaaaataaataaataatttatgttcatcaaaacacattacaagaaaagtgaaaaaataatctacaaactgggagaacatattgaaatatacaaaatcagtaaagcattagcaacacaatacataaaggattcttgaaaatcagtaagaaatatatggataacataatagaaacatagacaagagatacagacagttctcaaatgcagaaatataaatggtcgatgaacatgtaaacaagcttaacttcagcagtagtaagggaaatacaactaaaaaacccagtgcttacctctggatttccataggttaattatggtggcctaaatgtgctcagaaatcttttctctaaatttacagattaagagggggaacaaataaagtcactttcatagtgtagctacagttcagatgaaaacagaaaatactgcaaatttgatacattaaactgacccttgggaaatacctatccaaaccaataaagtaggcttccaggctcacaccagagctgagagtcatgaggaaattacacaaaagagaggaagagagatgttttgttacttatggaggagaacaaatagccaccagggttcactagcagaaaaaagaatcctgtcctaaatggaaaatactaagaacaggactgaggccggtggatcaagggacgtgctactgtgcagtcagatggcttagaaaatgcatgggtaagaggaaacagttttgggaaggccacacttctggggataaggaaagccttggaaaagcaatgctttccttggaagcttagcgaggaagggaaggaagtaaggaaatgttttagataaggaacctaatgaacaggatatcagaagtcagatccaaatagcattgtttagtgacgtaagaggatgctcttgaaaaaaaatctggtaatatacagaaaaaatatcttcccttgcatcctcccttgacctaactcttccttttctgccacacagaggatcaccaattgatatggtttggctccatgtccccacccaaatctcatctcgaattttaatactcacatcttagggagggatctgctgggaggtgactggatcctggatcggggggtggtttcctccatgctgttctctcatgatagtgagtgagttctcacaagatccgatggtttaaaagtgtgtggcagttcccctcttgctcgcttactctcctgccaccatgtgaataaggtcgttgcttcaccttcccctttgccatgactgtatgtttcctgaggcctcctcagcatgcagaactgtgagtaaattaaacctttttcttcataaattatccagtcttaggtagctctctataacagtgtgaaaactaatacaggaaactgataccagaagagtgaggtactactataaagataacttgcaactatagaagtggctttggaagtgggtaatgggcagaggttggaatagttggagggctcagaagaagacaggaagatatgggaaagtttagaacttcctagagacttgttaaatggttttgaccaaaatgctaacagtgatatcgacaatgaaatccaggctgaggtggtcttagatgaagatgaggaaattattgggaactggagtaaaggtcacttttgctatgatttagcaaagagactggtggcattttgcccctgccctagagatgtatggaactttgaacttgagagagatgatttagggtacctggcagaagaaatttctaagcagcaaagcattcaagacgtgacctgactttttctgaaagtatacagtaatatccgttcatgaagagataatctgacattgaaacttatgtttaaaagtgaagcagagcataaaagtttagaaaatttgcagcctgaccatgtggtagaaaagaaaaacccattttctggaggaaattcaagccttcaggtgcatacatttgcataagtaaagagaaaccgaatgttaatagccaagacaatggggaaaatgtcttcagggaatttcggagatcttcagggcagatccccccatgacagacccgaaggcctaggagggaaaactggtttagtggtccaggcccagagctctgctgctctgtgcagcctcaggacatggtgccctgcatcccagatactccaactccagccatggctaaaaggggccaaagtgcagcctgagccattgcttcagagggtgcaagccccaagcgttggtgacttctgtgtggtatagggcctgtgggtgcacataagacaagactcaaactttgggagccttcccctagatttcagaggatgtatggaaatgcctggatgtctaggcagaagcctgctgcaggggtggagcccttagggagaacctctgctagggcagtgcagaggtgaaatatggggttggagcccccagagggacttcactggggtacttcctagtgaagctgtgagaagagggccactgtcctcccgaccccagaatggtagatccatggagagcttgcactgtgcccctggaaaggccacaggcactcaacaccagcccatgaaagcagctatgggggctgtatcctgcaaaacgtcaggtgcacagctacccaaggccttgggagcccacacttttcatcagtatgccttggatgttagacatgggatcaaaggagattatttttgagctttaaggtttaatggctgccctactgaacttcagacttcaaaacaaagtcctggaactcctttgttttgacccatttctccctttttggagtgggagcatttacccaatgcctgtatccttattgtatcttggcagtaacttgtttttgattttacaggctcataggcagaaggaacttgccttgtctaagatgagactttggacttgggtttttgggttaatgctggaatgacttaagactttgggggactgttgggaaggtgtgattgtgttttgaaatgtgagaaggacatgaggtttgggaggggccagggatggaatgatatgctttgggtctgtgtccccacccaaatctcatcttaaattgtaatccccacatgttatagagggacctgtaggaggtgatttgatcatgggggaagtttcctccatgctgttctctcatgacagtgagtgagttctcacaagatctgatggtttaaaagtgtttggcagttccctccttgcttgcttacttgcctgccaccatgtgaagaaggtccttccttccccttccctttctgccatgattgcaagtttccttaagccttcccagtcatgtgcaactgtgaatcaattaaacctcatctctacataaattacccagtctcaggtagttctttatagcagtgtgaaaatggattaatacagcaactattgctagttaagaaaaatgtaagcataaatagaaataattcacataatgattctagaaaagaaatcaggtaataaaaatcagacttttcaacctgaaagcctatctcccacaaagagctataatgcaaaacactaatataatacacagattaaattaaatatagaaaaacaaggaatttaaaatattaaaatacttcatgagtcagaaatccaaaaaaatcagtatagaaatagaaatataggggctgatcaaggtcagaagataaatgaacaaaagaagaaaaataatcttataaatgaagactgacttcatttataaggtgcccacattttgtctcatattatgtaagggacataagaacaaatatagaggagtaaatgaagcaattcaaaaaaattaatggaactaaaacataaaaagaggtatgaagggtgcaaacatgtaatagagaagacatgtgtaaagatccaatatgtgtatagttggtgcccatcaaaacatgaaataaaacagaactaacttctaaactataattcaggaaagcatcactgaaacaaacaaacaaaaacccaaagctacatatctggcccattgtatacctgggaaaattgacctgttgtaatcaacttcaaagtatattctacaagaacaatttgattttaaagtatcataaaatcagacaaaaaacctggtcacttacagagtaaaatgacaaagttgacaacagacttcttgatagtaatatatacaacaaaacaacaatagagcaacattttttagatcctcaagaaaaatgtgtgagttaagaattttatatttcagcaagctgtcctttatgaataaagtttacagaaaatagaaaaatattaatgatctcagggaatattgtattcagagacttacttcgatgattctgttatgacagtgctttcaaatgttaatacacatgggaattgcaagcagactttgttaaaaatggagattattagtctagagatgtgagtgaagaatctgtgtttctaacaagcaccaaggcaaggtgatgccaatgctcctggctcacaaaccgtactttgggtagcaaagtaaaagaatgaaacagccaagatattattggggaaacattgctagagactgttggtaagcactgaatatatttgtttgcaaatataaacacctgtctttaaatgcctttacacctgtcttctttattacatttttgttccttttatacaactttttatgttttagttgcattaagttttttgaatcttttcatttactcttctatatttattcttgtgctccttacataatagaagatatagtgtgggcaccttgtaagttagtcttcatttataagattatttttcttttctcctttcatgtatcttttgatcttgatcaccccctatatttctatttctacactgattttttaaaacttctgattcatgaagtcgtttcatgtttaaattccttaaacatgaaaaatttttataaaatacagaaaaaatagtaaagtaaaatacatatgatgaaagtaactataaatgctctgataaaatagatgcaacaaaattaccaaaatagggagagaaaagagataaccacatgaatactagaaggaaaatcaacttgatcttacagatatcattagtaaggaaaaaagattaagggttatatgtaggtaagttttaatacaaaagttttaaatatcaaaagaaatacattacaatatacatcttttaaagtaaaaaacagaacaaaaaactatattataaagatacatatttatatgctaacatagtaaatataagatagagcttagccctaacctaccagttatgcttaactcacctattagaagaaaaatatttttagattggcttacaaaggaaaatccttgaaaatgctgacacacacacacacacacacacacacacacacacacatgcacgcacgcacacacacacacacaaaatctcaacaataataaaagccaaacataaagagatgggtaaaggtataccaggcaaatgaaataaataaggaaatttggcaaaatgcatttggctgcataaagaacatgattcacaatgaagctataggagttaatatatatgtgacaaataacatagctgtaatttcataaaatagaaaatatagatgaaagaagagtttaaatagcacaaaaataatacgacactttaacacagcattttcagtccactttaagtccatataatataatactttaagacatcactttcagtcaggtacacaaaaataagaatggatgtaggtaacttaaacattaaagtcagtaagctacagcttattgatagatacctaaatttgcactctgataatatagaatataaagttcctttcaaataaatatggaaattttaaactgtatatttgatcacaacgagaacctcaaaaatttcaattaggcagaacaaatgaaagcatgttctctcattatagtagaaaaaagggaaacaggaaggcaggagggaggaagtaagggaaggagcaagagaacgaaggataaaagcaagagagacaaagtaagagagaaagaaagaaaggaacaaagagacagaaagaaaaaagaaaggaagaatgaatgaatgaagaaagaaagagaaacctttccatctggaaatatatagactatattttaaaaagcaataatctgacaagttcaatatgttaatcacctatggatgtgtttgtattgcctattttttctcttggtcctgtcttagtttgcctgttaaatttttattagatgctgaatatgaaaaagtgatgtgactcttgatgaagtcacctttctccagagagatttttctttgtcttctggaaggaaattagactaggtgtcggttagtttaatgtagtaagagatttctcaaaagaaggcatacaagtggtcaaaaaaaaatatgaaaaaaatactccacatcccttatcatcagagaaatgcaaatcaaaaccacaatgatataccatttcacatcagtcagaatggctataattaaaaagtcaaaaacaacagatgctggcaaggcttcgtagaacaggaaacacatatatacatatatgcacagtaagatttccatactgttggtgggaacgtaaattagttcaaccactgtagaaaggagtttggagatttctcaaaggacttaaaacagaactaccattccatccagcaatttcaattactaggtatatatgcaaaagaaaacaaatcgttctactgaaaagacacgtacacccatatgttcattgcagtgctgttcacaatagcaaagacatgggatcaacctaagtgcccatcaatggtggattaaagaaaatgtgatacatatacaccatgggaaaccatacagccataaaaaaaacaatgaaatcgtgtcctttgcagtaacatggatgcagctggaggccattatcctaggtgaattaacacagaaaaccagaggtgtttccacttataagtggaaacaaaagattgggtactcatggacgtaaagatggcaacaatagactggggactactagaggagacagggagggagaaggacaatggttgaaaaactaactattggatagtgtgctcagtacctgggtgacaagatcattcgtttactgaacttcagcatcacacaatatacccaagtaataaaacagcatgtgtacccctgaatgtaaaataaaagtagaaaagaataaagtaataatcataaaaaataaatcttcacaattgtggacttttaaattaagcatgttctttttaaggtgaaaaatgtttcaatatataaaacttttattgctaaagtaaaaaaaaagcgttttttgaagtactgaagtattctattttgcatgtaatatttcaggaatcccagctaaaactttgtttactaatgctcctcttaccttgtaggccctgaactccaaactttgtattttcagcacagtaagatttccataaactgcttagttttaccacgttttgacctgtggtgcttaagaatgagtgaacgcctttaggggaaaagtattcagactcttgctcatgtctctgtggtttctttttcttgaaaatcttggaatctcaagcattggttgtcttggtagccctgaactgctgaaatttttgctcagcatctgaaactatgtctgcatcacttataaattagtaaatatagtctatagggaaacaatgaaacagaatttggggctcatcttggtgaatttttttttctctctgggattggttaaatcctggatgtttttctgtatgtttgatgttttcagattttttttaagtttttttctttgctttttgtgttttatcaaggtttatagttgctctgcatagaaagattcgtttgctgcaaggcagatcattaagctgaaagaaagccagcttctattgtttttaaataacaaataagaggaaataatgagtagatttaggggacgattgaagaaaggggaaaacgtatgaaatagtcatattgacaagcagggatgcataaatgtcagagaaatataatagtaattctagataatgatgaatgccaattttaagattatactcatcattttaaagcaaaaccattcagcagaattatgtgatgttatctagccagaaaggagtaaatcagagatgacatgatggagaaagaataatctgaagtgtttataataatgaccaataggaatttctgctggcctttcaaaaagtgaagacaggaggggttaaatggatagtgtggaagtgttgaggatggccagtggtttggggatcataattaagttaatgaactgctgctaacagagactgtgcatgaatttgactgctgggtgtttagaggtattaatttcaccatgactccattactcatacccccaatctctcagtgttctaataaggtgtagcatgacaatctgtacctcatatcagggcaacgtatgagctttctgattcaattactctgaaacagaaaaattttgacttttgaaaagggataatctaagtgcagaaaatgattatacttattatggaagtgagtaggataagatcaatggtcaattcaaggaacagaaataatatcaaaaggttagaaaagttggaacaagggacaggtggacatgttgctataaattgatagaagtgttgtaggatagggtggactccacagaggagtccagggtcacaatttgagggtgtttcaggaaatgtttccaaaagagccaggtggagttgtgagaaccatactggagagcatgctgaattagaccaggattctacagtcaggtacacctccaaccattacaactggacctagaataaatttctgtttattatttcggtatccagaaggaatgctgttatagaaagagaaagaggactttaaattcacccagaccatggatgtgttattaacctttgtgaaatagagataatagtatttgcactgtatggttttttaaaggattaaatttttggtgttcttttttatttcttttaatgtgtgtacctactctatctatgaaaatgatcgataaaattcattttatggattgtacatttggtgtcaaggtttaggactctaactggccctggtcctaaatattttcttctctttttctaaaaagcttttttttttttcattttacgtagtacacttaagtcctgatacatttttgaaaatgtgtatgtaaggtttgagggttaggttgaggttaagcttttttgattgtttgctttttgctagatgatgtctaatttctccagcacagttggttgaaatactatctttcctctgttaaaatgcttttgctccttggtaaaaacttagttgagcatatctgtgttggtatatttctgggttttctatcctgttccatcgatctatgtgtctgtccctctgccaacatcacgctgtcttaattactatagctataaggtatgcctaacattggatagagtgatttctcctccttaatcgtttttcagtggtcttaggtcttctaggtgtagtgccttaatgtatgaattttagaataagcttatcaatatctacaaagaaaattttctgggatttttataagagttgcataaatgtaaaggttaatttagggacaattcacatatttactgttttaggccttccaatttattaacatggtatatctctccacaaattccttgatttctttcatcaatttcatcaaatgtaatttttaggatacagctcttgtccatattttattacatttatacctaagtatttcattttctgtggacacattgaaaatgttattgtgtttttaactttggtttccacatgttcattattatgctttagctttttgaatatttctttggcattaggctgtggtctatggtttttccttaccatcagtacattcacctccaggaacatttttatcaatttgctgtcttcgatctgccatgggcacaaagtagatcatgtttgcaggatttgagacggatagaattattcgaggctttaagagatgcttgagggtctcttttacatatgaaatctgtatactctgtgacagcttttttgctactcatggatatttttacttattctgatattcatggctatttttatggataatgaaaattatgtctgaataaataatattactgacatgtcaaggttttcagctctgaagacattggtgacagacagcaatgtaaataatacataaactaaaattcaagttagggcttattgccctaaagcccctttaaataatgtgagcataatatgctctttcaaaaagatgatagtttgatgtctaacatgtagaatactgatgagctttaaaggcatttcttaaagttaaaaaaatatatttcccctgtgtttacaaaatgggctcatgcaaataagaaaagtttgctaatttttggttcctagcattttaattactatgatagcacatatattactaagtaaacaactagcagtgtttactgttctgttttcaagtcttatcaatagcattgatacaaagttagttaagataatgtaccctatatttaattatagaaatcattatcatgtacctgttatttaagaaaagcttttttttttcccatatgattgttggctgcacatatgtcatcttttgaaaagtgtcttttcatgtcctttgcccgcttttttaagggttttttttttcttgcaaatttaacaagataccatctcacagcagtcagaatggctattattaaaaagtcaaaaagtaatagatgctggtgaggttgtggagagaaaggaactcttatacactgttggtgggagtgtaaattagttcaaccatcatggaagacagtgtggtgattcctcaaagacctaaaaacagaaataccatttgacccagtaatcccattactgcatatatgccccaaagaatataaatttgacccagtaatcctattactgggtatacaccccaaagaatataaatcattctattaggaagacacatgcatgtatatgttcattgtcactattcacaatagcaaagacatggaatcaatgtaaatagccatcaatgatagattgaataaagaaaatgtggtacatatgcaccatgaaatactatgcaaccataaaaaagaatgagatcatgtcgttttcaaggacatagatggagctcaaggccattatcctgagcaaactaaggcagaaacagaaaaccaaatactgcatgttctcacttataagggagagctaaatgatgagcacacatggacacatagaggtgaacaccacacactgaggcctagtggaagatggagggtgggtgaagggagaggatcaggaaaaataactaatgggtattaggcttaatacctggctgatgaaataatctgtacaacaaacccccactgcactccagcctgggtgacagagtgagactccatctcaaaaaaaaaaaaagtatataacaaaataaattacttaatggaatgacaaaaaaataaagaaaagctgaattaaccacatgaagatagaggtttcacaattcataaagttaattaaataattgcataattgattagtttcactttgctttggcctatgtaaaccaactcattgttccccaagcattccttttatatacccccctcagagctgctgcctatattttcccctgaagctggcttcctgttgcaaaatgccaatgatttgtcttgtcttcctagtgagataagcaagtaacctgcatgtggaaactttttggagccatttttaaatgcaacctcctatacatgtcccccatatagtagacactctataccaggcccatgtagttgttaaatgaaacgaagtacttatggctcatgagatgttcttctctacagatagtgcaaattaattttgatcaaatttgcctaaagtcaatatttttagtggttggagaaagtaacagtaataatttttcatgtattttatcatagaaaggtatatacacgtgcacacatgtaaagtgttcaagtcataagtatgcagattaataaatttttgcatatgtatataccatgtaactgctactaggatcaagattttaaaaagtatttttatgtcctctgaagcctcctccatgccttgttcaggcaattacttctcttttccctgaagtagccagtattttaaaaattgagatataattcacatattataaaattcattatttaaaaatgtacaatttagtagtttttagtatttccacaaggttatgcaacaatcaccactatctaattccagaacattttcatcatcccccaaagaattcccattcccataagcagttactttctatttcaacctcccctgcacccctgacaaccactgttctattttctgtgtctatggatttgtttattcttctcatttcatataagtggaatcatataatatgtggtcttttgttactggattccttcacttgacctgtttccaaagttcatccatattgtggcatgaatcagtactttatatttttatatctaaagaatattcttggccaggcacggtggctcacgcctgtaatcccagcactttgggaggctgaggtgggcggatcacgagatcaggagatcgagaccatcctggctaaacaaggtgaaaccctgtctctacgaaaaatacaaaaaattagctgggcgtggtggcgggcacctgtagtcccagctactcgggaggctgaggcaggagaatggcgtgaacccggaaggcggagctttcagtgagctgagattgtgccactgcactccagcctgggtgactgagtgagactccgtctcaaaaaaaataaatagataaaataaataaataaagaatattcttttgtatggatttcctgtatcttatttaccgattcattatttggtaagcatttaggttgtttcctgtaaccattattttgacatggatcttcatataagtggaatcatacggtgtgtatagcatttaatttgtaaatataatggggttatatgttcattatatgactgatagacattagggttgcttctaatttttggctgttattaacaaaaatgttgtgaaattcttgtatatatctttttaataacatatctacacacttctttagtgtatatacctaagacgtggtttgatgggttatagtgttggttgatgtttagttttattgaaaattaccaaagagttttgagtagtggtatgctatttgacatttctactgggatacccgagggttttggatgttctacatgttcttcaagacttgatacattgtcatccttttacatattagccactgtgatgtgtgtattggtattttattatgattttaatttatctttttcatacttaatggttttagaacctttcgaaatttttatgttagaaaattattttttatttttctgctttattgaggtataattgacaaaaattatatgtattcaaagtgtgcaatgtgagaatttgatatatatgtgaatgactaccaaaagcaagctaattaacatatctatcatttcacacagttacctttgttctctgtgtgtgtcgtgacagttattattaattacagtcaacaaggtgcacattaggtctctagaacttattcattttataactgcaagtgtgtatcttttgacaaacatctccccatttcttccaccccccccccgcccccagctcctggtagccaccctttaccctgtttctatgggtttgagttttatagattccacatataggtgagatcaagcagtattagtctttattcatctggcttatttcacttagctcaatgtcctcaaggttcattctacgttttcacaaatggcaagattccatgcttttccagtttgagtaatagccatatatatatatatttatatttatatttatggctattatatgtatatgtatgtatgtgtatatatatgtccattatatatatataatatatataatatattcctagaatatatatagaatatatatatatattcctagaatatataggaatattatatattcctagaatatattattatatagaatatattcctagaatatatattattatatagaatatattcctagaattttccatggcagtaatgcatgcataaataatgtgtaagaaacaacatatgcaccataataaatataatcgacatatagtagatatagcaaatacatatttgacatgtagctgatagcctgctggctattcccatcaagtgaaccatttccataagctctcttcactctttttcattcttttttctcctcaaaccgaatattttcaaatgacccatcttcaagttcacagattctctcttcttcctgagcaaatatgcagttgaattctctattgcatttttcactgtgttcattgtattcttaagctccagaattcctgtttggttcttttttgtgactttatttattgaacttcttattttgttcacgtattacttttctgatgtctccgagttgtgtgtgtgtgtatatatatatattatatatatatgatatactataatatatgtattatattatatataatatataatatatgatatatgatatataatatatagtatattatatattatatattatgtatatgtgtgtatatatatattatatattataataaatatattatgtcatatataattatatataatatataatatatatatagatacacacacacagaactcagagacatcagaaaagtaatacgtgaacaaaataagaagttcaataaataaagtcacaaaaaagaaccaaacaggaattctggagcttaagaatacaatgaacacagtgaaaaatgcaatagagaattcaactgcatatttggtcaggaagaagagagaatctgtgaacttgaagatgggtcatttgaaaatattcggtttgagaagaaaaaagaatgaaaaagagtgaagagagcttatggaaatggttcacttgatgggaatagccagcatcctatcagctacatgtcaaatatgtatttgctatatctactatatgtcaattatatttattatggtgcatatgttgtttcttatatattatttatgcatgcattactgccatggaaaattctaggaagcatacttgtgcatataaatatttaaataactatacttttttgtctatttcagtggttccagaggactaaattcctgaggcaaactttacttataatgaagagtttaatttaccagaaagctcagtcaaatattgctatcctatttcaactataactaataatgtaacaggctttactaaatgaaaacatatcgatcagggtctgctttgttaagtgtcagcatagtgggagagtgaaaggaagagcttgtactctttgaaagatttctgattttattttacatagtcagtttacacatacatacactgatatatatatattttttcacacatacacgctgatatatgtacatgtatacatatacacactgatatacttatataaatctataacctatgtaagtgttagtgttgtgaaaaaatgtttgaatatgatttcaattgctgaactatattttgttttatcttgtttagcttttcttacacttaataatttcccaatcttttcaagataactttgtagctgttattttatatatacttgatttaaaaaatctatatgcacacagacacatgaatatacacacatatggcatatgagaatatgtatgtatgtatctgaatatatatatattcttttatatcatcaactctcaaattctttttggatttagaagtaatataaaaaatataatcaatcaatatattctttacttcatttactactctgtgacctattttgactacctttactttctacagttggtgttttgtgtgtgtgtgtatatgtcttaaattgtataaataatttggaaagacagcttactttactttgctctctctattggaagactggtagatttaaacatcaactttcaaaatcacagtcattccaagaaataatttatttggcatctctaatttctgtttcatgtatttattttttctctttaaatactacctgtttgtttaataggtaactttgtttataatgtaaactttttttcaccattgaggtataatttacaaacaaaaattgcatatatttaaggtatacagtgtgatgttttgtgtatatatatgtaaaatgaaataatcactacagtcaaactaacctgtattacttcatacagttatccattttttgtgtgtgtggtgagaatatttaaatattcctttttaaactaaacttttaaaagtaaatttaaaaaattgagatattacacaatactgataagtgaacaaattatattataaataaatagtttgataaaatttcacaaagtggacacatgtgtagccaggatattaaaaccttattatcagaaccccagaagtctatatcccatgtcttcttcaggaattaaccaactctggccctcaagagtaatgtaaaccttgaccttcagcaccagaaatgagttttgcatttatgaactttatataaatggatatagagtatactcttttgtatcaagctctttttcagtcaacattatgttgttgagatccatggatttatcctatatatagttgttacttctttcattctcattgctgaatagcggttcattatgtgactgtgccacaatgtattaatatttatctatttcaacattaatgaatctttgagtaattttcagtttggagctatacccactgtatatatgctatacccactgtagttcacaagattcgctgcatatatacagacatttctgttgcatatatatctgcaagtgaaattcttgggtctttgaatatatgcatgttcaactgttacaatatagccagatgattttccaaagcacctcactcccacttggtatgaagtgactcattctttttttttttttttttttttttttttttgagatggagtctcgctttgtcgcccaggctggagtgcagtggtgtgaacttggttcactgcaacctccacctcccaggttcaaatgattatcctgcttcagcctcccgggtagctaggactacaggtgcctgccaccacacccggctaatttttgtatttttagtagagatagcgttttgccatgttggccaggctggtctcaagctcctgactggctcattcttttaaggatgggaacatcacttgtcatggggactaaaaagatcatggccagtagaaaacaatattgtttgtatttttctgggcagtaaatacacttaaaagtatatttctaattttagaaaatactttcacaggtatgtaaaagcactgttatttagtcaaatatctgcctgtaagacagtaaagacacgagattaagagcaaagcacagtagaagctctaaatttcatcaaagccctgcctttggaaagccagtggcccaagacatttgctgcctaacaagttaaaaaatggtaacaattgctgtttgttgttactgcaaaactaatattgtgaaaaacctggtagaattggttcacgatgattctgaagcaaaaactttaggtctcatttttatatatgaagtctagtcacaggaactttatctctaaagtgaaaccaatgaggtttaacctataatacttcactggttgcggcagccttttattgctaaatatgaccttttatttttaaataatggaagttaatttggtttggttttattcactacattgttcctgggttatttccttggaggttttgacacccctagagattgtcagagtgacatccagagagcaacttccttttgcttggcatgactgcatgactgcctggttatactttttatttcctttaaatataaaggtgagctttcttttcttcccaagaaatgaatgagaattaaattcctgtaaagagctacttaagctcctcattcccaggaaggattgtaaaaatattttatgtgcaaatgtcacttgcctgactctctccactggctttcactgacttaataataccagctccattagattcatgaagagagattaattaacagtgcataacttaattgtgtcaaaagaaggagagatttggtggtagctccaatgtctatcaaaatgtcattaatgcatttattcctttgtcctaaaaatagagggatcatttaacttattcattattattagaaatagctgatactgaattattcctgaagaaggattttatagataatcaatacaataacttagagcagtaaaagacctcaagaagaagccttgtttagtttactaccttcaggcacttaaagtgaaattatcctcattatccccatttgcacattagaaatttgttatagcttcattaatagtgttcagtctgtgaacactgagctagagggtagtggtagtagaataacttcactaagactaaagatctcccagattctgcctcattacactatacaattctacttttgtttcaggtgaaattgccattcctctttcaaatgcatttggaagattaaagagagatattattaagaacatgcaacatactctcatacacagttggttagagtgtaatttggtttaccttttctaggatgcagtttggcgacagccttaaagatgttttggcattttacctactaatttttcttctaaaaatttgtgcttagacaatctgatataggtacaaggttatttgttgtaacttgatttatgaaagggaatactggaaatcttgatatccaattataatgtaatggttaaattaattgtgccataaatatttgatgggatattgtacaaggattgaaatttggttttaaaatatgtatttcatagcataggaattgattataatgtgataatgagtcattatagcaagaaataaaatagtagagtttgaagttttgtaacgatggtatctacacatagataagtgtaaataatggaagagttttttcctctatgatttttattttccatattttatataataaatattaaaaagcattttaagtatattcaaagaacgagtgagaagataaagccttctttctttgactctctctagtcaaccatttctttagaggattttggtttaatttattgccttctctgttaattatcatatttagactcccttatcttctaaggttttgtgacattattgataccatagtgcatgaaagtgatagagggaagggacccaaggaaagtaacatttatcaaatgctaacctctggctcaggtccttttcatgtatacaataaaacttgtgtttcaaataagatgtcttcctctgggtgagtagtaatgtgatataacaacttaacagtgaatcctatgtctttatcaacatattgaagtatgtgatacatttgttggagctgaaattaaaaagtgcttaaagatggaaataaattggcaatgaaatttaggctgttctatggcagtggcggggcatttatggtttcctaataaataaactatagatttgatcaattggaccttaaataattttcaaaaatcagcattttaatttttttagtacagagaaccagaaaacatgagaaggtaccagatattatatttttttcctggttgagcttcacgaaggagcgtagcttaatagctggaactcaagagtttggggttttgctagtaatttgttgagaggacttgagcaagtcacataacctttatgagacacattcactttatctgtaaaatggcagtgaactaggaacagtgacttttcaaaccatgcctaattggatgcttcaggggagcaggctcaataagagtttttgctgatggatctggagggcctgtatagtaccaggcacataactaacacgtaaccagtgcttaataatcatcagctaaatgaatgactgaatgtgctctaagcaatcctgcctgggagtctgcctttccagcgaagcttctgtcagcataattctgcttatatctaatttatatgttgagcataaaggaaggtgttcattaaaaaaagtaaagaatgattttatggttgaaaccaagtctgaaatatctattgataattctgtgttactatttctggttattatttaaaaacaacaacaacaaattacaacacctcttactctcattttcttctatgtattactaaattctatgagaaagctgtgtctatactgtattcatggtagaaagaaggataatctgtgctttgacagataaatcagtgatgactagacagagaaagggaagatgggacatgccagtaaaaaggaaaagcatgtgtgaaggcaaagagtaatgggagaacatggcaagcttaggtggtgagaaaggtgatgttattggaaggcatggttggaggacggtagtaagattggagcaggattccaccataaagagccctgtatgcttggttaggactttggctgtagttggtggggaagcaagccatcagatattttaagaaaacagagatgacatgataatatatgtgtttcactaagagttctgtagtcaaaatgtggaggttacatctttggagcttgagaatatttgctaagatacctcttgactttgggtttagtgaatatcataaagaatttgaaaaaggttttctttttcagaccatgacattcatttttttttccccagggttgttttgcagaattctgaaaaatggtttcttacatactgtcattgttacaggaccccaacacttacccaaagatagccgttgggtcagggtttctgcactacagtcccttctgtggtcaccagaaatatgttacaggaaagcggtcctgattcagaccccaagagagggttcttggatctcatgcaagaaagaattcagggcgagtccacattacaaactgtgacttattaagcaagtttattaagaaagtaaaggagtgaaagaatggctactccatacacaaagcagccctgagggctgctgattgcccatttttatggttatttcttgatgatattctaaacaaggggtggattattcatgcttcccctttttagaccatatagagtaacttcctgacattgacatcgcatttgtaaactgtcatggcactgatgggagtgtagtagtgaggatgatcagaggtcactcttgtggccatcatggttttggtaggatttagccagtttctttactgcaagctattttatcagaaaggtctttatgacctgtatcttgtgccaacctcttatcttatcctgtggcttagaatggcttaactctctggaagtgtagcccagtacgtctcagcctcattttacccagctcctattcaagatggacttgttctagttcgcatccctctgacatttccccctcccctttataagagaacccttaatcataagggttgcagagggatgaagatccaccttctgtaatgtcttcaggcttaataggggtgatgatattcctgcctaactattagggtctcttgtgttcaggtaaagaggagcttagtcagaaaacatcagtatggcgagggccatttataactcttgagtttcgacaagaggtgatatctggaagattgataagtgtttagtttaaggaatcattcagtaagcttgttctgtattcctacacaaagagtataacagtaatatattccacaagggcaaagcaaaatgaataaagttattccaggtaaactaaattagaagacttttcatgaactaggcaactgttggaactaagctgatatgggcttgttagctgattgtaatatgcccagaattagaatactgatccaggtttttatattacccatccctcttgtttcttctaaacagcagtcagagatcattggttggttcacaggaatgagcagggttagcctaaattgcagaaacaaacttaaaaacaactactgagactagaatttagtaatacgtgtaccatagttcttgaaaaataatatttctctctccagtttctcatttttactaaagacaaattccggtaagactgatttgctttattagacttggcgtgataatttgtataaagttcagcaagaataattatatttcacataagcttcttaattggctttgatagaactctgtttcataaggaatctcatataagacttttttaaagccaagccctgccatgggtttgtaccctcaaatacctatgagttgagtaaattcctctccttttgaggttccacgataacctgtggctcctggacctgtgagaaagtgacattctttacttaccataggtcagaaaccctgtaaagggactgtgtaggcaaggtatgaggctagttccccaaagggcttttattggctctacaagtcaagtttgattccttaaaggaaagcaaaccattccagtcaaagtcttggtaaaataaccaatttctccagttgtgtcctgttacaaaataaaacagattcttattgcacttaagcaaataactatattgccataagttaagaatactcataactagtttccaaattctggagaaatcagttagagagaaacaaatatgttctaaattttgttcacagcagtatactttgctcaattgctacaagctgtaaatagctcaaaagaaaagattctttgactctgaaaaacaaaacaaaggctcagcaacgttttaagcaaagttaaaaagttttctattggttaagttaattcaattaactcctgttctgtttgatattcatgaacgttccagctcttcatgagagttctgaaagttattttctctattctaatgttacaatttccaaaggtattagaaacctgtgtttaagaacacctgctagagttctatagtttattacaaaccaccttctaaagaggattaaaacaaggcaacagttgactgtggttgataaaaagttttaggacagccacaattaaagccacaattgataaggaactttggttacttctgtggcatacacagttttacataacaattataattattaataacatacactaagtcatattagaattacaggagtttcccataactttggaacatataccagtaacatatttatgcaaatacagtccaaagaaagcaaaacaccatttcacatttgataatgcttcctgtatgatttttataccaaataagccaaacttcacctttataataatgtactattaatgttaaactgaatttttcataaaactttatagacatattaactcaattttaatgtttaaccataaggttagattcttataaaccttttataaccctttacatttttttgtgaaagagcagatcagtgctctaagaaaaacctgttgtgcttctattccaatgtttaatttacagaaaaactgaataatacctctttaactttagccaatatgtttacacacagaatcttttacagttaatttttataaaccttccacaacctgtttaaatctttagctttattctatctaacttaaaacaccctttacacacaaaaaaatccacattcccaggccttcttagaatcttttaccaaaagtccattccactttccttacacaccttacatgtaaaactgtatcttcagtagtctcaattacatgttatgttattaacttttagtgacttttacttttggtgaaaaccctggttggtaagcaattttaatcatgtactaggtgtggagcctagcctgagatataccaggcagaagtgcagataagaaccaactctccagcatagctagggggcatgactaactccacacgtccctaggccttaccttacttaagaaggcaagttgtacagtaagagttatagtgtcattttatgaagcatttaggaggcctaacaacctttaaattgtacaacattttttgcataaattccctttaacaaatcctttcgcagcttacacagaccatctgagacattcttggactttctgacttgctctaaacatccctccttttaaacaaccagtcattttactttaggacaagaatttacggtacaagatccttttttatataaaatctctttctttataatctttgtatagctagggggcatggcgaattccacatgtccccaggtcttatctataatctaatggctttaaggtaggtaaatttaacaatttttaaaagttcaagaagcagtttatgaccttaaagcatttagcaaacttaatatctgacctgcataatttagactaaatgtttttattttattaataatttttaaagctgtttttattttgcaaatattactaaagttacatgaactaaaaggcattatagttttttattttgctttcagaatattgaagtgcttatttttgtttcagccaattaattagagctcttttatataaacattacatacaacatatatatagctacacagaaagacagaaggttactagagtagttgtcagatttttcatatgcaagtttctgagttattatttgggttactgtgtttaggttcatgttttttattttttgttttctttgacagagtctaatccaacctctgacttggagtttcaacaagtggtctctgggcaagatggtcaccctgagtaatagaaatgataagaaagggaaaggagagagagaaaagcattgcctgtgcagtgtggggaaggcaaaatgatcagggaggccagagaaagaccttcccattgcagtgacactgaaaagttcaggcagctgcttcttggtagcaaagggatcttttccagcaatcctgtcagctctcaagtttcccctttcagggaggaaaaacctccccatatcccacaatcctgtacatgcctaaccctgtcacccacagccatcagcaaagagagcaaggcagattaatccaaagagaatagcagttaacatcccatagtgccaaacctgttcttagctgagagggactttaccaagaggggcctctaaccccctaaatcttagaagggactctaaccctcctaagttgggcctcgaacccaatgtcagtcaggcatccttgccttttattaagaggtgcctctaacccactctgtcttgggagagactctaactcccctaagttgagcctctaacccaatcccattctttatctgggttgcccaccacttacccaaagttatccagtcagtgctgcggtctgcttcctttgtagggagggtggtttcttcagtatcgtcccttctgtagttcaccagaaatatgttacaggaccccaacacttacccaaaggtagctgttgggtcagggtttctgcactatagtctcttctgtggttgccagaaatatgttacaggaaagaggtcccgatccagaccccaagagagggttcttggatctcacacaggagagaattcaggtcaagtccacagtacaaagtgaaagcaagtttattaagaaagtaaaggaataaatgaatggctactccatagagcagccccaagggctgctagttgcccatttttatggttatttcttgatgatatgctaaacagggggtgggttattcatgcctcccctttttagaccatattggataactttctgacgttgccatgacattcgtaaactgtcatggcgctgatgggagtgtagtagtgaggacaatcagaggtcactccgtggccatcttggttttggtagaccagcttctttactgcaacctgttttatcagcaaggtctttacgaggtgtatcttgtgccaacctcctatctcatcctgtgacttagaatgccttaactgtctggaaatgcagcccagtagctttcagcctcattttacccagcacctattcaagatggagttgttctggttcacatgcctctgacaccatagctcttacaagaaaatttattgctcatcttaacgagtctaatttattaatattctgttgcaaagaggggacaaacaactctgaaaacaaacaaaagtcacttttaacctaagtattttcttctgaaatataattttatttgtttgtaactatgaaatcctcattaggaaacctacctacaataaattggatctgatattcaaggcagaatacatggaaagtgagaccagtgggccaggtcttgaatgataattttactccatcccttaaaaccaagttttgccttggctaagactgtgattaacatttcatttccagagtaaataacaagatacttatattttgatgacaaaaacatcatgtaacacacatgctctgtctaaggttggagaaggaaggtgcttgccagtgggtgtgactttggttgatctttttagcatttagttttaccttgtcactttttgatatctggatataagtagataccatcaatcaaaataataaatcaattagtgtcatatgttaagtgaaacaaaaaaggaaaggtgtactcataatgtaataaaatcctcttttgacatgccaataaacagagaatattgcaaatactggactatttcatttgcaacatgaatcctgaaaaacattattaaaaggaaataacatgactattaccaaaatgaatagaaaacaatgaaagtcctatgtggtaaatggatcaaaatagagcagtctatttttccattaaggtattcagtgtaatgtttgtgtatgtgtgtatgtatttaaattttttcgttcttctagagctaatttcattttcaactgggaaaaaaatattaaccttaatcagtgcttaaaatatcttcaggtttgtgctgaaatattttcttaattctgtctggaaaccagtcaaactgtccagatgaagactgcagacagagtggaaagtgaaaaaagaaaattgcttttgtagagagtttaagcaacaataaactctgtaggaagacagatgttccgtagtgataataagagctagtatttcctctgcccttgctatgtgccaggctaaactaggctcaactcatgccctttcatttaatttctgcaataagcctaagatataagcactatcattatccccatttcacagatgaggtttagaggaattaaataaggtgctccaggttacaaaggttgtgatagttttgaacccagacttacgtcctcttgagcctgaccttttttgctgcctctaagtaaagactcacaggcagcacatgcttttatgtcactctggccatgctcccatcataccacttttttcattgtattgcaattgtccctttacacgcccacctcccacactttctggttagctaacctgaggcaaacacagtgtcttatccttctagttctgaggatttagcacagtgatgtgacccattgtggaagctcagtaagtgcctatagaatgactaatatattgtccaaagtcagtaaaggtttatatattaaataaaacattgccttatagaaaataactgatgtgaaaacagcgtcaattacttttaaagctgtgttaggcattcctttcctcaaagatcagatttttcagaaaggtgggtgagcagattgctgctgcctatagaaatttgagggagtatgaaaaaaacccagagatgattaaataatgtgaaatgtatgtagagcattaagaaaggataagagaagggatactgaaagcataatttaattaatggtttttgcatttatgatgggcttgtcttctctacagggaagcaacccagttttcattgatagtgacccccaaataaaaggaatagtcaggggacattttcaagccttaggaaattttttaaagcttaaaatgcaattagtagaggaaagaaaactattttatatttattaaaatattatgcagtataacttaatggggtaaatcaatttagcttcagctttgagggattgaaatccgatcaaagaaaatcatttctggctataaagaatagtttacaaagggggtttgaggaggattctaaatgagtttgcacttgcatctttaaaatgggtggtattaacttccgcaatcacatcttgctccacgatgttctgattaaatatgatgataatgtccattttaatgtgggtctttaatcaccctgtcagaaagctgtagccaataaaagctctctaccccttgctgtataagcatacttctgccatttgcttcctcttttaaaggatgcctacagcgtgaattctgctactgcctgcagtagtcttcagaagtcagagaccagaatgaacaaggactgccatacaaaataacatacccaccctgccagcactgacatttccaaccacccaagccttacagaaggctggtcaatacccttgtcccttcctggacatgaatttatttgtaaaaggaaaatcttcagagtgaaaaaaatatatcaagagtggagttagtctgccagtgccagtatgtcaagttgccagggtgcttttgttgattttgttttctgaatccacctccaatgtggaattttgatttagttataaaaaaaattctgaaacatctgctagattaaaatgaatgttcatgccctattttacttgactctttgatgaaatgacattaacttttttatgagactcttcttgaccacctcaaaactgttttgtttttgttttgagataaggtcttgctctgtcactcaggctggagtgcagtggcacgaccttggctcactgcaatctctgtctcctgggataaggtgattctcccacttcagcctcccaagtagctagaactacaggcatgcaccaccacggccagctaatttttgttttttttgtctttttagcagagacagggtttcaccatgttgcccaggctggtctcgagctactgagctcaagtgatctacccgccttggcctcccaaagtgctggaattacagaagccaccatgcccagccaaggctgtgttctttctgaggggagatccatactcttctcaaagcatttactacatagttctgcattgtcatggtccatatgctcatcagcccatctcagtggattattacctccttgagagcggagctgtgtcttgttccctttgccttcccagtacccagcaaggtgtgtagcagtgtagcagacatagtcatagtcaataaatatttgttggatgattgtttttctgaagtggccccttcctctttccttttcacttattcatctctcaccttctttaggtcctctccatctgtcccaaggacatgagagctgatatctgtgttcatctaaaccggaaggtttttaatgaacatcctgcttttcgattggccagcgatgggtgtctgcgcgccttggcggtagagttccaaaccattcactgtgctcccggggacctcatttaccatgctggagaaagtgtggatgccctctgctttgtggtgtcaggatccttggaagtcatccaggatgatgaggtggtggctattttaggtactgtgaactttcctaatgtagtagcaaatgcgtagtaacagttttagatattttgcttttcgcatttttaaagagaaatttcctttgtttggtaactttggaaattgggtcactaatgagacgtgaatcttaatgaaaactaataatgctatttcagcagagaacattagtatcagtcacaacctaatgggctgagtttgattaaactttctttggcaacagtaggacagtaccttttagactaaaggtggtcgcagcctaacgtgccttgtagctccatgttagtaagtgtgaaaatggcttgtggaatgattgacgtggtagtgatgaagggtgttagtctcagaagggcaacagaacctgtctagttcaacccttttctttagagaggagccaagtgaggtccagagaagcttagtgactttcccaattagtaaatgaatggaggcttgaaaatagatcattttaccccagaactttctccctcatcacggtcaacctaagtagtgagctgaaagtgtggaggaggttaatgagtctgactctttatagcagagtgatcgcagtataagtaaattaaatttaggtttataaagctggttctgtcctctatattaataggccataaaaattatttggctaataataaattcattttaaaatttagagcattttagaatttagaattcagtagatagttgtactaaccacaaccacaacaataaaagggcagtaacagtatatataagtgataaaataaaaaatgttgcatgtttggggacagtgtaggatatacgcttggcaaaaaaaaaaaaaaaaaaaaaaattgccaaatgaccttttagatcattttctgctcaaatatctgcagcagtttcctgaaatccacagatataaaaggaagtaataatgaggtcagaggagaatcatttcttttttttttttttttaccaggtaaaataagttagaattgcaggatgtcgacttcattttgatcacattgttcatggcttgtgtctcatgaaaaatgagctcaatttttaaactattggattttcagctactgaggtcaacctaccatagcttgaatgccacttattctcaaaagtaaaagattaactgatagattttaaaaactacaaaagcaaaatccaccacaatataatgaaaaattgacttcaaaaagcaccattacttgaaaaatatagaattgagaatggaaaagaaatgacccttcatagggaaacaggttctgtaaaaattgtgagttctagaaaatggttcagggttgcaaatgactgaataccaaggtttgtaagcctttccttaactgcatataaataatattagaattacagttagatttcttctaggaactgtttttttttttcaagaagaaaatacgacattttagagtcaacattctgggtatgtttaatgctcgttagtgcttgttctgctttgtttactggagtataaaggagataaatataacccttcataaaaagttgtacatttcaccagagcaatcctttgtggtaaaatgaagcatatttacactctgtaaaccattcttgtttgcttaaagaagaggatacatacacactaagcaaactattcttgtttgcttaaagaagaggataaaatacaaggccaaaacaaatgtattttattttcctgaatgtccacatcaaacgtgggtaggaaaaaaatatcaaatgtattacatgaaaatgtaatatcatgataaccctcatgataaattacctcagctgtagactcattattatttgctttgtcccgttttcttcattacaacttcatttgggtaactccttttctaaaagaaggttggagaaagtcctgggtacagtgcctctagcctgggtctgctcaaatgagacaatttgctcagtgagacagacaaaatgcattttcctttcattttaaaataaaatggtaacttgttttgcccaatgacacagtaaaaatgaacacaggacccctgggtattgcacccatctcatcatatatctgtcacattttattattttgagtttgtgctttttgttttctctcctcaaaagtcttgggattcagagacttttcacatcttgtgcttaatgagtcaaattatacggacaactctctggtgacctttcttttttttctataggctctgaaaaagactagttcattcaaaagcccatcagatcaggattttttgtttgtttgtttaacatacaaaatgctttaatgatgttttaagaaaggaggaggaaaatagtaacttaccagcacctgttttcctgattctcctcttcttcctcttcttctcctcctcctcctccttttcttcctcctcctcttcttcttctcatttttgatagtttaattttgaaataattgcatgcttaatgaaaagttacaaaaattatcagggtgtgaagggattatatatatattaaatattaaatatatataatatattatttaatatttaattatatattaaatattaaatatataatatattaaatatataaaatattaaatatataatcccttcacaccctgatatgtgtgtgtgtgtgtgtgtatatatatatatatatatatatatatatatatataaaggtatatacatagaaaagatatatatgtatatttttaagttctgctttattaagttgactcagtctttataactttatgtatttttttctttttggctttttttttttttttttttgagacggagtttcactcttgttgcccaggctggagtgcaatggtgtgatctcagctcaccgcaacctccgcctcccaggttcaagcaattctcctgcctcagactcccaagtagctgggattacaggcatgcaccaccacgcccggctaattttgtatttttagcagagacagggtttctccatgttgaggctggtctcgaactcctgacctcaggtgatccacccgcctcggcctcccaaagtgctgggattacaggtgtcagccaccgcgcccaactttatgtattttttaaatccttttgatttgccctggtactgagagtggtgggttaacatatcttatcattcatgcgttttatctatgtctccttgcatctcttgtggtttatgctatataacatttactgctgtgttatttggtgtacagattatttatgattgttatgtcttagttgtcaactgtggcctttggcatttaaatatgccaaaagccatcatgtttaatgctctttgcttttaatcttgcaagggtcagagaggaacaaaatccctacatccctcacatctgaggacacctcacaaaaatgggaacttgcctaaattagtctgataggagaaacaagaaggccttgctatctcttacactgatacatttgccagttaaaaggtagagaagggaggttattttaaaattaattagaatctctgaatccaaaaacaggtgcagtttcatgtttttggattcttgccactaaacagtctctcgataggcacgtaattctttagtgtgtcaaaagtgctaaggagtttaatgaataagttctgaagcataactaattaatggaaagataaaaaatttagtcaacaaataacctcctttaacactggaggatggcttcaagatgtttttctaaatagggcatatgaaatataattgcagttcatgtcttttttcaatttgaagttctttcaaagttctttcagttcctacacctccacctttttctgaccttcccactttttataaaacacaaagaattccaaattaagttcgtgatgcatacataatattttatattctttaatgtcttattcctttttagttcctatcctataattacttaatgtgaacagatttgttggtatggctgaaatagccaggttacttctcaatgtcttgacaagtatattgtgcctttctgaggttataaaaatgacatttccctgctaacaatagaccgtgctcctaagacatttgttttgttgtattttcattttgtctttgtgttcattgattattagaatcatagggttagaattattaaactaagacaatctctatctaagtcttttagttgtaacttcaaattctcaagagagctatgtttgtttatgtatggtttggatggaggggttgaaaattgttatggaattgggaaaaagcataaacgaggccaggaataacataattaaatcaacttaatacgaaagagagtctttagcactcgaattaagattctattttaagtagaatcagttatttaaaatccattgtaggctgggcatggtggctcatgcctgtaatcctagcactttgggaggctgaggtgggctaatcacttgaggtcaggacttggagaccagtctggccaacatggtgaaaccccatctctactaaaaatacaaaaattacctgggtttgctggcatatatctgtatttgggaggtatttgggaggctgaggcatgagaattgcttgaacccaggaggctgaggttgcagtgagctgagatcacgccactgtactccagcctgggcgacagagtgagactttgtctcaaaaaaaaaaaaaattataaacgtgtgcattatcaaagaaaatttataacttatactgctcaaaattaaaaatctccttatttttattacaaaaagaaaaaatgagatgtgaatgaataatattttgttattttgagaatctgtgagaatgtgatttttatgctgtagttatatttcttcctgtgcacttgctgttagaagtcaaatgcttcacagtttaaatccttaaaagggtttttcccaagttccagaaaatcattttcttttgcacccatacttctgtgttgtagatgcggaactgtgaaacatgtagatttgttctatagatcatgatgatgaaattacttaattcagatatttttataaagggcaaatcagttgtttgcttttaaaaacatgcatacttgtcttgttttaaacattttaagcagcaattataacattgtttatctatggttcaaaatatacacttttagagttcctcagcctgcaggttttggaataaaataggagttttaacaatcttggtagtttagattaaacttcaaaccctccctccatcatccttcaaaactaatttatcctatccccttgatatcttttaatcctattcttaatatcccttaccacagtcagtgttcttaaaattttggtcctgggtgtgaaaggaaaacatcttgggcccccaagatcactaaggaaaattcatgttggaaactgcttagggcaaatctgcctcccattctattcaaagttactaagatagatgcatatctgatttgcctcctttggaaaggctaatcagaaactcaaaagaatgcaaccatttgtgtatcacctatctgtgacctgaaagctccctctctgcttccagtcttcctgcctttgcttcaagttgtcccacctttccagactggaaccaatgtacttcttacatatattgattgatgtctcatatcaccttaaaatgtataaaaccaagctgtgtcccgatcatgttgggcacatgtcgtcaggacttcctgaggatgtgtcacgggtgcatcctcaaccttggcaaaataaactttctaaattaaccaagacctgtctcagattttccaggttcacatgggccatgactaccatcttagtcattagacttacctgctcataaatctatcatagaatcatagggttagagttattaaactaagacaatctctatctaagtctttcaattgtaacttcaaattctcaagagagctatgcttgtttatgtatggtttggaaggagggattgaaattgttatggggttgggaaaaagagcataaatgaggacaggaataacataattaaatcaacttaatacgaaagagagtctttagcacttgaattaagattctattttaagtagaatcagttatttaaaatccactgtaggcccagcatggtggctcatgcctgtaatcctagcactttgggaggccgaggtgggcaaatcacttgaggtcaggagttaataaatctatcatcagcttcaacctccatttcaatgtttcgctgccaccacaataatcttcctaaggtataattgtgtcaatctcctcattagtatttccagtatcttgaggataaaatgtaactacgagcatggcttatggggccatttgggtctggcttttgctcttctttctggcctgatttgtgtcattgtctatccctaccctattctcaccgtactgaattgcaggaagtttcctgagtttaacaaagttccctcttcctggcaggttgttgcatatactgctcctttatttagaatactttttctctcctttttagtgatttgtctcttgcttccttgttctattttatttttcccttattgccctagtctggattagatgcctctgttctgtgcttccacttggatgcctatacagggttcttagtacctcctatttttatccttcccctgtttatcctcccactgcacagtgaccacttgaaatttcttgttcctttttgtctctctgtcatctatgataggatctcttcaataggttctcagtaaaggctattgtgagtgagacagattagctagtacagctgttacttggtatccacaagggattggtttcagaacaccctcacagagaccctactctgaggatgctgaagtcccttacgtaaaatggtgtagtatttgcatacaacctatgcacatcatcctgtgtatttaaaatcatctctaggttacttataattcccaacacaatgtgaatgctatgtacatagttgttttattggttagggaataatgacaagaaaaaatatctgtacacatttagtacagacgcagccatccattttttaccccaaatattttctatttgtggttcattgaatccattgatgagaaacccacaggtgtggagggccaactctgctatattttgccaacaaactgttttcataattgtttcagttctgggtacccagaaaaatatgttgtgttctgttgactcacttgccaatttcctctatgccctctgttcctcctttgttgatagaggtttatagtaaaatgcatttctcaaaagcccgtaactttagtttagatctgttataggcagaagaaacattttcctactgttaactaggcaatttgaacaaagataattgagggggaaactgtgttaagtatctcagaccacacacggctctctgataagttgctcctttcttgttctccatcacggatccccagtgccaggaaaggaactaacttatacctgcttgttgaccataataagaaaactttaaattacattcattgaaggaaatttagctttaattcctaaagtgacattgcttttgtcatcaactagaatgaatgattcaataaatctgaattaatttcattaatacataaacatttaagaattaaaagggatttaaagaaaggaaaatcatattttccattagcaaatgagcccccacccacttaagtaaaatgtaaagccaacagataccttttgattttaatattccttaacaaacttttaaagtgtatttttgaaaaatacacttgggcgtctttggaagtctgattaaaataccaataattattaatggagtgctcattattttgtatacattattataccaagtcgtttaataaccctgtgaagaaagtaattattgtagtcatcttacagaggaagaaactgaaactctgtaatatcaagtggttctccctgggtcacagctagtaagtaattggtgggtacaggattttaattcagacctgtctgacattatgtgcatgcttttacccatcaaattacaaaaaaaaaaaatgatgctctggttaacaggaattttgaaatagaattttgaaattatagtacaactgtttggtttaatcttaatggaaaataagagtacctatattacctttaccaatttatttatttttattttttaaaaaagatttctctaacaccactgccaagaattaggcaccataacagtatacgttacaaaaacccttcaccaaatattacctaaggtacttagttaagtatgaattggctaaatcagctactaagtatctataaatactgtccttctccaagtgactggtttaccatgaggaaggtgtttaggactgaggagaactgagcccagagtgtgaatgtcatgagttcttagaacacaagatagggatgttacattccactctcctctttcatctgggttatggaagagttcagagtctacttagttggtaaatgttaaagtggaaatgaagctttctttctttgtgaggtctttcctaatttctttaaattaaaaacaatatttttcttctgtgctctgcttatcctgatctgtatacacttacttcattttcttctattttgtaatttttttggtctgtctctcttactcacaaaattaaagacttcttgagagccagatttctatttcctgaatctgcctatcccctcacagcataaagcaaatgtttcaacttttgaacaaaagttcaaaaaacttaaaaaaattttttaagtggtagcattttattttataaataaataatatagcataaggtaaaggaaaaacagaagacaagtaacaataatacaagaaagaaaaaaagaaaacctgtgctttgaatctcactcctttatccttgtgattgctttttgtttctctatacgcttctgtgatcactgcccatactcatacacatttctatcacagcaacacacctttattgaggtataattgatacacaaatatctacacatattgaatgcacacaatgtgatgagtctgtgtatatgcaaacactcttaataccattaccataatcaaggtaatagacacatcctaaaactcccatagctttcttctgtccttttttcatggtaagaacacttaatatgagatctaccctcttaacaaattttgaagttcacagtactgtgttgtgaagtataggctctatgtgtacagcagatatctaaaacttaattcatctagcataactgaaactgtatacccattgaacaaaaactatcctttcccccatcttccaagccctgacagccactattatattctctgcttctatgaatgtaactattatagacacttcatatgagtggaatcatgaaatatttgtacttctgcaactgacttattttgtttggcatagtgctctccaggttcacctatattattgcaaatgacagaattttcttcttttcaaaggctgaataatattccattgtatgcatacgccacgttttctttatcaattcatctgctgataaatactggggttgtttccatgtctacctattttgaataaagctacaatgggcatgagagtacagatatctctttgagattttgatttcaatacttttggatacatactcagaagtcagattattgcatcataggttagagttagggttgagtcaggatgtcagattcgttaattgaatgaggtagaaaagacagccattatttctcacacttcacagttgcaaaagttgtaagacttagttataatatgaacgatatcgtaggcttcaactctaaatgttttcttagaaaaagaaaacaggagagtttcaagatgtaattgatttccaaattagtcttttgcatggatttcttttttataatatgccattctctttcttgatttaggcatatatttggatttttatatgcaatcaatttgttcttaacactaatagtgccaaactcaggataatcagcatgtttattatcatttcttctacctccttaaaggtagcttcttactgatgtcaggataccttctctttacttctgcttaataagagctatttggctcattctttatgtgtgtaaaaaaaatctacgagctaaatcacttatttttttaatagataagaattattatttgcttctctgaaaatgtcttcaagcttgtatttatgataatttttaacataatgactttggacatcaatcattgaagactggcagacatcatttctaaatgttttaaaagattttattctaataaaactatgtaatttcttaattttaatactcattttgttctttctgttcttcctttttaaaatattactttatgacccttgcagtttgtacatagttgaagtccatttaaaataatgtaattaaaaatcatatagtcttattcatctataaatgaatatttttgggcctatgtaattataatgaagtttatgagccaattgcaatgataacttatagtgaagggccaactaataaataaaaatgaatacagttcaagtcgagtatttctttattaatttcttgtctggttgatctatccattgttgaaagtgggttattgaagtcctgtgctgttattgcatctctatgcattttttccatcaagtccattaacacttgctttatatattttgatgctccaatgttgggtacatatatatttacagttgttatatacttgataaattgatgcctttaacattaaataatgagcttatttgtctcttgtgacagtttttgacttgaaatctattttatctgatgtaaatatagccactcctgctctcttttggctactgtttgcatggaatatcttccattctttaactttcagcccatgtgtgtccttaaatctaaaatagttcttataggtagaatatagttagatcttgtttcttttttaatatccattcagccaccctgtcttttgattggataatttaatccatttacgtttaagggtattgataggtaaagacttattcttgcccttttgtcattgttgcttggttattttgtaggtccttttttttccttcttgtgacttacttactgtaagttacttactgtagctatggttatttttgaccattttgacttttaaccttcatactagagatttggaagatttacatactgctactatagtaatggaatattctgcttttgactgtgtatttacttccaccagtgagttttatactttcatatattttcattttggtagttattatcctttcatttccagttgaagaactccattaagcatttcctatatgatggtctagtaatgatgacaccatgatcaatggggaacaactaaagacttctccactaagatccagcacaaggcagggatgcctgctgttaccacttctattcaatatagcgctggaattactagcaaaggcaatcagacaagaaaaataaatgaaaggcatttaaaacagaaagaaaaaagtaaaattatctctgtttgtagatgacatgattctatatgtagaaaaagccaaagattctacaaaaacctcattagaactaataaataaatttaataaagttgcaggttgcaaaatcaacatacaaaaattagcagcatttctatatgcaaataatgacttagctgaaaaagaaatcaagaaaaaaatctcacttacaattgttacaaaaaatacatagtaatgaatttaaccaaaaaggtaaaatatctgtacacagaaaactataaagcactgatgaaagaaattggctgactctgggtataccaccaataagttagccctgctccacaaggaacagtgaaaaaaaaaaaaagaaggaaagaattgaagaagacacaaataaatggaaatatgtcctatgttcatgggttataagaattaatattgttaaaatgtacatactagccaaagcaatatacatagtcaaagcaattgctatcaaaattccagtgacatttttaaagaaatagagaacacaatcctcaaatttttatgaagctgtagaaaaaacccaaatagacaaaaagcaatactgagaaagaacaaagttggaggcatcacacttcctgatttaaaattatattacaaatgtctagtaattaaaacggtatggtactggcataaaaaagaaacacggagcagtagaacagaacagagagcccagaaataaatccaaacatatacggtcaactaattttcaacaagggtgccaaaggccacaatgggaaattaatagtttttcaatatatggtgctgagaaaactggatttccacatgcaaaaggataaaattaggaccttattttccacccatacaaaaaaaaaagtcaactcaaaatggataaaatgcctgtgagacctgaaaccataaaacacgttgatgagaacatacaggaaaaaacaccttgatattggccttggcaatgactttttggatataacaccaaaagcttgagccataaaagcaaaaataaataaatagggttacatcacactaaaacgtttctgtacagcaagggaaacaatcaacaaaatgaaaaggcagcctgtagactgggaaatatatttgcaaaccacatatatgtaagaactcttacaactcaatagcagaaaataaataaccctattaaaaagtgagcaagaaacctgagcagaaatttctccaaataaaacataaaaataaccatcaggtgtatgaaaaggtgctcaaatcactaatcatcaggggagtgcaaattaaagtcattatgagatatcacctcacacctgttaggaagactattatcaaaaagactagatataataaatgttgatgagggtgtggagaaaagagaatcctggaataccgttggtgggagtgtagtttggagcagccattatggaaaacaatatggaggtttattaaaaaattaacaatagtactactgtgtgactcaatatccctctactgggtaaatacccaaaggtgatgaatttatcacctcctagagatatctgcacccccatgtttattgcagtattgttcacaataggcaagatatggaaacgacctaagtatccattgatggatgaattgataaagaaaatgtagtatgtatatgcaatggaatattattcaaccttaaaaaagaaagacagcctgccatttgccacagcatggatgaaccttaaagacattatgctaagtgaaataaaccagacacataaataatatattgcatgatctcacttatatgtagaatctttttaaaaagtcaaatatacaaagatagagaataaaacagtggtggggatgtggagtagggtgggaggaaatgagtacatgtaggtcaaaggatagaaaatagcacacatgtaggatgaatatttttagagatctaatgtatagatgaagactatagctaataatattgtactgacatatctcagagattttgttggtttggtaccagaccaccataatagagccaatgttgtaatagagtcaccaattttttggtttcccagggaacataaaagttatgttcacattatacttagtctattatgtgtgcaataacattatgtctagaaaaacaatgcatataccttaatttaaaaatattttattgttaaaatatgctaatgatcatctgagccttcagcaagttgtaatctttttgctggtggacagtcctgccttgatgttgacagatacagactgatcagattggtggttgctgaagggtggaatagagggggcaatttcttaaactaagatgacaatgaaatttactgcatcaattgactcttcctttcataaaatatttctcctatagcatgtgatgctgactgatagcattttagtcacagtagaacttctttcaaaattggagtcagtcctctgaaacccttgccactctgtctgatcaactgagtttatgaactagtataagtactttgttgtcatttcaacaatgttcatggcatcttcactaagagtagattctgtctcaagaaaccactttctttgctcatccgtaagtagcaacttctcacctgttggttttatagtgcgattgcagcaagtcatccacattttcaggctccacttctaattctaattgtcttgccgtttctacatctgcagttacttcctccactgaagtctgtagctctcaaagtcatccatgagggttggaatcaacttcttccaaactcctgttaatagtaatattttggctttctcacatctcacatgaatcacaagtgttctgaatggcatctagaattctgaatgttctccagaagatttcccatttactttctctagatcctttagatggatcagtatctatgacagctatagccttaccagtatatttcttgaataataagacttgaaagtcaaaattgctccttgatccatgggctgcagaatggatgttgtgttagccggcatgaaaacagcattcgtcttgtagatcttcattagagctcttgggtgaccagatgcattgtcaatgagcagtcatattttcaaatgaatctttttttctgagcagttggtctcaacagtaggcttaaaatattcagtaaagcatgctataaacagatgcactgtcatccaggctttgtccttccatttatagagcaaaggcagagtagatttagcataattcttaagattctaggactttgggaataatcaaggagtactggcttcaacttaaagtcaccagctgcattaggccctaacaagttagcctatcctttaaagttttgaagccagtttttgacttctctctatctatgaaagtcccagatggcatcttcttttaatagaaggctgtttcatctgcattaaaaatctgttgtctggtctagtcaccttcatcagttattttagcagatcttctggataacttgctgcagcttctacatcagtacttgtgtttcagcttgcatttttatgttgtggagatggttccttttcctaaactttataaaccaatctctgctagcttcaaacttttcttctgcagcttcctcccctctcttagcctttacagaattggagatagttagggccttgctctggatttggctttggcgtaagggaatgttgtgtctggtttgatcttctatccaggccactaaaactttctccttatcagcagtaggtctgtttcattttcttgtcattcatgtgttcgctggagtagcacttgtaacttcctttaagaacttttactgtgcattcacaacttggctagctgtttggtgcaagaggcctagcttttagcctattttagcttttgacatggcttcctcactaagcttaattatgtctaccttttgacttgaaatgagagatttgtgactcttccttttgcttgaacacttggaagccattttaaggttgctggttggcctaatttcgatattattgtgtctcagaaaacaggaaggccccaggagaggaagagggagttggggaatgatagatcagtggagtagttaaaacacacacaatatttattgattaagtttgccatcttatatgggtgtggtttgtagtggccccaaacaattacaacaataacatgaaagattactgatcacagatttccataacagatataataataatgaaaaaattagaaatactgtgagaattaccaaaatgagacatcaaatgatcacatgctgttagaaatatgacaccgatagacttgttcgacactgagttgccacaaaccttcaatttgtaaaaaacataatacctgccaagcacagtaaggtaaagcacaataaaatgaggattatgcctgtattgtaatacaaatttttgttaaataggtagattttagctgctttcatctcacacacaatcaaaaatatgtgagatgatagacatgttaatttgcttcactatagtgattcactatagtgattttactatctttatgtgttccataatgttacatgttaaatctcaagtatatacaataaaacttactaaaaaaagaagtgaagccatggattaagttcattatatagaaaaatcttcaaatagagccactatcacacccctaaactcacacaaaactacctaagtaaaattcaaaagatattttgtttggaacctgttggatattagttagcagttctcactgatgaatacctgtggtaatttttatttatttatttatttatttttctgagactgagtcttgctctgtcacccaggctggagagcagtggcgtgatctcggctcactgcaacctccgcctcctgggttcaagccattctccttcctcagcctcctgagtagcagggattacaggcgcccgccactgtgcccagctaatttttgtatttttagtagaaatgggatttcaccatgttggccaggctggtctcaaactcctgaccttgtgatctgcccaccttggcctctcaaagtgctgggattacaggcatgagccaccgtgccctgcctaactgtggaaatttttatgcatttattttattcatgtcattaactcaccaaataatgtgtctcacatttgaaaaaataaatctggctataaaatcagcccctttggggaccataatccctaagcataccatagtctgtattactcctttaattatgttgtaactctgtctctgttttgtcttaaatgttccagtttcctactatatgagtctttaacaattatttctgttttacaatcctttttcctgtagtttaacagcgaaatacttcataagacttgatgaaaagaactgagaaaatataaatagaccaaacaacaactttcatgtttagcacaagctttctactaattttagtactttgaggggaggttagttatctctagctctaaaatgtttatagcagagactacttgtacccagcgggagctgacctaaaaaccagcatcaaatgttctgtagtcaagtagatgaaccggagttcccagccctgaaagtgtgcaaaatcttttgtacagtaaagaaaagtgtttcttcattagctattccatgcatattggatgcatgcacgttagatattctatgcctaacaccacattttcacagcctatgatttctgggatgacttactgtaaatgtgcataatatgcttgaagaaagacattaaccaactttactttggctggtaaattaattaatttttttaaaagatgaccatagtcccagaaacacggtaaaagtttgttgtgaattgattgcctcataggtgacatagaaagccaacaaagtaaacacactttgaaatggttgattagcttaatatccagtttacatattgcatatcccaatgaaaattctatataatgaaacaattagtattgcttattacacaaagtgaattctgatgttgggggcagaattatctacttttgttaattttgctatgcttttctaaacttttttgggagaggagcaggaaataaagtttatcatgagttcatactctagtttattgctattcttactatatcatagactttttatttccccatgatacgaaaaacatagtaatttaatgtaataatttaaatttcaaaattttaggtagaaatagtgtaagaatttttaatttcatcagttaagttaaataaaatatgtaacagatatttgaatgcttctgtaattaaaaatggcccatattggtaagaagaaattacctttatattttgagtaccttttacctgttgacaatgcacttaataatcaatgaatatttattcacaatctacaagtctatgtatgtattttatgaattcagttttattaagaagtataatgaaagacatcggtgaaaatggtttgctgttttttaatgtagaaaaatttggaaaacatacagtaggaagaaaaagacccataaacacaccacttaaatccagttgctattattatttaaatgcattttcttttagtcttgtattcctttagacttttagctcaatttatatcaattgataaatttatataacatagtataatgatatggtttggctgtctctccacccaaatctcaccttgaattgtaataatccctacatgtcaagggcagagccaggtggaaataattgaataatgggagcagtttcccccatactgttctcatggtagtgtataaatctcatgagatctgatggctttataaatgggagttcccctgtacaagcgctcttgcctgccaccgtgtaagacgtgactttgctcctcatgtgccttcggccatgattgtgaggcctccccagccatgtagaactgtgagtcaattaaacctcttttctttataaattacccagtcttgggtatgtcttcattctttattagcagtgtgagaatagactaataaattatatataataacatataattataaaatacattatactttggttctatcaagagaattttcttaagaaaagaagataaagtagatttcttaattgacaattcttttagtcttggcacctcagtttcatttttatatattttgttatagttgtaaccatattcatattattcttcatttatttcttaattaacattataagttaggaattttttgcatgttacctcaaaagctgttttaattctttggacattaatattttacacatatttttacaattgccatagctattggacatatagggttttaaaaaaatctagggttatcattaataacactatagtgaatattacatgcagtagttctaatcttttgattctcagaagtgaaaatactgagtcaaaagcattgattattcttaagtgtaccatatatgaaaacaaaatagctgaaaagtaatgagcactcataaatgggtaaaggattataattgacaatttgagaaaatgatacagaaatgaatcatagagaaatgtaaccttttttctatctcttgaaggaaaaatccagtatggaaagaggataaaaaggaaaagaaataagaggtagatcaaagcagccctttaaaagcttggctttttttggtaccatcaagaactgtggtaatataacagttgttgatctcttctgtttacaaagtattacacaaattataagacaaaataaaaaccatacattgttccataacgcagagaggacctaccattttgatgcatttacttctgtgctttgtgtgcatgtatgtgtgtatgtttgggggtggggagatggggtacataaaatgagattatgctgtatgtatagtttgatatcctgcttttactattttatataaccttatataacctccatgtcactttgtaaaatttatgataccttgtggctgcataatatttcattatttattgacatttatttctaatttttggcaattataaatttcacttcagtgagcatttttataaataaatttggcacttaggcaattagaataaatgcctataattgggattactagtttgaagagaataccgtgtacagatttctgaaattcatctgtataaaaggaggtagagtttctatagctaaagtgttcctttggttattttttttatttcattttattttattttattttttgagatggagtctcactctgtcatccaggctggagtgcagtggcacaatctcagctcactgcaagctctgcctcccgggttcacgccattctcctgcctcagcctcccgagtagctaggactacaggcacccaccaccacgcccggctaatttttttgtatttttagtagagacggtgtttcaccgtgttagccaggatggtctcgatcttctgacctcgtgatccgcctgccttggcctccctttggttattatgatgctgtataaccctagaggctttctttggctaccaagtctctgatctcccttccttggccaaataaatggttattaggttgttaatttgctcatcagtgtcatgaactaaaaggaatttttggagggtccagaaacaaatgaattgcttaagattaattaactattcatgattgttgtttcatgctgatcacatgatcatgtggtggttttaatcacctcttcagtcatgtgcatgttttctctttgtaccctgaagtgcctcttaagcttgaaatcaagccctatgtttctctcagagcttcccaactacctaagtgagcaaagaatgtgtaatctcactcactcaacctctctatttctgtcttgtcactgtctttgtctctctctcatttctgtggttacacattttcttttctctctggttgtctgcctggcctgaagggtgatacaaggtctgttgcgggaagtcagggaccccaaacggagggaccggctgaagccatggcagaagaacgtggattgtgaagatttcatggacatttattagttccccaaattaatacttttataatttcttattcctgtctttactgcaatctctaagcataagttgtaaagatttcatggacacttatcacttccccattcaatacccttgtgatttcctatgcctgtctttaatctcttaatcctgtcagctgaggaggatgtatattgccttaggaccctgaaataattgcattaactgcacaaattgtacagcatatgtgtttgagcaatatgaaatgtgggcaccttgaaaaaagaacaggataacagcaattgttcagggaataagaaagataaccttaaactctgacctccggtgagcccggcggaacagagccatagttctcttctttcaaaagcaaatgggagaaatatcactgaattctttttctcagcatggaacatccctgagaaagagaatgcgcacctggcggtaggtctctaaactgccccccaccccccgccgggcgtggccgtctcttacggtcgagactgcagaggtgaaatagactccagtctcccatagcgctcccaggcttattaggaagaggaaattcccgcctagtaaattttggtcagaccggttgatctcaaaacgctgtctcctgataagatgttatcaatgacaatggtgtctgaaacttcattagcaattttaatttcacctcagtcctgtggtcctgtgatctcgccctgcctccacttgccttgtgatattctattaccttgtaaagtacttgatgtctgtgacccacacctattcgcacactccctccccttttgaaaatccctaataaaaacttgctggtttttgtggcttgtgggcatcatggaacctaccaacatgtgatgtctcccctggacgcccagctttaaaatttcttttgtactctgtccctttatttctcaagccagctgatgcttggggaaaatagaaaagaacctatgtgaatatcggggcagattccccgataaaggtcttcttcttttttttttcctgttagttctgattttaatctgcatgatgacagcagatagttgctcacctctgtggtttgagtgcagaaagaataaatcattaacagagtgcctctaggaagatgtttccctcctggatatattccccctgtctttttcactttaaaacttttcctttcacgtggaagttgaacaaagaatgcagttgactacacttcagaaaccaggggcttttatggaactgcctcggcagaatggccttttgggacctttaaccttagactctttctcgttctttttatttgggcaactaagtacttgatttcaaatgataaatggttgagttcaggccaccagtgggtagtgctctgaagtgaataggtgatttttgtgtgatttctagaatttttaaaagacgtctacatttgatgatagtatagcactttttatagaactgttcatgggataatacatttgagtctccatgttttactcaacctgggtccttcagctttgtaattgtggatggggagctcttgggctggactccgagaacctgtataaggttggctaggtagagagggaagggcattcttggggaactaagttgtggcaagttttaattggcttggggcacaatacatagttactgaataatgtgtatttaatatatgttggatcagccctagatttataaaggctgttacagcagatccttctgtattgcattttgttatctttaccagaaggaccagaggcaaggatgaaactaagaagtcacctttgctccttctggtcaaaataggaaaagttaaggtggcagaagataatgaaattatttgttaaaatgaggtgtttggcttctctgttggatccatttattcatgccactccagattttcatcaataactgaattcagggtgatgttactttacatattatatgaaagcattgtgtattgttatgtgtttatagatgtggttataccctcagctctaaattatgctagaaggtcaatactgtatatgaaactgaataacaagagtgattaaataagaacagtgttagatacttgaatatgtatcttatactgttttctagggaagggtgatgtatttggagacatcttctggaaggaaaccacccttgcccatgcatgtgcgaacgtccgggcactgacgtactgtgacctacacatcatcaagcgggaagccttgctcaaagtcctggacttttatacagcttttgcaaactccttctcaaggaatctcactcttacttgcaatctgaggaaacgggtatgttctctgggtctgctttttcttattagtgtccagagtattaattaattcagctctattagctgaagagtagagaagatattttgttttgcagcactaaattcccatcaatgtaaagtggcataattttccttctctttatttatattttgtttactttttaaggaaaaaaaccctatttctatgagtaaagatttgaatctttaccatttaagatacaaaatgaaaaacagacttgaagagaaacaagctgtgaactctattatgatgtagttagttcttggagtttataatactgccataaaatcaactccagtgtcttttacctttttatatggatttttttaaagctggtaaagttaatcaacctgggtgcctgttttacattctcagctctctttaggcacttctcatttcgtaatcaattcacaaagtttactctttcaaagaacgctatctcaaaaattaattagccgcattgacacatcctacaaatatggataagaatcctttattttacactgctgccgcacatttaaccttcactgccattttgtagccgatgagtgtgacacaaatttaatttgcatgaagaaatctcctagttctggtttctaggtcattgggcattgggtaaggcttttttattgccaagaatgaaatacatgtttggataactgcacttaagtgattttatctaaaatgatcgcctgtctgtggtgaagtattttgaaataacagtcattcctttctataacctgcttaaatgaaaccttctctgtagttaacagggagggaagaaattgagcaaagagataaattaatgtctatactgtagcaacatagaaatgaacataattaaatcaatgtaattcctacttagggttccaagaaaggatgagactagcaggagtagtgtttgtactggctgtatcacatttatttgatctatacttgaacatcattttcagttcatacgtttgttatcaaatagatggagcatccagaatctgtgagaaagaatgaatagctgtagagaacacacagacttaagcacagagtacgtatgctcaatagacctatagttagatgtgaatattatgtcaaacacaaatagtggaaagtgaaggcaatgatgaatgtgggaaagggaagctaaatattaactaaatgtggaagtttctcacttatgtgttagggagctcagagtccctttcagtattaagcaggaatgtctcctttggtctgtgctctgccttctgcaatgacaaatttcccttcaacaaggcaacctgtttggtagttgactcttgtagtgtggttggcccttgaataacacaggtttgaaccacgagggtccacttacacgccaatttttttttgcccaaatgcagatgaaaaatacagtatttgtgttatttgaaacttgtgtataccaagagcccacttttcctgtatgtgggttccacagggcagacagcaggacttcggtatgtaaggatctgggtgtgtgaggggatcctggaaccagtccccctcgtataccgagggaagactgtagttttaagttcccttcaatctaaaatgtgcattttaaaatcttcccccatactgcaagattactgaaaactcctatccaacatccgtacattcctcaggacttgatgtttataatattcctgtgaaagaaaatgggcagttatttttccttcaaatcacatgagaatactcaggcccagagggattaatatcaaacaaccaagtgacacatttgcaatgcaaggggccaaggagggacaatggaaacagatcaccagtagaacatctgtcaccactttttctcttacacacacacacacacacacaaatacacatacacacatgcattcattggttgtgacagctgagtgcacactggtgtggactcagtcttctgataagaagacaagctagagacagaaaactgttgttggtttttcaacaggacccagaaacgctatgcctgtctccatgggtgccaatttgctgagtaacaccaagcggctttcttccctcacaacctgtttcctgttataactggtgtcaatttttataattctagcctctctgctcttgatgcattgtctcagtaacttggcaaatagtaggaaaagggtgtcattcagtttcactttattttcagagaaacaatatactcatgaaaaagataagtggtgagaaaatattatctaatgggtagtaatactagctaccatctgagaacatgttgtatatagccaggcacttcaacatagtttacatataatatcttattaaatgtcaacgacccacaaacagagcagtatagtctccatttcacccatgaagacgttaagtttctaagactggaacagctagttccctaataacctaggagtcagggcctgcatttgaattcatctctatgattctaaaacctgtattttttagactaccatgttgttttagcttgtcaaagccactgacattttcttttccataatattccacagaaacactgtcaacaatttatagtttctcattcacttattcactttattccaattgatctattaatgaaaacattttgttcttattgctattattgtaaaaattattgcaatgaacattcattgtgaattctataaccaaaactatgtctttagtatgctattgatatctcatagctatcatagccattggttaagggtgtgttcctactaagtaagggagcaggttttgaatccaagttgtcagccatggcatggtacagttctggccacacatgtgtatccagtggctcagtggagaggtttgaatagtgtgtggctttccatggctgcaataaggaggaaagtgagccttctttagctgcttgccttcatctccattaaggaaaaataagatgcttactgtgcgaatatagctcttcctacccatccttaagcccctctatgtaaaaattctagagctataactagaattccatcaaattctacgaattgacgaataactagaattccatgaaacaactacggcatggaatggaaaatttttctgtcaaggaccagatagtaaacaattttggatttgtgggccaatctcaactactcaacttttccactgtagtatgaaagcagctgtcttagtcagcttggactgccataacaaaatatgatacattgggtgtcttaagcagcaggaatttatttctcacagttctggaggctgggaagtgtatgatcaaattactggccagtttggttccctggtgagggttcttttcctggcttgcaaatatccagcttctcactgtgttcccacataagagagacaagaaggggaggtagagagatgggaggtgggaaggaagccagctagctcattggtgtcttataagggcaccaagtcactcatgagggccccaacttttttttttttgagatggaaccttgctctgtcacccaggctggagtgcagtggtgcgatctcgactcactgcaacctccgcctcctgggttcaagtgattctcctgccttagcctacagagtagcaggaattacaggtgcatgccaccacgcccagctaatttttgtattttcagtagagacagggtttcaccatgttggtcaggctggtctcgaactcgtgacctcgtgatctacccacctcagcctcccaaagtgctgggattacaggtgtgagccaccgcgctggccccaactttattacctcttctaaacctaattacctccaaaggctccatctccaaataccatcacattggggataagagcttcaacagatggattttgagggggtaaaacttagtcaatagcaaagctgtagataatacataaagaaatgaggaagattgtatttcaattactttacttacaatcaggtgactgcccaggggccttaagtgtgttaattgttgaaaaaagaggactggaagaagttaaatggggacaacagtgggcatatgaatagaatcgccccacctttattagaaagcaaatctattctacttgctgcctattcagagggttatgagatggaaaatgccataaatattaataagaagtagctacacaaagcaggcagatagcatgaaagagtaaggcaggatttatagttactgtggaaatggagagttcatttcatctgtgaacgagacagctgttactcactctggtaggacattgccttgtggggatgctgggctagtgttgcttagtcctcatatttttttttctccaagaggccagaagcacatttttatgggaaaacacatttgtttggtaattgatttgatttgtttttaaaattctgtggtcaaacaaaataagtttgcttgctattggttcaacagctcatgatctaaatggaatcagttaatgaactcctggtctcatggtgctagaaacctgagatttttacctggggcctggacattttgatgaaaacaaattttattttatctattttctaactgacatttagcttttcctttaattggaaaggttgctagacaactacagtgttattagaagtaccaaaagcaattatattaatggatattttcatatatcatatgtgccaaagatatcttgaaatgccatttatgctcattactatttaacaattatgatagttattagacttgctgctagacagaagtacatagattactgtaaattatttgaaaatattttgataggatttcaatatatgtttcctttgcaatcctacatattttattttgtgcatttagagcaattcttttaaggagaggtccacaggctctgccagactactggagattaagatcccatgtgtgagagtcagaagctaaactgaattgagcagaaggacctgctggggtttttttttcaataataagaacacaattccgtagtttccaataagtttaaacatattcagaaaagggatgagagagaagcagaggaaagttgactcatttgcttactttatgtatgtatttatttaaccaattcaagatgctatttcctggaatgacaaaatggtattcattaaattgatgaccagctcttaggtatacatcaaagaaagtaagcaacacaccttctttgacacacacataaaaaggtaacacaggtgacacctacattttaaaaacttcttattagacttttaaagttaatattacagttcctcccattttacctatttgttgcacaatgatttttaccatttgtgtaaaaaagagttaacctggcaggtatgactattgtcctttgaaagacttgcttataaagctggctcttgtgaacttgatttcgggggactctcaccactaactgatgagtagctctctgtgccttaattgtctgttctaacaaggtgggttgatgctgaatatcaactttccttcccgaagtgtggaattttggcatatgtcaggaaaagatgcctttgtgaccatctccagtacaaaaccagaagcaccaagtccttcatgaacttccctggttgacagcatttctcgtgtgttgtcatactcttgtttgtgcctggcttcccccagactttgcccatgccccttttccctttgctaaattttctttgtatcttatgctgcaatagtcataaccatgaatatgatgatatgcagaattctgtgaatctgcctagtggattgtctgaccttggtatggacttgagggtaaccagtgctccatatataaaggttggtaggaaatctgtatcctcaaaggtcctcaaatcagcagatatattggtaatttcattgtaacctttttttccataaaagatactgaaacctacagacagtatgttttatgagtaaaagagaatgaaccatttaaaaataagtgttatatttgtccataaggcagtcaagcgaatttcatttccttgaaacttaaaatatatgttacatgaatactgctggctacaataagcatgcctgagattttaaattatttctgaatattttcttcactttcaagatagcaagaacatatttttctccagattgactatttaaataggataagagaggaattttatttgctgtttctatacgtcttctcatgagacactttgttgaagtgtggcacagaaagtattggctggctcaccatatagccatgcatccatccagcccataacacataacatggggttgtggacataaaagaccaggtgcctgctttccaggaggctccagtctagtgagagatcatgagtcagataagtgctacgagagggttattctcagtacacaggcggcataaaggagatgaattcagtttgtccaaggggaggaaacagggaaggattccaggaggtgacaaggacacaggagttaggatttcatttcaaatagagaaataatctagaacaaggatgcgtcttgtatatcaccaatttcattttattttctttagagatgagaaaaattcagacctaagaaattaagtgattgcctaagttcacttagctagttagtggtagagctgagactggaatctagtccttggaagctcatgctggcagtgtttctactatttaacctagaataaaagcatttcgaagaagattgtcagtaaaatccaatacttgattgtgttcatttttaatagggaaggataatatgtggcatcaatttgcatgtgattcatagattgattttagtttttcatactgtggttcaggataaaactaatagtgaagccaaaacaaaacaagcaataagcagtgttcagagtcagtggacaggactctcaatctgggcatgaaccaatacgtctagtgtggccacagcatatctgtcacctgcattgtaaaatatctcattttagtgaaagcatttaactttcatatgagtattgtttaagaagtgttactgaatttagtaatattgtcttgctgataatactgcattctgatatactctctgttaacatgtcaatactgctgtactggttagtataaatacatagaaagataaaaattctcacattaaaaaaactgctacttttttttttttttttttttcagacaaagtctcactctgtgtcccaggctggagtgcagtggcacgatcttggctcactgcaacctccacctcccaggttcaagcaattctcctgcctcagcctcctgagtagctgggattacaggtgcacgacaccacgcctggctaatttttgtatttttagtagagacagggtttcaccatgttggccaggctggtcccaaactcgacctcaggtgatctgcccatctcagcttcttgaagtactgggattacaggcatgagccacagggcccgcctgctactttttcacttttgtatcttaagttatttttaaaaagatattaatacttttatattagaagttacaaaaaatattgacaagcttaccaccaaatgtgtactaaattatgtatactaaaaatattagttaatcaaaaaaaaaggaagggaaggagaaaaagaaaatacaaaattgaatattttcatatagaactggaaaaatctgagacttgtttggtagcaggtagagaatgtgttttttttgttgttgttgttagggctgaaaactaacagaagattactatgcagccaattccaaaaatgcaaaagaagaatgtaaactgaattttgaaaaagaaaaaaataactaagattgaaccatgttaatacaggctaaaattatataatcaagcgggtttcccttttaaataccatgtctatgttatatcggtgggtataaaccctcttgtggttccagattgagtgatcatggccagagaagtgttgtcttttcactccatgactctgcttattttgtcactggtgtaattaaagtttctaagcaaatggctctagagttctaatacctttactattgtcatggagtggggcccattggatgttgataaaaatgatgtcaaactgacatcctttagtagtggtctcaaagaattgcttccattgtggcttcagaggcttatcttcctttagctccatagtttctagtttagagtctttttgtttgtttttgaggcagagtctcgctctgtcacccaggctggagtgcagtggcacgatctcggctcactgcaagctctgcctcccgggttcacgccattctcctgcctcagcctcccgagtagctgggactacaggcgcctgccaccatgcccggctaattttttgttttgtaatagagacggggtttcaccatgttagccaggatagtcttgatctcctgaccttgtgatctgcccgcctcggcctcccaaagtgctgggattacaggtgtgagccaccgcgcctggcctagactcatttttattaaacatctctataccacttagttcaatgcacaggttagtctggtaccccttgccaatatttctttaacccttgtattagtctgcttggcttactatcacaaaataccatagactgagtagtttcaacaacggaaatttattttctcacagttctggaggttagaagtccaaaatcaaggtgcagtagggatgttgtctggggacgtttctctccttgggttgccactggccaccttctcactgtgtgctcacatggcatccctgcagtgcctgtgtgtgagagagtgagagagctctcgagtctcttgttataaagacacaagtcctattggatcagagcctcatcattatgacctcacgtaaccttgattactttctcagaagccttgtctccaaatacagccatactagaggttaaggcttccccatatgaatttgcgggtgggagacataaacattcagtctataacaaccaagttttatattttaagttaaatgtgaagaaatgactttgaaaatatgttaaaatcaaaacttacagctggagtgtaacattactggggatggatgtgcagcagcagcagcagcaacaacattcagtgctgatttttataacttctgggcaatgtataattatcaataccagcaaggttttcttgctgccctacagtgatttaagaaggattgctatgtaaacttagaaaaaagtccccaggcatgatcaatccgaattgtaaaatggaaaaacagaacatagaggtacatgtagattccatttaaccctaaaaagccactgtccttttctacagatggcactgttcttgagtagagatcaactgaagccagctggcaatgttatggagaagcgtagtagcaatcctgtattttgatgttccagtggtaagaaatagtggtttgggttcactctggcattagcacaggctcagaactcaataatgcttttctttccagaaaacgttcatattatggtgaatccagcagcacaaaatgtcatttttttctgtgatcaatgaagcttctcagtagcaatgatcttttgtaaatgaaaaacatactggaattggatatcaaacaggcataaagtatttgcttggtgtacatgtgtcgcagattgcatctatttcagtagcaatacgagcatcttcgaagaaatggtctaggagtgacaatgggtgttccaactacttttttttcttttcttcacccaccctccccacaatggtatattagctaaacaaaatagtagagcccgtttgttccacgaatccatcaattcttgatgctgtggaaaagacattactaaaacattgtccacacttgcaacaaaagataatatagtttccacaaaaccctcaaatagtacgtagtatctatgtttacttctctcataacactgattatggtactttggtttcttatttacatttctatttttcaactaaacaatgagctccatacagtaggtattttctgtaatactttattgtcaatggccagaatagagtctgctatataattaaatgaatgaatgaaacgtgaatctgtcacgctgcccagcagtttttatcatcactgaccagaataatcactgttatctaaaaacacacaatatctttgataactttggcaataagccctatgtaataggattatgaaaattaccattattaattggtgttaaatcacgattagagttaactcccagctgctgtttctaaccatttgtgcctgcaaattctgcacagtcctgcagcaccagcttgtctagtgcattcagagtagtacagcaattttgatatcactgtggagtgaattgagatcacccgatgccagtggctgtgattgtcagagtagtgccttattcccattgtgaaggactttgaagagaaaacgattgctctgaaaaccctgcatgccacatttgaatctgagcagagtgtagatataactctcattacctcaattgatcatcaggactgcaaattcactccaacctactggccctgctggcagtagctctgcttacatgttatggtttgtagaaatttcacttccaaagtgatgctactcatcacttcacagtttacacgccacaggcgtgatggcgtttgagcttgaaatcaacactgtaagacaagtgagttaagggaggtaaggtgcttcgctcatggccatacaggtgataattgttctgagcctgcagcctcagtttttcaactccaagctggctccaattccactgatgggggtagaaagaggcagaccttcaacaattcctgaagtttgtcatgtgcatttagatgaagcagaggcctaattatggagtcttttaagcccttaagctgcttctatttagggctctctgttggtctgcttccagacggaataaaaacttttccacatttagtcaccaggacagaggttcacagataccttgctcctgaatatgcctccaaagcagttattcaaggacagtttcacaagtttcaaagttggggctggattcagtaatttaccaacattttgaaccataggtaatactgtctgttctttgccagctcttctttttaaaaccagagtttatttttattgcaagaaaatacatgttttaatagtaaacaagaagaaaataaataagcctttaatagatagaaaagtatttaaccaacataatgtaaaaagatagacattttacaaattatttttcttgcaaatgtctattcaacaatctatttgagacatttgtttttattttaggtctgagtcctgcctcaccataatgcatctctagaggcatcttagctggacgctagactgtttgtttctaaaatgtctactacttatgaattctcagccattaatatttgatatgattaataaatgatgtgctctatcacatcattttcatttaaaggaaaatactccttttgaattagaaagcaagggtttgtattaatgttaagacttaaatgtgtgtattattttcttccttaatgccttttggcattgatttaaacttaggatacatgcaaattttcttatcctaactacttaggccttgttttactttttctttgtttttaatttttttataatttgtataaatttaaggggttcgagtgcagttttgttatatgagtatatggcttagtggtaaagtctgggtttttagtgtaaccatgacctgagtaatatacattgtgatcgttaagtaatttctcatccctcacccctctcccaccctggcaccctcccaagtctctaatgtctatcatgccacactctaggttcatgtacacacattacttagctacgagttataagtgagaacttgtggtatttgactttctgtttctgcgttgtttcacttaagataatggcctccagttccatctatgttgcagcaaaagacattattttattgtttataatggctgaatggtattccattgtgtgtatacatatcacattttgtttatcttattgacttttattttaggttcgggggtacatgtacaggtttgctacatgggaaaattgcatgcaatggggctttggtatacaggttattttgtcacccaggtaataagcatagtaaatgacagctagttttacaaacctcatcctccaccctccagtaggttctggtgtctattgttcccttcttattgtccgcgtgtactcagtgtttagttcctacttataagtgaaaacatacagtatttgattttctgtttctgcgttaattcacttagggcaatagcctcctgctgtatctgcattactgcaaagaacatgattttgttctttttatggctgtgtagtattccagtgtgtatatataccccattttccttatctagtctaccattgataagcatttaggttgatttcatgtctttactattgtgagtagtgttgcagtgaaaatatgcatgtgtgtgtctttatggtagaatgatttctattcctttggatatatagttagtaatgggattgctgggtcaaatggtagttctgttttaagttttttgacagatctccaagctgctttccacagtaggtgaactaatttaaattcccaccagcaacatctatgtgctcccttttctctgcatcctcaacagaatctgttgttttttgactttttaagaatagccattccaactggtgtgagatggtatctcattgtagttttgatgtgcatttctctaatgactattgatgttgagaatttttccatatgcttgttggctgcatgtatgtcttcttttgaaaagtatctgttcatgtcctttgctcatttaaaaaatatttttatgtttttaattttttgtgggtacatagtagatgtatgtatttatggggtacatgagatgttttgatataggcatgcaatgtgaaataatcatatcatggagaatggggtatccatcccctcaagtattcatcctttgtgttgcaaacaatccagttacactcttttagttattttaaagtggacaattaagttattattgactatagtcaccttgtgctatcaaatactaggtcttatttctttctacttttttgtacccattaaccatccccaagtaccccgacccaggccccaccacccatcccagtttctgttcaccatccttctactccctataattatgagttcaattattttgatttttttagaccccacaaataagtgagaatatgtgaagtttgtctttctgtgcctggcttgcttcatttaacataatgatctccaattccaaccatggttttgcaaatgacaggatctcattctttatcatggatgaatagttctcaggtgtgcatacataccacgttttctttatgcattcatctactgatgaacgcttagggtgcttccaattcttagctattgtaaacagtgctgcaaaaaacataggagtgcaaacatctctttgatatactgatttccttccttttgggtatatacccagcagtgggattgctggatgatatggtagctctgtttttagttttttgaggaacctacaaacttgttatacatagtggttgtactaatttacattctcacccacagtgcacaagatgtcccgtttttccacatccttgtcagcatttgctattgcttgtcttttggatataagccattttaactgaggtgataactcattatagtttttatttgctcaaagtgatgttgagcacattttcatatgcctgatttccattcgtctgtcttattttgaaaaatgtcttttcaaatcttttgcccatttttgattggattattagatatttcctatagagttgtttgagctccttatatattctggttattaattccatgacagatgggtagtttgcaaatattttctcccattctgtgagttatctcttcactttgtcgattgtatcctttgctgtgcagaagctttttgacttgatgtgatcccgtttgttcatttttgcttttgttgtctgtgcttgtggggtattgctcaagaaatttttgcccagaccaatgccctggagattttactcagtattttcttgtagtattttcatagtttgaggtcttaaattttctttgcccactttttaatggggttgtttgttttttgcttgttaatttgtgtaagttccttttagattctggatattagtctttcatcaggttcacaggttttaaaacttttctctcattatgtacgttgtctgtttactctgttgatagtttcttgttgtgctgagactctttagtttaattaggtcccatttgtcaatttttgtttttattgcaattgctttcagagtcttcatcatgaaatctttgccaggacctatgtccagaatggtgtttcctaagttttcatctagggatttatagttttagggtttacatttcattctttaatctgcctgagttgatttttgcacatgataaaaggcgagggtcaagttttagtcttctgcatatggctagcgagttatcttagcactatttatggaatagggagtccttttcctactgcttgtttttgtcagctttctcaaagttcagatggttgtaggtgtgtggatttataactgggttatctaacttgttccattggtctatgtgtccatttttgtaccagtacaatgctgctttgattactgtagccttgtagtatagtttgaagtcaggtagtgcgattcctccagccttgttctttttgcttagaattattttggctatttagcctctttttttggttccatataaattttagaatagttttttctaattctgtgaaaaatatcattggaagtttgatggaaatagcgttgaatctataaataccattggacattatagttattttaacaatattgatttttcctatccgtgagtgtagaatgtttttccatttgtttgtatcatttctgatttctttcaacagtgttttgtaatacttgctgttgaggtctttcacctccctggttagctgtgtttttgggtactttatttttgtgtgtgtgcctattgtcagtgggattgcattcttgatttggctgtcaggttggacattgttggtatatagaaatgctactgatttttttatatcgattctgtatcccaaaactttgctgaagtggttgatcagttttaggagactttgggcagatactgtacggtttctaagtataaaatcatataatctaggaagagatagtttgacttcctctccctgtttggatgccttttacttctttctcttgcctgattgccctggctagcacttccagtgctgtggtgaataggagtggtgagagtaggcatccttgtcttgttctggttctcaagccaaatgcttccccattttgcctagtcagtatgactttggctgtgggtttgtcataagtggctcttattattttggggtattttcctttaatgtctagtttgttgagggtttttaacatgaaaatatgtttaattttaccaaaagccttttctgtatctattgagatggtcatgtagtttttatttttagttctgcttatgtaatgaatcacatttattgatttgcatgtgtttaaccagtcttgcatcccaggaatgaaggcttgattgtgatggattagctttttgatgtgctgctggttttggtttgctagtattttgttgaggattattgcatctctgttcatcaggaatgttggcctgcagttttcattatttgtactgtttctgccaggttttggtatcagaatgatgctagcctcatagaatgagttagggaggagttcctccccctcatttttttggaatagtattggtaccagcttttctttatatgtctggtagaatttgggtatgaatctgtcttgtccagtgctggttctggttggtgggctttttattacttattcaattttgaaacttgttattggtctgttcagtgtttcaatttattcctggtttaattttgggaggttgcatgtttctaggaatttatcaatttcttctaaattttctagtttgtatgcatgaaagtgtttgtaatagcctatgagggttttttatattactgtggggtcaatggtaatgtctcctttgttatttctgatgtgtttatttggagcttcccctcacttttttttgttaggatagctagagatctgttagttttatttattctttcaaaggaaaaacttttggtttgttgatctttcatgctttttcacgtttcaattttgttcagttcagctctgattttggttatttcttttcttctgctagatttgcagttggtttgttcttgtttttctagttcctctaggtgtgatattacattgttaatttgagatctttctaccttctgatgtgggcatctagcactatggtcttttcttttaacactgccttaggcgtgagattcgggtatattgtctctttttttttgttactttcaaagaatttcttgatttttgccttaatttcattgtttacccagaagttattcaggagcaggttgtttaatttccatgtaattgtatgatttttagaaagcatcttagtattaatttctatttttattgtgctgtggtctggaagtgtggttgatatgttttcagtttttttgaatttgttgagaattgtttcatggccaagtgtgtggtcagttttagagtatgtgttatgtgcagatgaggagaattgtatattctattgttgttgggtagagtgttctgcagatgccttttaggtccattggatcaagtgttgaatttaggtcctaaatatctgtgttagttttccacctcaattatctgtctaataccatcagtggggtgttgaagtctcccattattatagggtggttatctaagtctctttgcactgctgtaagaacttgttctatgaatttgagtgctttagtgttgggtatgtgtatatttaggatagttatgtcttcttgttgatttgaagcttttataattatgtaatgcccttctttttctttttcattatttttgatttaaagtctgtttttttttttgaaattagaatagccacctctgtgtttgtttgtttgtttgttttccatttgcttgttagatttttctccatccctttactttgagcctgtggatgtcattgcatgtgaaatgggtctcttgaagacagcatactgtgggtggggtgacgatgggaaggtttgtgcatatgcatgccattgatagcatggtggtgaggtttgcacatgcatgcaccaacaaagtggtggggtgacgttgtggtggagtgtacattggcaaagctgtgtggagaggctgctgctgggtgcctgttggtgagggcttgtctgctgaaactctccattggttaagcagggtctactggtgaaggagctctggcagcagttgctgggaaatggcccatctgggcattcaaggctgtgctgcaagtgggcatgggcttgcagggaccacacgggaggctagaagacagggttcactcagatcagactgcccttgttccatgggcaagacagacttgctctgtccaggtgtgacagtcagcaaagaccaaagccaccaagaagagtatggagagccttggggaacgggtgtccccagccattctctgactttcccaagccaaactctctgggctctgctcaggctagtgttctgtccctgccacctctccaagcagcaatctctgtcagctgaatatccatgggttgtgcagtcttctgaagctaggattctggaggtccatggcaagaatggtccactccacacctgtttaactcacctcttccccaggagctgctgggggccaagaatgagtactggtgcttggcagtcccatgcaagatttccagcttgctctcccttcaccccagggtctgcatcctccctccatccattctcaatgccatccttcgaaaggtcccctcacagtgtgccagtcttcttgatgctctagtatgttggtgagagatgcttttcttggctgcatctagtctaccattttggctcttcctataccacattttatggctcgttttttcttctgtcttctagaataaaagtaaataatttttctctgcagttgaatatataatataatgatgtgcgatattaagtttgaattttttatagacttgtattacaatgtatttttagccagagttcttttgagagttcttccctccccaacccccaaggcaacatctaaatttgatcatacagtttgtcattttagggatttcttcccttcactttttgaattgaatctattgtctcagctttttctgttttctgaggtgactgaaaaaatatagaagctcaacagacatgtatttgaaaagcttccatgctgattctgatctgtagctttgtagcacattacaatggaccataatcctttttttttttttttgagagagtgagtctcattctgtcacccaggttgaagtgcagtggcgtgatcttggctcattgcaacctccgcctcccaggttcaagtgattctcctgcctcagcctccagagtagctgggattacaagcgcccgccaccacacccagctaatttttgtatttttagtagagacggggtttctccacattggccaggctggtcttgaactcctgacctcaggtgatctgccggccttggcctcccaaagggctgggattacaggtgtgagccaccctgcccggccgaccgtaatcttttgaggagcatttggttattcaaaggagggatttcaaggtgtttatggtgaattcaggctgtgaaaaaaataaaataaatgttgtaataatacatatgactgtctatatgatagaaaggactttaaagcattatatacattttgcaaatgagaaaatagctactctgtggttagactgaattcttaatacttaactgttctcaccaaaataacatctgccttgctgcaatgtcttttttattccccagctgggaggtgcatttcacagattttgccttccagtcaggtgatctttttctaaaggaatcaaatgaagcaattctactgagtagccagagacactcagatgacccagcaaggctatagtaatttctcttggaaaaagtcattcattttctgtctcttctctctgaatcaggttgtacttgattcatccaacacttttagaagttgacatttgatttcactcgggtatgttctgtgttcacacttttgtcctctagagagtaatgtcatctgtagaagttcagagacacagtcctttaggaaactcgcaatctggaacggaagctgcaagtaaaagctaaaattgctaattctgcacataagaagaggccgatttcccctaatgatagcacacagaggtaatacagagaactggaccctgatcaggaatttgcttccttttttaactggtacctcggtgaccgtgttaggtatgattatggactgtattataacttagagcattacatgggtaatatgtaacacgggtcctttgaaagttagtttcccatgataggaagttatgtactcattctcgtgtgaaaaaagagtgtttcctagtgctcagaattcagaaactaggatgtcaaatgacctagttggccattgtagagtgtgatagtacacagcagagagtctcctgtgccagcaaaggtgagcaggagaaatcagatccagcctcctggatttgcaactccacaaaatgagactgactggcagcttttaaatagcaacatgtttgtacctgagagtcaccaagtggcttgttattgaaatcacactctgggaagactccctgtaggctgttgggagtggggatgcaggtggggagaaaagaaaagtgcctgacatgggcctatccccgccgttcaggtgaagctggcttcttcaaagtgtttgtaaaaaaagtcacaaaatggatgtttgctctggtgaaaaaactatgaaagtagatttggatttggtaattttgcaaagctgaaaaatctctgttgttgggttcctgagtcattctactcagcttgctcccttaaagggctcttttaaattttgaaccagcaattttatggaggttggtaacagtggtgatgatcagataatattgaaagagagagagaaagaaaggactgtaaaaattcaaaaattcaatcaggacaagtttgtcagcagaaaagacttaaacaaatgtaattattaaaaaatataccctggccgggcgcggtggctcacgcctgtaatcccagcactttgggaggccgaggcgggcggatcacaaggtcaggagatcaagaccatcctggctaatatggtgaaaccccgtctctactaaaaatacaaaaaaaaaaattagccgggcgtggtggcgggcgcctgtagtcccagctactcgggaggctgaggcaggagaatggcgtgaacccaggaagcggagcttgcagtgagcggagatcgcgccactgccctccaggctgggtgacagagcaagactccgtctcaaaaaaaaaaaaaaaaaaaaaaaatataccctacgcctggagggtaaaccagctttatgatatcaaatggaatataaaggatttgaattttcagcttttgagcaaatgttataaaacaaatgtgccaatatccttctgtaagcacaggcacctcagtattttccataatcaaatagccatgccccagaaataaattcataattgatgccacaggatttcaaattatctaagcattctctcattttcttaaaggctcttcagaaaaaatatgcctaatttagaaaactgctactttagtctggatttcagacagtgggactattcaatcctcaggtgtgcttcagcttgtcaaaaacagctgactaattttgatgaaagaagaccagagatagatttaatatcttaccaaaataagtcaaactaatacaagtgaccaggactataataaagacaaaacatagccatccatatagtaacaaaagtcattgttttaaatgaggatcaagagcaaaggtattcctctattgagttataaagacttttgttctcagaactaaaaatttgagatcatgtctttgaaatacaggacaataaaatcaagatttaaacaaatggaagagaacttgggaaaagcatttattataaagaaaaacatctgtgtcccttggattgctagcatataaaataaactgaacatcttatcctatgtctagctccctcctcaagcagtgtcttccaccctacaccctctgttatcctcctcatgtgttccagctccacatgactctcctttttccatactaacctacaaccaattgctgtaacatttggttggtatttactgtatgttgctttgtagggtcatgttgtgctgaacagatgacatatccccatgcactgacagttaccttcttaaagagacatctattaccccatatatccaactgctctttctacgccagcacttcagtgactttttctgattaaatgcataatgatattacagagttcttaatttaaagcaatgtgtgctgcttccctttctggtggtagaaattgatacccatgggaagtaagtactgagagaagagtagcagaaaagagggaaaagaggaatttgatttattttttaaaattctacaaatcaccggggtaattttggatggttctttttttaaaagaattttatttttaacttcagtgggtatatagtaggtatatgtattatggggtttctgggatattttggtacaggcatacaatgtataataatcacatcagggtaagtggggtatctatctcctcaagcatttatcctttatattataagcaatccaatcatacttttagatattttaaaatgtacaattaaattactactgactatagtcaccctgttgtgccatcaaatactaggtcatattaactatttgtaactttttttttttttttttgagatggagtctcgctctgtcaccaagctggagtgcagtggcccaatcttggcttactgcaacctctgtctcccaggttcaagcaattctactgcctcagcctcctgagtagctgggattacaggtgcatgccaccacacccagctaattttgtatttttagtagaaagggggttttgccatgttggccaggctggtctcgaactcctgacctcaggtgatccacccaccgtagccttccgaagtgctgggattacagatgtgagccaccaccctcggctgtaactatttttttgtaaccattaaccatcttcacttttcctcccatccacccactacccattccagcctctggtaacatcattctactctctatctccatgagttcagttgttttaactttcagctcccacaaataagtgagaacatcttgtctttctatgactggcttatttcacgtaacataatgagttcctcttctatccatgttgttgcaaatgtctggatctcattcttttggtttttttttttttggctgaatagtactacattgtgtgtatatgccacattttctttatctatattcagctgttgatggacacttaggttgcttccaaaacttggctattgtgaacagtgctgcaacaaacatgggagtgcagatatctcttcgatatactgatttcttttcttttgggtatatacccagcagtgggggtgctagatcatatggtagttctatttttagttttttgaggagcctccaaactgttctccatagtgctgtactaatttacattccgaccaacagtatacaagggttcccttctctccacaccctcaccagtgtttgttattgcctgtgttttggataaaagccattttaaatggggtgataggatattgcattgtagctttgcattgtagcattgcatttctctggttgatcagcttttaatacacctatttgccatttgtgtgtcttcttttgagaaatgtctactcagatcttttgcccatttttttaaatcaaattattagactttttcctatggggttatttgagctccttatatattctggttattaatcccttgttagatgtgtaatttgcaaatattttctccaattctgtgggttttctcttcactttgtttattgtttcctttgctgtgaagaagctttttaacgtgatctatttgtccagttttgctttggttgcctgtgcttatggagtattactgaagaaatctgcccagtccaaggttctggagaatttccacaatgttttctttcagtacattcataagttaaggacatagatttaagtctttaatccattttgatttaatttttagatatggtgaaagataggggtctagtttcattcttttggatatggatatccagttttcccagcacaatttattgaagagactgtcttttcctcattgtatgttcttggcatctttgtaacaaatgagctcactgtagatgtatggatgtgttactgaattctctattctgttccattggtttctgtgtttgcttttatcccagtaccatgctgttttagttatagtagctctgttgtataatttgaagtcagttaatatgatttctacagttttcttccttttgcttaggacagctgtggcttttctgggtcttttgtggttccatatgaattttaggatttttttttctatttctttgaagaatgttattggtattttgttaggcattgtgttgaatccatagatggctttcagtagtatggacattttaacaatattgattcttccaatctatgaacatggaatatctttccacttttctctgtcctctgtagtttctttcactgatgtattatagtcttcatcatagtgatcttattattctctacttaattcttaggtattttattttatttgtagttatcataaataggattactttcttaatttctttttcagattgtttgccgttggcatataaaaatgctactgatttttacatgttgattttgtatcttagaactttactgaatgtgtttttcagttctaatagttttttggtggagtctaggttttgttttttttttccttagaggaaaggctttcagtttttccccatttggtatagtactagctgtgggtctataatatatggtttttattatgttgacatgtattccttctatgcccaattttttgagggttgttgtcatgaagggatgttgaattttatccaatgcattttcagcatcaattgaaatgatcatgtaattttttttccttcattgtgttggtatgatttatcacactgattgatttgcaaatgttgaaccatcctcagatccctgggataaatcccacttggtcatgatgaatggacttttaaatgtgttgttgaattattcttgctagtattttgttgaaggtttttacatcagtgttcatcagagatactgtcctgtagtttgctcgcttgcttccttccttcctttttcttttttcgatgcatctttgtttggttttggtatcagagtaataatattgtgctcatagaatgagtttggaaggattccttctgcctctatttttaagaatagtttaaataggattggtattagttctttaaatgtttaataaaattcaactgtgaagccattgtgtcccagctgttttttgctgggagactttttagttactgcttctaattacttcttgttggtctatcaagttttggatttctttatggtttaatgtatttgcaggtcgtatgtgtctagacatttatctatttcttctaggttttccaatctattgatatgtagttgttctcagtagcctctaatgattctttgaatttctgctgtattggttatactttatcctttttcatctctgattttatttatttgggtgttctctcttttttatatttgtcaattttgtttatcatcataaatagccaactttttatttcattgatttgttgaattgttttgtttcaattttatttatttctgctgtgatgtttattattcttttcatccactaaattttggttttgttttctcttgcttttctagttcttcagtatgcatcattaggttgtttatgggaagcttgccttcttttttgatgtaggcacttataaaccttctttgtctctttatatagtttttgtcttgaagtctattttgtgtaagtatagctatttctattttattttattttattttattttactttattttatttttagacagagacttgctttgtcacccaggctggagcgcagtggagcaatttcagctcactgcaacctctgtctcctgggttcaagcaattttcccaccttggcctcccaagcagctggtactaaagccacacacccccatgcttgactatttttttttgtatttttagtagagatgggattttgcatgttgactgggctggtcgtgaactcctgaccataagtgatctgcccacctcagcctcccaaagtgctaggattataggcatgagccagcattcctggctctattttttttattttccatttgtatgaaataccattttctatcccttatttttagtctgtgtgtgctttataggtgaaatatgtttcttataggcaacagatcattggatcttgtttttttttttaatcatcccttcagccactctacgtcttctgactgatgagtttattccatgtacatttaatgttgtattgataagtaaggacttacttctgccattttgttatgtgttttctggtttgtcttccttctttacttccttcctgtctttcttttagtataggtgatttttttctgatgttatgttttaatttcttgctttttatttgttttgtatctgctgaatgtttttagatttgaggttaccatgaagcttgcgaataatatattataaccaattattttaagctgatgacaaattaatactgattgcaaacaaacagataagccaaagagaactaataaaaactctatattttaactgcatctctgtgctttttaactttttgttgtttctattttatatattattgtactgtctatgtcttgaaaagttgttgtagctttttagaatgtttcatgctttcatctttctatttaagatatgagtagtttacacagcacaattgcaatgttattatattctatatttttctgtgtacttactattactagtaagttttgtaccttcagatgatttcttattgctcattaatgtcctattctttcagattgaagaactacctttagcatttcttgtaggacagatatggtatttatgaaaaccctcagcttcccttgtctaggaaagtctttatctttcctgtatgtttgaaggatatctttgccagataactattctagggtaaaagggtttttttctttagtactttgaatatattatgccactctctcctggcctgtaagatttacactgaaaagtctgctgccatatgtattggagctccactgtatgttatttgtttcttttctcctcctgcttttaggaacctttctttacccttggcctgtgggagtttgattattaaatgcattgaggtagttttctttgggttaaatctgctttgtgttctataaccttcttgtacttgaatattggtatctttgtctatgtttggaagttctctgttattatccctttaaattttctattcctctgtctctctaccttctctttaagaccagtaactcttagatttgccgttttgaggctattttccagaactttagtcatgttttcttcttttttcttcttttttctcttctgtctattttcaaatagcctgtctttaagctcactagttgtttctcatgcttgatcaattctgctattaagagactgtgatgcattcatcagtatgtcatttgcatttttcaacaccagaatttctgtttgattctttttaattttttaaatttctctgttaaatttatctgatagaattctgaattctttctatgtgttatcttgaatttctttgagtttcctcaaagcagctattttgaattctgcttctgaaaggtgacatatctctgtctctctgggattggtgcctggtttcttgttcagtttgtttggtgaagtcattgtattagtctgttttcacactgctataaagatactatctgagactgggtaatttataaacaaaagaggtttatttgactcatagttctgcatgactgggaaggcctcaggaaacttacaatcatggtggaaggcaaagggaaaacaagcaccttcttcacaaggtggcaggagagagagggagggggaactgccagacacttttaaaccatcagatcttgtgggaagtcactcaccatcatgagaacagcatgggggaaactgcccccataatccaatcacctcccaccaggtccctccattgacacttggggtttacaatttgagataagatttgggtggggacacagagccaaaccatattagtcttgttttcttggatggtcttaatgcttatggaagtactaccagggtacctccaatgttttcttaaggcccaaggtttcttcattcagcttgtggtgaatgctgctaggcccagaactcatccttcaggacagtaggattccctctgggtcaggataggttcagaaatgtcatccaataaccaaagcctgcaatctgggaccccaagagcccacttgatgctcttccccactgcgttcaagctggtacataagctgcaaaataaagtctcactcattcttttctctcctcttctcaagcagaaggggtctttccttggcaggatctgcatgttttgttgtctctgtgttgtacagtggaagagaaacaacacattttggggacagctaggacccatgcagatgaggtattggctcacaacccaaaccataatatacactatcaggcaagaggtattgcagttccagatcaagacccaaagtggaactatcaaaggggcaatcaggacttggggaggagagattatgtggtcacttgttggttggaagggatgaaggaatgtatgcaaaagcctgttaactatgagaaggttaagaaagtttctcagggcaaagatgtgaatccagctttgtttcaagggcgtttagttgaggccatcaggaaatatactaacactgatcctacctcaagagaaggacagacccttttgggagtacattttataacccagtcttcccctgatatccataggaagctataaaaagcagctatgggtccccatacttctatggaacagctcttgtatatggcattttagtttttaataacagggacaaagcagaggaggcagaaagaacaagaaggacttcccacaaggtgcagctcttggctctatccttaagctcatcccccacatggggctgccctcctggctcttggcctgaacaagggaagctgaaaggtgggaaagccaaatctgggtgtctgagtcaccatgccttgggcatgaattataagaaattcatgccttgggcacactgttagaaaactggccatggaagagggattgcccagtgcttagaagggagctactggcatctgaaccaatgatggccgaaatagccaggcaagtccaagagtgatggggcctgagatcttccaccacagctcccattggacaactaggcatatctctagaggagccttgggtaaccaatgacatggcaggtaagaatattaacctccttctggagtgcttattctgttttgacccattataatgggcctctcttaccccaaaactgtatggtcaggggaatagatggaaaagcccatagatgtcattttacctatcctttaagctgctcttcaaggactttggttttctcttgaatggcccaccccttgttaggaagggatttgttagctgcagacagtagtatcttttggaaatctcaacagacagaaattgctccttctctttttctgtgaataaatatcaggctttgttgctagatgctccttatataacacttaaagtatgccaaactttgaatccagctacctatttgcctaaacccacaggcaccctagatcattcttatatacaagttatggagcaagtttactccagccgtctggatttaaaggatgagcctctagataatcctgaggtagaatggtttacagatagaagtagctttgtgcaccagggaaacaggaaagctgggtatgctgttgtcagttaacatgaggtaattgaatctcaggccttaccagcttctacctcagctcaaaaggcagaattaatagctcttattagagccctgcaattaagaaaagatttaagagttaacatttacactgattctaagtatgcctttctggtacttcatgctcttgctgctatctagaaggaacagggactctgagctgctaagggttctcctgtaaaacatcacttagaaattctaaatctattagatgctgttttgctgcccaaggaagtagctgtaatccattgcagaggacgtcaaaaaggagactctaatgtggctaagggagactcctttgcagatacagctgctaaggcagcagcattaaaggagccagttggacttgtcggcaggtttgtaccctcagccacggcaatgacagaccctagatatactgaagaggaacaagaatgggctaaaggtcagggcttaattcaagagctttctggctggcttgtcaatgacagcaaactgttaatatcaggtgctaatcagtggaaaacagttaagtagttgcatgactctactcatttgggaagagcttccctgtttcacttaatgtctttttataggaaaaaagctttttatacgtaaaggcttacttaaaacagtaaagccggtaactagggcctgtgaactatgtgcctggaataacccaaataaccagtcttcacctcctcctctagtaaggcctgttcagcacaggggagcataccctggtgaagattggcaaacagactatacccagatgcccccatgtaaaatatttaaatatttattagtgttcattgacacctttaccagttggggttggatcaaggcttttcctacctggtctgaaaaggcaattgaggtttctaagctactaaaggaaataattcctaaatttgggctgcctaagcgcttacagaacaataatggcccatctttcacagcgacaattacccaaaacatatcttcagccttaggaattcaggaccgccttcccttggcatggaggtcacagtcttggggaaagtggaaagagccaatcaaactctaaagaggactcttgctaaacggtgccaagagacatcagaaacctggctgtctttattacctgtagccttattaagggttcgagtggcccctaagggaaatctgcagctcagcccttttgaaataatggatgaaagtcctttcttaactacagacctcctaatagacatagatactttcaagctacagagttatgtgatcaacttgggacaagtgcaaaacacacttcttgaatatggaaatcaaagactcccttcccctcctaaggaagagaatcttgttacaacacagctgggagactgggtcctattaaaaacttggaaggaaggatccccagcaggtcaactttcctcaaaatggaggtgaccctatcaagttctccttagtaccccaattgccattaaacttctgggaataaacaggtgggtctgcttatctggaattaaactcatttcttatgaagtcccacaggccaatggaacacaagagactgatcttgtttattcctgtgagccaatcagtgaccttcgactcctgttcagaagaaatgaaagggatgggtaacctaaagatatggattggcattctactttggaatataagttggaatcaggcagagagtaacttatttactgagtgggcacagactttagcctctctacataaccaaactgttgggtatgtggacattttaacagcagcttgagggagaacttgtgctttgatcaaagccgagtgctgtgtgtatgttccagactattcaaataatatcacccaagctatgaaagctttagacactcatatttctgccattgatacgctatcggcttggttgaccctatatcggcttggttccaacagctgcccagttcttggaaagcctttctgtttagtttacttgggaatgattttacttattttactttgcttttgtgggatatattgcagttgtactctttgtgcaggaatacaagacaagttcattcaacactttcttaaattggacacttattaatcttccagatattggaagattttttttgtcggaactcgcagttatgaacgaccttcgccataccaacgctctctgactgagctcctctctaccctaaatgcaagacaccatagttaggcaggaatatcatcacccctattcagcctgaagaagttacagaagacggatcttcatccctctgcaacccttaggattaaggtcctcttgtaaaggaagcagggagatatgtcaggggcattcgaaccagagcgactccatcttgaataagggctgggaaaatggggccatgacttgctgggctgcatcttcagaaaggtaggcattccgagcctctagatgttcacagttaagggaacaaattaataatgtttactaaacagaccccgacttgggagtgtccagatatcccgatatctgaagaagaaagacattcctaattttgctttgaagataataatatcgattcttgcaaaatatagtaattaggaaaattaatcctctatcacaaacccttgtagcagactatatctccccatatataccagcattgtacctagggtggatgcgtgcctccttttactttcaggaacgtcctactctgtctatggagtagctgtcctttcaccactttacttcttaataaacttgcttttgcttagcactgtggactcaccctgaattctttctggtgcaagatcaaagaaccctctcttggggtctggatcgggacccctttcctgtaaccagaatcaccctcttataagctaagtataacgtttagtggcaaggaatttcatatacagcaatgcagtgtgcttgaaattgcagaaataaacacttctacacttgcctaagataatactgagtcttcccaaaggaaatgcctttttttctcctattaacacaaaacagtatctaattccaattttctaaaaactccacacagtcagcataacctctgttatgagtagtatcttaactgtgttccctaacatttgttaaattatttggctaatgatacatcttaagtgaacaggtaggggttgtgatgttaagtcagggtcttggcacttttagttcatgaattgcgtttctctaatttaggttaacgaacagacttctgtactgttttgctgcatgtgctgagattagcattagttgatttaacttgacctaaagcttgcactttaactacaggttctaagctcatcctgaattatatctatcatttggctgagaaccctgctatctgctgagatactgtccttataaccatgcctttgtggctatagaaatagagttattatacaaatatgttccagttaatgggagacactcaggggaagcattgggaaaaatggcaaagagctttgccaatctgtgcttagtattaacccagtaattttgtaaattaagagctgagtttgcttttttttttttcttttgagacaaagtttcactcttgttgcccaggctggagtgcaatggcacaatctcagctcactgcaatctctacctaccgaattcaagcgattcttctgccttggcctcctgagtagctgggattacaggtgggcaccaccacgcccagctgattttttgtatttttagtagagatgggtcttcaccatgttggccaggctggtcttgaactcctgacctcaggtgatccacccgcctcgggttcccgaagtgctgggattacaggcatgagccgccgcgtccggcctgagtttgcttttttatttacagcctcaaactaaatttgaattgcacttttagaagtagaaggcaactacattttgatttcataaaattttgatcttaacatgatagcgtgtttgaagtttaatttttctaaaaacactatttgcttcaatttatctgtttgtgaaagaacataataaagagaggccactgataggggaagaaagagaaatattgcttgaacaagctcattccactagtcagacttgtcaaggaaaaggtgaactgatacctttttaaaataatattccgttcaagaaaagttgctcattttattcatgtttgacatttcatagtaaaggtaaaattcatttttaatgaaaaatactccacagggttattaattaaaagaaacacaggaagagagaactgtcattttaaaagagcagctcatgaattagagaaagtcaccagccgaaaacagagctcagtgatattctttccaggatagatggctggcctgctaatggaaacagccctaaagtgccccctgattggcacctgtgccatctgggcacgaggtatttttgcctcaaagcttcagcaaacttagagaagtagtttcttgagcttgttaattaaatgttttattataattcttttttgtgcattgttctttttatttttggtgtgcaacttgagggcaaagcatgtgaataatgtaatcatagcatctagagtagtattttgtactgtaatgttttgaatatatttggcaggttggtgaatcaacatttgcatgccttgtatttgcaagaggaccaaatacagatattacatggatttatattcctctaacataaataatatttctaggaaaaggtgaaagaggctagaattgtttaatttgttgaagagaagtgaatgccatgaaagtgtgtggcagagccaggtcgtgagaaaattgtaaaatttccatttgatgaattcacacttcttttctcccacttcctagaaacttctagtcttgcctctgtcgccacttcccccattttgttctccacacagctttgtggtgctcagaaacccgctcttctgttgactctgcctgacatcctttaggaagctgtagggcttgaagggtccaagatacagaatccttatgtccatgtcacaggaaccaatcgaaatatcaaaatgtgactgttattactgagaaagctgattagtggagatggtttcagggctgtatcaagtggtcctcctgatattttagccctgaattaggcaaacttaccatgcaggcacaggtatggctgaataactcctcattagacagttgcaatggaatgcatcatccctccaggcaggatggcttcaaaaggggagaggaagtggctaggctgtttattcttccaacctcaccaaccagagaggtcactcctttcccaaccccttacagacatgatgtttggagtctctctggccctggcttctgaccaaagtccttattccagggattgtttaaagaaaattgaataaaatatatgtgattggctctgtgaaagtttctgtctatattatacttgttgacagagttgataaatttagtgtttttgaacatttcataccatgttattctgacaaattccagtttttgttgaaagttagactccacttaatactgatttagtttaaggttttcttttctaggatgataacctctcattgttagaggacagtgtgctagtgtatggaattgacatggctgccactatgtttaggataacacaggcctgaccataggggtctaatgactttcagagattttctgcttcatgagcttctgatctacacaagcaaactgagtaaccagccatgaatttatttgctgcacaagataacttttgtgcgttaaaagcctggagagttgaccttcactcttgctggcaatttgtgcagtgtcaggatcctgcaggaaatgaggtggtcaagagcatcctctgctagactccaggtcaaagcaaaatgtagagggcaccgtctgaattgcagtctggatgtaccctttataatctccctggttatttctcccaacttccttctttctcccttcactcctcctcatgccagacagtccttcagattggaaggtattctgaaaactatgatatttaacttgattttttcccaaggattctgatttttcaaacccttagaaagaggcatgtggtgtgtaaaaaaattcctgctgttttagctatttcaagtcagaagaggttttcccagaaccctctgaatgatcggtttggtgaatgaacaatcatggtttctgaccgtagtgtgaaatgtggtgtcaggtgctgagacactccattttcatttagtttatctacttacgaatctataatatgcaaacttatgtggttatacttctcttcgtaattcatgctcaagatatgaacagttctttttgtctttatttagtatcccaaatcataataggtgctcaatgtttttacatttgatttgttgtcagaaagtccattgagcagtattttgagactatgatggtatggaaataactgatatgatggaagtaactcttaatttgagtgcccaccttaatctcttgtgcttcaatttggtcgtttttaaatgagaataattataatatctgacacttctgaagctcttacagtttagaaatctgtttaaaatgcagtatcttacatgtccttcagagaatataacattgtctccattttataaatgaaaaatccaagaacctgaggagttagataatgtgctataatccctcaatattaagtgacaaagtagtagtcctggaactaaagtctttgaaaagtttattaatttttctcttatatataatacatcccgtagagctcaaggaattattgggtgaagtaggtgaggtgatagcaaaggtatttttaaaatatcagtagtcatacaaatctgaagttaataagcaggattgtctttactaataaagcctttcaatactcttacttttctctttagttccctgaagttgtaagagttcaaagctgatagatgataaagcaattaaaatagaggtaaatctttgaatggtagtttcaaaaacttggctgtttatttcttgttcctttatttaaggaaccagctttctcttccttgctaagagagctttctttttcatttccttgctaagagagctttcttgtcattcagcaaatttctgggacttccacagtccctagagaatgaaactgcccagattgggggtggagtcgggtagaacagatccagagatatgacactttgtggatataggcaacacagtgaatatggtggtaaaggaccttgctggcctcagctgtgaggcccagcagggggtttgtatataaaagagagtttatgttttgatgcagatttctgacctttacctacacaaatgaggcaggaaatgctttcccgtattagattttttaaagatcttaatttcttttcagttctgttgttagacttctttaataaaaacaagttaacataattaaattttaataggtaaaaatcctaaataaggcaagaataaaaataattcagttaaactttcataacaaccaaaagcaaaacaaaaccaaaagatttcatagatttattctacgtcgatacccccaggtgattcttgtgcacagctttggaatcactgacctagaacagtggttttcaaccctggctgcacattagaattacccagggaacttagaaaaagagatatctatataccctgtcccaaactaatttaaattagaatctctaggggtgaggcccattatacttttattcacagctccccaggtgagtctaaactagagtcttagcggaaaaccatcgctttatacatgtatctttaatatcacacacatttatttgcacttctaaatattacacaatctccaggggtaaaatgccaggcaaaatgacgggaaaactcacttgtagttgagccattttctctgtctcttctccatggggaatagagagggaccaaaactggtcatcatcttctgtactattttaagggaaggcagttgcttttggggcagtggctttccaactgctgtgtacatgaatcatgcagagtgaatcctaagccccggtaccaggtcactacgattcagtatctctgaagtgaggcccagaaacctgcaacttgaataagctttccaagggattctgatgtaggtagtccatgatcctaacttttctctatagtttgatctaagggccttctgccaaattaatggcgccatggcatctcctccatgttgcctgcagtccttcatgtcataatcactttgcctggaattttatcactggagattgtataatctttagaagtgtaaataaatgtatatgatgttaaagacgtgtttaaagcgatggttttccactaaggctgtagtttagactcacctggggaactttgaataaaatacaatgggcctcagccctagagattctaatttaaattagtttgggacagggtatatagatatctctttttctaagttctctgggtaattctaatgtgcgccaggattgaaaacctctgttctaggtcagtgattccaaagctgtacacaagaatcacctgggggtatcgacatagaatcaatctatgaaatcttttggttttgttttgcttttggttgttatgaaagtttaactgaattatttttattcatgccttatttaggatttttacctattaaaatttaattatgttaatttgtttttattaaagaagtctaataataaaacctaagagaaactaagatctgtaaaaaatctaaaataagtggaaccatatgctgcatagagcactctattcttttttgctacttaggacgttagttatccgaagcttctaaaatatgttgtactctcctcatgccaccagtttccagatgatatttcatttcctccttccaggcctttgaggaagatattactgttcaattttatagccaaaaacctgagattcacagaggctaagtggatcatcaagattgtaaccctgataagcagcagaaacagaatttaaaccacagggttttactttgataccagtaatcttttcttatattacattgtctttagatacagaaaactcatgggcaattttggcagaactaacaatttataatgcttttcatttaaaacactaatgctattctttctttgcagagatttattttaaaacacaaatgtagaggctaccgtaaaataaaagcaggaaacaaaaccattactgtgtattttcaggaaagaatgattacataggtaggaaatttatagaaaataatatcaacttttactagccaaaatttcttcctcactctttctctctctgtggcaataaactttaaaaagttcatcctaagtaagctgcaaatatcactcataagggttgattctcctttccatgctttatgttatcattgggttgggggaggggaccaaacgtcagccactgcaagatcccagtaaagatgcaacaccttttacaatctaaaatctggataatttattgattttgattcacagttggtttggtatattcggtttattaaaagtgtgctactaggtgtgcaggtaggttgcaaccacaggcagtctgtatcacagagttagaagttactctacctgcaatatcacgagatttcccttaacatgacttcttccagtctaaaccagcctattgattaagtagacccttgtattgccaattatccccttatctgaaaatatagtatcgtctttttaatctccttcattagaaacatcaaacaccttgcaaagttcttaaggaatacgtgcaagccgcttaatttatcagtatgcttgtttgtttttctgggaaaactccattatgagtcttctttacatagcagtcattatagtttgaaattgtaatgctgcccttagaaatgtgagagggatatcttttacattaataagcatttttgcttttgtttcatactcagaataaatcaaggcacatgtttgtgacttctacttaaaaataagacatttctgaaaattagcaaagtaagtttagttaactaaataatggaagctggaaatgaaactgttagaagcttccaatgagttctttattttaaattgctgctcgaagctaatcagtttgtattgctctaaagagacagggagaagactttgcatgttagtggttattaattctgttcttactaagtactatccaaaagtgatttcttgacactgaataatcagctgtgcaatgcagagttcactaacctgcatttctacctccatgttaaatatcttttatgtgtagctcatcaaaatatatgaatggaaagataagcttaataaaaataaaggaaaaaatcagaatgaggttgaaatatagggatgttatccttttgggcttatgtctcttaaatatcatgtttttctctgaactagcttcatggctcaggaagtttttcggagtgccgtgaaaagaaagggcaagcttaggtgtaatgttagaaaatcagcaggagagcaaaatggggcaggggctggacagcaggaggagggcaatagtggctaaattatagctagaatgaggccacctctgtctgacaacctaggccagagaagtgattgtcacttgtttagctcctgagattagacaagtgtgcgtgtgcacacacactcaacaaagatggacaccgaaaagatgacatataatgacaagaagagtatctttctataatcaaatataccctcacaaatacccacatacacatcatccgtatattgtgttcacatgattgtttaacaaacattcattgatatcttattccttcctataatgagtctatcacagagggactcctacttgacctttgtttttcttctgttggtttaaccagacctgacctgtttaaatgtgtgaattctgggaaggaaaagcagcttaactatttatatggtctatgtttgtctgtcgagaggaaagattcttaacagtgctgcttcagatgttaaaacatttccctaccctccaaaatcatcatcttactttgctgaaaggtttacatttcattgtgttttatgttgattgcctagctataaaataccattaaaaggcgactgtaaatcaaagataatgttctactggcatccttgagatatgcagcaaactttcccttcagttcttcaagcaccctgcaggtttatatgacaaagagtaacactccaaatccctgccatagctctgggaacataaatttttgcccgcatgtaatgtttgtgtagggctttcttgtacaagtgttttggtctgtacaacagtaccatgattgaagctgggaggcctttgagatttatagtttcgatgggtcactgaactccatatcaaaagtatttgttgatgttctgtagacaacttagatattctccagtatgttgaccaataatctcttgtttttcaaatgactcaaatgttactgtagcattgccctcaaaatttcttctctaaaaatgcctacatactctaacacacaaaaaaagaaaaaaaaatttctcgcataaatagcgtagtcattttgactgtaggttgttagcctacagagccttagccaactgtaggcttcaaataaatctactgaactttttaaataagatctaaatattttcacatattggacaatgggtccttttaagagaggctttgaaagttttatcagattccaaaaaagtgtgtgactctagaagtgatttaacactgattttgatttaattcataagaagtgccaaataccactgtctttgaatatggcatggcagcatgatttgtattggagtgaatgttaactgttgacatttttaatgttcacatatttgggatgatccttaaatattcatattgtaccttaaaatctaattataggtaaagttaccacaaatctaagttcttcttgaaccctttacttctcctgtccaatttattccctctgtctggaatgcccttacatcctctccctttctctgcctgttgaagtcctttaagacccagctaaagtaacaccatctctaaagacttccagatttcctcattcagaattcatcttttgcttctccataatgctctttctatgtgcattccttttattaagggcccttttaaagtctaatttgtattgaggcatatgactgtatatttctaactggattgcgaactgctataaacaagagacatgttttattaatcactgcaccctccattaggcacagtgcctgatggtacttaaggaaatgcttcttgtttaactgtttgatgaatatcgagttgatatcagatgccctaagtatgattgtaggatctgatagcgatataaacacaaactacatattatccatggaatccttacttggcagtttattagcatatgtaaatcataatggtcaaggtaaattaaagaaatcattgtatgacattttaaaatgttttgttattatttatatgagatgatacactttcagccagtaatattgagtctcattcactcataatgagctctttgaggcacccagaaagcttaactgcactgagttctttcgaattcggttgtcctcccttatctgcagtttccctttctgtggtttcagctacccacagtcaactgcaatctgaaaatgttaaatgtaaaattctagaaaaaaaacattttgtatgttttaaattgtgggttgttctgagaagtgatgaaatctgaagcagtccagctccatcccactgaggataggaatcatctcttcatctggcatatacctactgtgtacactgtctgcacattagccatttagtagccgtctcagtcatcagattgactgtcatggtatcacagtgcttgtgttcaaatgatctttattttatttaataatggccccaaagtgcaagagtggtgatgccggagtgttattataattgttttatgttatgattaattgtttttaatctcttactgtgtccaatttatgaattaaactttatcataggtaggcgggtataggaaaaatgtatatggttcagactgtctgcagttttgggcatccactgggggccttggaattgtccccagtggataaggagagactactctattttgttatatataaaagtatttttagtaagtcttagcaagtaatagctgttaataatgaatgttgcatttcatagcttctgtttttagacattttaaagtggtactcgactgggatttcttttactttttcttttttagagcctattttcaggaagcctgacttctcaataattaagaatatcatgttttattacttacctcttaatatacagaatcactttcattctataaaactctgagtagatttatttttaaaatagctcatatttatataacactgtagagattcagatgcacttttatatgcatcatccaaggtgatcctcaggagaatgctgtgaggtaggctggatttcttctcattttaacagacgaataaacagactgagactctacttacctaaggccacttatgccaggtaagtgaggcaatgggtatagaacccaggaattatgactccagtggtagtcagtattcattctgctactattttgtgctccctctaaggtgcaagatataacctattcatgcaatagatatgccttgtgcactttcatgtgccaaatgctatatgttctaggtatttagggtgcatcagtaaacaaagccaacaaaaaatgaagtccttgttgagattaaatttgtgtttgggagaaaaacaaataagtaaaatgtataatctatttgaagataatgagagcaatggaggaaaatgaatcaggaaagaaggttcaagcatttgtggagggttgcaattgtatgtaggataattagacctcattaaaaaactgttgcttgaacaaagacttaaagaagataaggagcaaggcttatggatatccaagggatatgagcagaggaaataatgactataaaggacctgagagaaaaaagttttcttggcatgtttgaaggacagaatggaagccagttagcctgtactgtggtgagaaaggagtaaacagtgggatataaggtcaaaaggtgtagtcttggaattcactgtaagcgtaagagttaaagaaagagaaaagaaacatgaactgtggctcggcagtaaagacaggtttactttagataaaacctgagacggacttctggccaattttggtcaggagtgctttctcttacagactaagagtatatattggttttagggtgagggggcttaacagaagcttggaatgtttctgtgtgaggaagaagttttacggtggggttggaatgtctctgggaggaggcaagtttatctttgggcagacatctttccggcctgcggggcattatctcaaggctggcatcttcctggctggagggaggttatcttggggccggcatgtcttttgtctgggtggagtttggaatgtttctgtctggagatgttatttgtggtttatggtcatgctgaccttagccatcaggctgatgccctttggatttagacagctttttttttttattaaggtgaactttagaatgaggggcttgtctaagatagcaatgctcctcctctgtcagtaaggactttcatttctgctctgaatgtgataggaagccagtggaggattttgaatagaagagtaatatgatctaacttacagtttaagaggtttgctcttgttttcatcttacatgtcaagaatagattacagaggtgggggtggagatgatgcagaagtgtagaataggagaagagaccagtgaaaagtcttgcaacaacccaagcattgggaattgcatgagttagctagggctgccataacaaagcaccaaaacaaacagcaatttatcgactcacaaatctagagccttaaagcctgaaatcaagacttcagcagggccatagtctctctgacagctctagagaagaatccttccttgtctcttttagcttctgttgtttgttggcaatcttttgagttcctgggctggtagagggatcactccagccacctggctatttccccactatgtgtcttcatgtcatcttcccactgttcctatctgtctctttttataaaggacatcagtcatattggattagggtccatcctaataaccatttttttgtaaactcaattaaccctgtaaagaccttacctccaaatgaagtgacattgaagatgctgggtatcaggacttcaacgtatctttgttggaggacacaatttggaggacactgttatggaggattcataacagtggcattggccagagtggtatcggtgagaagtggatggattgtggatgtattttgaaggtggagtaccgcctattataaattccaataagtactagatatgattatttttgttgttaaaattattatcctgatcccagtagtagcagtacttatctgaatgataacaagcccatgtttgcttaggtattgtgtgaagaagacagtaacagtgaaattgaagaatctcaggcatctaatccatatgttcagttcaaggggtttctagggtatctcacatgttcctgaatagccttgccttgctgttccccactgcctgctttgccctataaccagggctactatcactcttgagcccaagtgagtcccttcctgatgacagctacagcttcagcattcttgtcacccccttatatcatcaacattggtttgattatatctactcttccttttgactcttgtgctacaaaatcctcctcccactttcaaactgaatatcattaagctttatttcctgcaagaactctgatagggtgtcaggtataaggattgtacatcagctctaacacatggagacagatatgacatcttcctccattttaaggcatatatatctaggcttgcctgctccaaggacttgtctgcacttgtcttgacttcaaatgagtacatagtgcaagactttactggcactgtcctataatatatcagaatacgaattttttcatggatttttgaaatgtttcaacgtatatatttctaaatgatgacattgaggttaaagcataacaagggtttattattaataataattacttttaattataaaaattgatgttaagttttggctatgattcaagttactgtgctatgcagttgtgaaaaaaggaccaagtcacgttccctgccttagagcacttaaagtttggtgaggaggagagagatgctaataggtaatttcaatataaaattttaaattctttgagagattatatggtgttctaggagcccatttgtggacacttatgagcaggaggctagtggagaaggcataatgctagtgtatgtggggattgggtaaataggggcaagaggaggggcttcctggaaagaaatgatggtgctttccctgaaacacttggccaaagtcaaacagcatggtcaaaggtatcttagggagagatgcagacctcaaaaggcatggaggcataaaatattatgactttaactagaaactgtaagtggtttgttatcaatagcacagaaaccataggcatgagagttccagctgctaaaactgaggatagaggtaagggtcagagcagcagtagagcatcccgtgtgccttgaaacagctcaaactagagccattgaaggggtttaagcagtggatagaataggcagattttcattttggaaatttctctctggtggaatgatgacgggtgattttcgatgaatcatcactggaagcagatatgttggggggtggggaagagagaggcgtataggatagcttagacttcagattgaatatattgagccattggccaagagggaaatggaagtcagagcacacagtatgaggataatcattagttaggataatgattttggcacataattatcttggatatgctgactttgaagtgccagtagaatatatagatggttgtgtctaacagatttggatagtgagatctgcaccatgttgggtatgttaaatgtcctgagagtggagaacctcacttgggaaaagaacgtaatgttaaaagagcattgggtcaaggactgaactatggggagcaccagtgtttgaagggatgatagagagcccatgaatgccaataaaggaagcacaagaagatatcatggttgccaagagatttactggaagagtaaagtggccaatagtgtcaaatgcagcggggtgatctccactaagttatggactgtgggccacagagtgtccactggatttgtctatgtgggaatgaattatagtgaccagagagaaagaaaacagttatatgtgggaatagtggcacaaaagctaagttatgtgggttgctgcccaaacagcatgagtaaaagtagtacctatatgtcttcgtttgggctgctgtactaaattgccatatactgggggttgcttaaacaacaaatacatatttctcacagttctagaggctgagaagtctaagatcaaggtaccagcagaacaggtgtctagtgagagcctgtttcctggtttgtgatgactgtcatctcattgtatccttatatggtagagggcagagagagaaagcaatctctctcgtgtctcttcatgatgggacactaatccatcataagggttctaccctcatggactaattcgtcttcaaataccatcacagtgaggattagggtttcaacatgtgaatttggggggaagaggacatattcagttcatatcactatattatataaactattatttcaagataattgtatcagactgggacccagcaggaaagaagcagcagattctgcttgggtaatctgggcttggctaaaaaacaggcttacttacaaagtatggacagtccttatggttttcctatgtaagtaatagtaaactatgcatgggctaattatagcacaccactatcatttattatcctaaagagatgagaagagagagagaaggagggggacaagaagaaggagagagagagatgagagagaatagaagagaggaggggaggcaacgagaaagagagagagacagaaagagagaaactgtatcaagaccgtatcaagagggttgcctgacaggagctgtgatccttaacaaggaaattgttagcccatggagacatctctaggaggagctgggataataaagaccctggtcttcactttcctttctaccttatattttcttctagtgcttcccattggtcacacgcaactgaaaacaaagcaataagtaagcccatcaaaatagtcatacaggctaagattgcagggcacagggctaggtagggaagggtggggagtagctctggatagggtaaatatattcagcacaaaatcatttcggatagagaagaggatattagttaaagtggctgcaaatttaaaggaaacaattgagttttgacttttgtgagttttttttttttcctttatcaggatgggagagaggagctaaaagccgaggtaagtgataccaataaaaaggaagttaaagctactttatgatataaggatataactgatgcagaaaagtcttgacagattcagacaatcagataaggagccacagtaaaatgattggctttaaacagaaggaagaaaattttatttcctccaagggaaaggaaagagaaaaagaagcacggttgtgttcattctataggtggagaggggaacagatgggagaggcaagaaattgagagagctgattgctttgccccagttttcctgatacagaaggcataaacgtgatatgccttctgctgatagtaagaggtggggatctgtgtggattttgaagagagttttgactaattgatacagtcactgaaggatgcaaaagaaggagttggccaagaacaagaaaattttatgggaagccctatggccaagaacaagaaaattttatgggaagccctattgatggctagagtttctacacgatcacatgtgcccttgtgtgtggctgaggaattttctcattcagtggtgtgtgctcaacagcctgaatgtgtaactcaagaaggccagttgaagggataatttagcatcagagttttgttagattagttcagtggtagggcagaaccaaagggaaggaggccattggtgatcattcctcaaaatccattttaaacagctgagatcattttattttcctcttattcttttgggggctatttttaaaaaatatatttgcaacgcatctaaacctgtggcaatggtggcattcttagaactatttcataaagttcaggtaacaaaattcctacaagtattataattagcattttcattcttagtacaacaaatatcttctgaagattaaagcaaatattgcaaaaggcagatgaattcaggtgaggttcaaattttagtagaaaattgtagtatgtttatatacctatattccaggtgtaaaccatcaacagtttgctatatccatgcagcatagagttaactaattaatgttgtatttcaaaaggaagagaactacactgaacttcagtgacattttcccttcatttcttccccatcaatgtgattagtatttttttaatttttaatttaattttatttatttattttttaatttattattattattattttttagacggagtctccctctgttgcccaggctggagtgcagtggcgcgatcttggctcactgcaacctctgcctcccaggttcaagagattctccagcttcagcctcccaagtagctgggattataggcacccaccaccatgcccagctaatttttgcatttttagtagagatggggtttcaccatattggccaggctggtcttgaactcctgacctcaagtgatcctcctgcctcagcctcccaaagtgcagggattacaggtgtaagccactgcacctggtctgtgattagtattttttaaagtagccaattataattttcaatatcctacaaatgctattttttacaaataaaataaattcagtggaaaatagtcttgttagaaaggagttctacatgctatagctaccaccttccatctatactaagtgtttggaatgtagttaaatacaacccagttgtaaattattcctttgtggttttactctaccagcttttgatatatgtgtctttgcatgggagataaactttgcccaccagtaagatagattttaattctacataatatcatcccattagaaatgaagatttctgtcagtctattatgttatcagatacatttaacaaataaacactcccctgttgttgttcttgatagatgaggaaagaggtttcttgcttctgctaatatcaaacaagataaaagaatctggagagatatctcttttcatatagtgaagagtaacagaaggaaactaaagaagaggaatgtgagtcatgcaaattgattagtatgttattgattgtagtaattgatccatggtgggccttactgctgtaaaattattgattttgttctctttcaaccatttccttcatagctatccaaggaggtaggataataatatctacagaaatctctactttctaaggcaatgcttgaaattaaataaatatgctgtagcagctactttattttggctttagtaaaataaggattagaagataatactttatccacgtttcttgtccttacatataatccattaaatcctaaaactgtattttcatttttaaatataaaaggaagtgcctagagtaactatgtattcttgcacaatctggaagcaaagacctggtttgtatgccaagaagtgtagattattttaattttatttttcacttcaattttataaaaaagtttatatgacaataagactaagtcaaactgaaaattcacagaaaattcatcaggtttgtttttaaaaagaaatgaccactactaaaatcaacctatccccaaatttaagtattgtaacacggtaacattataattcttatttatataacaattcaaagcaagtgtttggtggacagcctttcattgtgtgattcagggacccagggcctctcttctgctgacttctttgtcccctagatgtactggtgcttcacttctagctgacagcaaaagagtgggttttgcagaaaatttgtagtaggctagacctggacatgtcacattatttctgctcatgttcccttagctagagctcagccatgtggcaattcctgtctctaagggaggcaaggaaatgtcatctagcattgtgcaaaggaagaagaggaaatagtttggggatcttagtcatctctgccatagagattgactctatggcttatccttcttacacctagaactcagagtagacaatagcaagtctcatccaggcacagtatctcattcaaagtccaggatctccagacaacatgcagttctgttgctcaggtctggaaactcaatagttgttttgagacatgttaaaattgagatccctactggctatttaagtggagatgttgagtaagtcgctaaatatatgtagtgttcatatgtcctcctttgcccaggacagtgctgatttatgtctgtagtcctggaataattatgaatagcaccttcatctctaaaatgtattaagtttagatgatacattatatggatataagaatctggagtttagagaagagactgtaactatattaaaaagtgttattaatcaagctatagctgttatttaaagtgatgaaacctcaggtactctgacagttagaatcaggaagaggaagaagatccagataaggtgactgaggctggtcactgaccaaggactagcatatgagctaggagagtgtgggggttacatagccttgggaaaaagaaaacatagtgaatgcactcatggaactcactgttttttgggaaaaattgaaattttaaaaagtaaattaaaaattatctttctagattaacttttcatctcttagtctcgagaacacttgacttcaagtacatattatagaacagctcaaggttctttaaatgccccatgctcttagtcttctacacctgtctactaactgtgtctctctgccccgttccttctaggctttatccttttgatgaattcctactatattaataactaatactgacaaagagaatgcatttcatgtatcagttacacttcaaagttcttcagatccagcaaccatcatataaggcccagttagtatccccttttaaaaatgaagaaaatgaggcacaaaaaggttaaataacttctccagaatcacatatctaatgaatatatgaatgacgatttgaatgtcaatcagcatgacagcagagcttatgctcttaccaaagcatttcacgtggcttagtaattataaactaataaaaatattggttagatattatattttagctttaaaccttgaaatgtacatttagttaccaatgttttgagccattaataatctttcttataaaaacaataccagaacatagcctctgaggtttccaattttggtttcttttctttttctcatttttttttttttttctttgagacagaatcttgctctgtctcccaggctggagtgcagtggtgtgatcttggctcactgcaacctctgcctcccgagttcaagcgattctcctgcctcagcctcacaagtagctgggattacagacacctgccaccacgcccagctattttttttttttgtagtttaatagagatagggtttcgccgtgatggccaggctggtcttgaactcctgacctcagatgatctgcccgcctcagcctcctaaggtgtgggattaacaggagtgagccaccacaccccaccagctttggtttctttaaagtggagcaagaaactctgctgatagacatacatataactgactattgataagcatacaattcagctgctggaagtagaggttcacaggctgactgctctggagtatctcgtgtgctatgcatatcagtcagtgcattttgcaaggagaatggaaaatcatggtcaagctagtcatgttgattaagtggaagtcagctaaagagcgtttagtctgtttagtactttttgcattcacctacttctggatttacacagtatgttaaaattacctgcttataagtctcctgctttttttttttttttttaccagactgtaagcagtgtcgttattttattcatcttggtattctcagcacccacagccctgcatgtgattaggggctcctataaatgtttgatgaattataatacactgaattaatatagttacatgcttatgagagggcctgcttccactaaactgagaatatttggggatgggacaaacacttattatttaagtaaacttcttatgaaaatatacctcatatatagaaatgtctacaaatcataagtgtactatttgatgcattttcacaaactgaacacatacatgtactcagcatctagctcaagaaacagaacaggaaacatgtcagaagcttattccctgctctgttgcattcactacacactcctatgcaagctttacctactcaattttttcttttttttttgagacagagtctcactctgttgcccatgctggagtgcagtggcgtgatctcggctcactgtcacccccacgtcccaggttcaagtgattctcctgcctcagcttcccaagtagctgggatggcaggcatgtgccaccatgtccagctaatttttgtatttttagtagagacggggttttaccacgctggccagactggtctcaaactcctgacctcaagtgatccacccacctcagcctcccaaagcactgggattataggcacaagccactctgcctgcccctactcacttttaacactttagatccattttgcctcttttttatatttttagaattatctgaatagaatcatataataggtattcatttgtatctggcacctttcactcaatgttattttgcagccattattcactgttgtctatagttgtggttcaacaattttcattgtagagttttgtaccaactgaatacacttcaatgtatgtatttattctacccttgataaacacttttatttccaattcagggctattataaacagtgttgctgcctacctccttgtacatgcctttttatctacatgtgtacaaccttttctggaaggagtacctaagagtaaaattgctgaatctatagtgtgtctatcttcagctttagtagatactcatcaagcagttttccaaatggttctatgaatttgcattcccccataagattacaagagttccgtttttctatttttttttttcattttagccatcctgatgagtgtgtaggggtaatacattgtggttttaaattgtactcttttgatgcctaattaagatgaacactgtcccatatatttaatggctatttgcatgacttcttgtggtaaaatgctcattttctattggaattatctttgttcttaataatttgtaacaattttttatagattctggatatgagtttttatcgggtatatgcattgcatttatctcctttcactcttccttgccttttgattatcctcttggtgtctgtcaaagaaaaaaatctgaattttaatgtaatctgatttattctttttttccctttatggttaccacttttgtgtgatgtttaagaaatcttatcgtatcccaacgttatgaagattttctcctgttttttctttgaaaagctttatgtttttttacgtatcacattacaatctgcagtctatttagagttgatttagttatacggtgtgaggtaaaggtcaagatacatctattttgacatggatgttccatttatccggtacttatatttaaatgatcattgtttcccctgtgtactgcagtattatcttcatcataattcagtgtccaaatatgtgtgagtcaatttctagacactgtattctgttcatttacttattgtctattcttgtgctaatatcacactatctcaattactgtcattcttagtagtaaaatatggggcagtataaatcttccagttttttcttcttaatgaatattgctttggctattgtaggccttttgcattttcatataaactgtataactaggttgttaatttctgcaaaaagatcctgcaggattttgatttggattataacaaatacatgaacaaattagagaagagcttttatcttaacaatgatcagtcttccaaaccatagacatgacctatccctgcatttgttatttttgtgttccctgtgcatagtatgtgtctggagttcagctgactctcaaaattgtgaactcttctactgtccctccttccactctgatatcatcaattgactgtgaactctcatactttcccattcttacaccatgctgtcctcaactagaaatactcaattgtctcttcagagattatctttccttcagggtcacaactccctggagtttcaactgggccaaaggaaactgtgctttagaaaatggcaaaaactcttctcacactacccaaagataataggagactacctctaattacagaaatatatggaatttgaggttcttccacccaaaagtaacacaactaaagataagtagaatatgacagtgggagatctattttgactgtataaagacatgttctttctttctttttaaatttcaatcgctttgggagtacaagtggctttgagttacgtggataaattgtatagtggtgaaatttgggcttttaagacatttttgaatagaataaatcacagatacatatgtgttttttaaacgttggatttggtaacaattatataaagatctttaggaagatttcagtgaaattatatattctaatgtgttagaatattatttttcatgcctcaataatgcacagagctcaaatctctttaaccagactttccaatgatgacagctcaaggtgtacttcgtagggcctctgccggctttgctgtgtgtttgcatgctggtgggcaaatgcactggcagatgtcagtcacttaaacaggctcttttttgtttcaaattctaagtttcaattcttggcaattgcaacactacagaaacaggcagtgtggcttctaatacttgtcctttgacttaaataattaaagttcaacactacagcaacaaagttattagctagtacttgactctagacactacaggtcaattactggccagcaatgtttagaagcacaaaccttggtaattagcagcaaatttcatcttctctcagcacagtatgtgagcatgccaccagaataagcagaattaaaacacaaataaaagcagctcatgtatcctagatttataattgctactaaggaccatagaaatttcagcagagttgggtgcaaggaaattttgacacctggaaaatggggcaagtatgttatcttttagcaagaagttaccttaggaataatttaaggagtataaaatagattatatatatctttttcttttgaagcttcaggtactgacctcttgtgttgttgtatattcaaagatagatagagctgaaaagaagcaagttcagccccatcttttaatcactatttaaataaagaatagtgatcacatagctagttagaatcctggctagtactggaacgccaatcatcaaataacctatcattgatctttacattagatactctaaacatcaaatctccggcaaaggaagttatcaaattgggggtggtactaataaccagtgctatttctaatagacttttactaaataaaacataaattagtatacatggcacattactttctgatctgtgaaaggcgaggaaatactgtctcctctggattatctaaatgtattgaacaatcaaattcttgagttggaatggggtggaaatgatccaaataggcagggcaaagccacttgcatgtctgattttcttctatggaaagttagaaaatctagatggcaaataaaaggctaccgtaccagaatttgattattttgcaaccaacaaatacttagagaccccattctcaattttggacctgggtgaacacatgctcattcaattcaaaataagcagttgatatctgttttacatggaatagctacactattctgataaaataaagaatgatttaccttaagtagatttttctgtacacctgatgcttagaaggtcaaagtggcttggccaaatttattcaggtacccaaacacttgcctcttggatctcagggaattctttatttttaaaaactttcaccccacacttttcatccagaaataacataccccatgagggatgtgaagagtggggtcagaaaccagaaaaagtgagttctaggtcaaactgtgaatgaatgtctatacatccaagtggctaatcactttgactctctgagtttctgctatcaaataccacaatattacaaacactaaacccccaaaatatgttattttatgtaaatttgatttagctgtgaaaaattgaaattgtaatgtatcatctattctacatatacatttctaagtctttccagaagataatacttaatagaagataattcttaataatagagaaagattatttacctactcagcctgttttttgtaacagtgaagaatttatgcatgtgtgtgatattaagtgaaaattacattattcttttagaaagcaaatgtaaaaattgacaactatttaaatacacatgctggacttgtctttataaatacaagctgtagaaaatttcttttatggtaaaaaaaaaaatctttaaagatattgtatctaccctaggttggtaattgttccccctgagtcacagccattatcttccaaggcgagagctaaagccccctgtgagatgtgtttctggggacaatggaatagtctcaaatgagatcagtagggtagtgtatttgaaagtgcattacaagctacaaaacaaaattgtacatagcattagcagtgtcgatataaaatagtggaaggaacactggagttggcagtaggaaacgggtttcagtcagagctcggctgtttactagctggtgagcttaggcaagtcatataacttctctgagcctcaactgtcaaatggaaataataataattgccctgactgatgtacagagttgcaaggggaaaatgaggtaacatggaagagctttataaagtgtattacgtttgccaatgtcaaatgatgttatttttcacatacataccgaagagtcccagtatatattaatatgtatgtatttactttctgcatgttaaacttccagcatatggagtcataactttagtgattcatgagtaagtgattcaacctctttaatcatttaatttcctttactccaggccagttacaaaaatttagttcaagtattcttaaatcagagtagcctagtccttaagtccaatgaaccttggttagaaaccctgctttgtcactcttcactgtgtagacttggggaagatttttaaatctccctaagcctcaggttttttttcatctttataatggattattatgaaaattaactgagacagtgatccatttgtagtatttagtataactcccctaatcctgggaattttattttaatgttcccaagatgaaaacatgtgagaacaatctgtattgtaactggaataattatgtttcaaagacaatgtggtctaatggttcatttaatggcctcaggcaagtactgggtgctgtattcttacattcccagcagaacatgagggtgagggtttttctttatcattttgttcaaatgagcttagatgtgctacaaattcaatgctaagaacttagaattaaaatgatgatattcttctgaatatttttccaaattttcaaatgctaatgattaggtggcaattccagtgctactgggcattgacttaaattggttccagtagtgggctttctcgccatttattctaaaatatgtgatattgacttagcaggagtagaaacaggtaaggaaattaatatttgagacttggaaagatgaagacaagtattatttaataacaaaacatttggtatattttctacctgtgattgccttccagtgctatagctctattggaaaagggtggaaaacaatattagtaatgtttgggttgtggctagttatgtttaacatggcactaaatgaaagaggtgatgccagattagtgttggctggcttgtatgtagatatggaaatgaaattagactaggtaggagggaaataaaaataaaattaaaatccattgtattaaaaaaaatctgttaagaatcagtttgggggcaaagatgagattaggaatctgacctttccaccaagcctgaacccttcaatacagttgccaatctatttgccatagaaagagagagagagagagagagagcgagtgagtgagagagagagagaaagaaacatgatgtcaagaaagcaaaagattaaatcagaccagagaattatatctaggaaagtacttcttgtgaagttcccagaacatggaattgactgtaaatagatcagaagcttactaaagtttttgagaaaattacattgccaaagaaaccacaagtttgatctttaaaaatcttttttctatgagcccaaaagcaaactttgggtcctcaaatttgcacaggcaggaagtagctgaggaagccctacagtcctaaaataggacaaattctccaatacccatatcagatctcactatagagaaatacggacaaagaaggacctccaagaacatagaatcaggagacacagagaacaatggatgaaagagcttatccctgatagctgactaagagaataataaaggaatttattccactgccagggcagagggaacctcagaatgcctgcctggtagatttcatcactgctatagaccagtccgcagtcatcactcttcgccatttttatgggagtgtttagtcagttatcctatcgcttcttcacttttgcatactgtgcatgtgtgtatataggtatacagtgtgtgtgtgtgcgtgcacgcgcatctgtaatggtgtggataacttgtctttctagtttataggccaccattccaggtaccatcttggaaaatggcactaccatttgtccttcggcttagactaaaaagagtgttgttgttgttgtttttcctctgggattattcatccagcacatccacaaacctgtcagttttactgaccaaataaatctgaagctgcttctcactccctccatttctatctccctaatctaagttaacataatatctcacctgaactactcaaaaagtctctttttttcttttttgagacagagtctcgctgtgtcacccaggatggagtgcagtggcgcgatctcagctcagtgcaggctccgcctcccgggttcacgccattctcctgcctcagcctcccgagtagctgggacttacaggtgtccgccaccatgcctggctaatttttttgttgttgttagtagagacggggtcaaaaagtctcttaattagtatctcttcttctatccttccaacctttcaatgtgtgagtggaagtgagattatgtgagtcctctgctccaaatttcccatgacttcccctcccctcacaggtaaaatctgaagtccctggccacctcttccacgtcctctccagcattctcctcctgtttactaaaggctacccactatatcttccttaatgtgcttgaaacatacaaagcattttcccaccttaagatttcccctctctgagccctctccagggcccacttcttcattcatgaatatctcgctcaaatatcacctccccatagatactcaaccactctgccattccctatgtccttatactttatttttctttgtagcccccttcaccgtcagacatcatataaaatatctcaggatttttgctttgtttacagatatattcctaactccaaaacagagcttggaacatggtagatgtttaacacatatccgtaatgtaaatatcttgtatgtgctgcatctcagcacttaataagaggcacgttaaagtgaactaaatatggcctgagaaggattctgtacttctgtatttgagtccttgtggatgaactgtaacgtagcttaataggtagacaagattgaaaacctgatttaggagtatgtgcctgtaacaatagctaagtcttggccaatcccagcgccgtacttcaaccgttcatatgctgctgagtcttcaaactgttcaagtaagggaaacactgagctgtaaccaatctagccattctgtacctcacttccaaattctgtacatcttttcctttttttgtctacaaatcttctttcgccgtgtggctgcgctggagtggttgtgaatccgctgtgattctgggggctgcccaattcacgaatcgttcattgctcaattaaactcctttcaatttaattcggctgaagtttttcttttatcaggcataaagtaagtgctattggggtatagcataggatggaccaactctgactgacaggctagtgaaagcttcctagctggcttcatgggtgtgcaacctgtgcagatatgcagggccatgcacttggaaagatcctgcttttggtgtaatgttctgtttttgccatcttgaaattcttcataattttgaacaaggagacctgtattttttattgaagtatagttcccattccatacaattcacaatattttaagtatacaatttagcattttttagtgtattcacaaagttgggcaaccatccccattatctaattctagaacattttcatcatccccagaagaaacccacaaacatttgtggtcattccactttctcactttcccttatgcctagcagccatttatatactctctgattctaagtttgccatttcaagacattgcatgtaagtgaaatcatttaagatgtggcccctttagtcaggttcctctcacttagcatgatgttttccaggtttctctacattgcattatgtgtctatactgtatttctttttgcggctgaatagtatttcattgtatggatacactacatttttgtcaattcatcaattaatgaatatgtgggttgtttctactttttggctatcataaatgatgctgctgtgagcattcatgtacaagtttttgtgtgactatatgttttcaattctcttggctatataggagtagaattgctgggtcatatggctactctatgatttactttttgagacactgccaagctgttttccacagaagctatgccattttacattccttccagcaatgtgtgagggttccagtttctccacatccttccgacacttgttattttctgtgttttttactacagccatcctagaggatgtgaaatgatagcttattgtagttttaatttgcatttctccaatgactaatgatgagtatcttttcatatgcctattggccatttatagatcttctttcaataaatgtctattcaaattttttgatgattttaaaattatttttcttttgtgtttttatttctgagttataatagctctttatatattctggatactaaacctatatcagatatattattattattatattttaaattcgggggtagatatgcaggtttgttgcatggatatgtcgtgtgatgctgaggttggggcttctattgaacccatcacccaaatagtgaacagagtacccaatattgggtagtgaaaaaccacacaataattaattttttaacccttgcccccttgcctcccttctctcttttagagtccccagtgtctgttgttcctgtctttacatctgtgtgtacccaatgtttagctcctacttgtaagtgagaccatgcagcatttgattttctgtttctgtgttaatttaggataatggcttctagctgcctccatattgctgcacaggacatgactgcattcatttttgtggctgcatagtattccgtggtgtataccacctttactttatgcaaccagatatattatttgcaaacattttctctaattctgtgagttgccttttcactttgatagtgtcctttgaagtacaagcatttttaattttgatgaagtccaatgaatttatttgttctttgctgccttgagatttacgtacctatctacgaaaccattgtctaattcagggtcactaaaatttacacctttgctttcttctaagaactttaaagttttagctcttgcagttaggtcttttatccattataagtttaattttgtatatagtgttaggcagatatccacattcatttcttgtttgtgtatatgcagttgtttcagtatcattttttcaaaagattattcttctttaagacatcattgaattgctttgacaaccttgtcaaaaaccggttgaccatagatgcataggtttatttcaggactctcagttgtattccactgatatttatgtctattcttatgccagtaccaaatcctttaattactgtagttttgttataaattttaaaagtgttaagtgtaagtcctccaactttgttctctttttccaatattgtttcaactattctgggtcccttgcattttcatctaaaatttagagtcagtttatcaatttctgaaaaatgggctgttgaaattttgatgaaaattgtatcaaaactatagattaacttgggtagtattgccatgttagcaatattgttttctaatatgtaaacatgagatctttccatttatttaggttttctttaatatatgtctatgttttgtagtttttctatgtgcaactcctacacttcttcttttgataaatttattccttttattctccttgaagctattgtcaataacattattttcttaatttcattttcagatggttcatggctagtgcatagaaatacaacagatttttatattgaatgtgtatactgcatccttgctgaactcctttatccattctagcaggtttttcatgtatttcttaagattttctatatgcatgatcatgtcatctctaaatagaggagttttaattcttcctttctattctggatatcttttattttattttcttgacaatttccttggctagaaccccccaatacaatgttaagtagaagtgatgggatcatacctgcgcctctctttgctgatattagggggaaagcttctagtattttactataaagtatgatgttagaggccctgactttttaatcttgcatcgggctctgaaaattatgtagctagaactaccttataaagaaggacacagttgagctgagtatcacaggacaagtaggagttctccagtgggtgaggaggaagaaggggaacagtatatgcaaatatcatgaatacatgctcgaactcaaagtgactcagtgtggcaggtgtgtggaggccaagtgaggagtgaaggaagcagaggttagagaagtaggtagggctggaccactgctggattgctgacttcttactaaggagtttggattttattctgtaatttttagactagtatactattatattttatattcaacatcaaagagtagaatgaagaaaaacgagactaaaaattgaggcaaggagagcaattcatgggctactgcaatgtttgatacagtgaatcaaaaccttgtcagattaaccttggaatagctgtattcttgctcttgaagactttgctttccttctatatttttttaaatgaaaaatttgtacaaataaaaacataggtattgagcaccatatttcaaagttaggctagcattgataaagtttacaatgttttgttcattgtgaaaaacatattttcatgtttatgatagcctgaagaattgagataaatgatcttttacacggtaaagaaaatgacgcttagaacatttcattagttatttcagtaactgtattagtaatcctagaatcttttgcatttgcatcatactaatccttcttacattaggcatcacctgccacattagcaaaaccaaaagatattccttccctatccctcctttcctccctccctcagtccctccctcccttcctccctttctgccttcctctctttttcctctctacccattttccttccttcctttttctttacatttacttaattaattaattcttcaaaaattttaggacctaagagactggactagatctataacacattttgtgccctcggagagcttacagattgatgagtggctgaagtaaacaaggctgccacatctcaaaacagagtatcatgcatcattgttaccctaagcacatctaaatttgtagaatggtcatttgcgacagccccatcactgtggccttcactgagagtttacagcctctgatatatacatggtagcattgaataaataatgctttgttgtattagttcacgttgtcatggattggagggctagagttagaattcgtgactaagatgatggaagcagtaagaagaaccaaagaatcaaaccaactaaatcccaggagagtcagatgaaccagagctactcactgcttgatcacatatagctataaattcctagtcgattcacagatctagaaagtgatgagccatttgagagaaaacacctctctcttttcctcaaattatgtaacactgaatccatgacattaaacaaatgattctaaccttttttttcttgcctttattggatttcaaagttcagtacacattcaaattattcaattttgatatcacttttatgatcaaatgtcctacttttgaaatggaaagctcagttggccatgttccctgttaagtttaagaagcttttatcacttaaataaattaaaccttccagcatggattctgcagaacataatgaagcacagaggaaaaaaagcttaaatgaaataaacctctttgctgatagaaacagtacaggttattgtgcattctaccaataaatgtgtagctggaaccgtagcctgatttctggtttttaaattttgtccttaatttttatagtgttcagcagcaatctgatttgccattggacaaaagatggacacaatgtacatgaagtaaaaagggtctaggtttttaatactgagaataaaaccaaatactaggtttttaaaagctgatttcttttaatactacattgataagtaaggatatatatttttcacaccatttaattcatacaagttgaactcttatgaactcaaatcctttaacactttctataataatttcttcatggtttaaaaaaatgcttgttttctagagaaaaatgatcatctatataataattgggtaaaattaagctatataaattacatattgaattagcaggagacattttactttttgagttacaatttgccagttgcccatgaaagattcaattggattatgaaaaatcttactgtttatagattctttcaatggccaaagtgttgggtgcaatttttaaaatgtaaataaaaacacaccattttaaagagtttaactaaataaaattcatcaatgtttccactatgttaagttgaaccattttactatatgcatgttaaaaataaagctaaaggtaaaaagcccttctttttaaaatttttatttattattatttttgagacccaggctgacatgcaatggcatgatcttagcttactggaacctcagattcctgagctcaggtgatcctcctgcctcagcctcccaagtagctaggaccacgggcatgcaccaccatgcatatctatttttttttttaaattttattgtagagatagggtctccctgtgttacccagggtggtctcaaacttctgggctcaagtgatcctcccactttggcctcccaaagggctgggattacaggcatgaaccaccatgcccagccaaaaggcccttcttaaaaggaaacattcagtagaattaatttgagaatactcataatggtaatgtataataattaccatggaaatatagctttcttggtaataaatattcagtgtcactcaaaattggagcttaggtcataaagctgtctctaaaactgtaaggacttgtagagagggcctaattacatttagtgtttttgaaatacagtgagttacttatattaggcatccctgatgttttatctttttatttgttatatttgtacattcttttaaacttaaaataaaacaaagaactatcatactttgcgtacaagatatggatcagctggtggtagcaccttgtgaattagtgtttaaagtccataagcatgattaaatcaccttttcattttcatttgtttttaatgaagctttccatttcaaaatcagtgcctatactctcttaccttgcagtaggaaagaaaattttgttttctcataagctagaaaatgagcttctagtggatattattgcatccttgcaatgaaatcaaagcaggttctgattcaagacctttcaatgactgatttgtgggtcaaagatttgaacctgagtctacccagtatgcatttgctcagtagttgggtaggttctaggaatgccagaaggcaaatgatatagctcctgcttccaaatgaggagtagacattaatgatcaataataataataatatacagatagcactgattctttgtttagacagtggaacatagtgaaggaactataaagtgccctgcttatttgtaacattttccattcctagacgcaccacgtcatacatttgctgaatgtatgaaaaggttattgaactaatgcataacatttgtttattacaaatgttacaaatgttacagacactagagatatagcagttagcaaagcagacagaaatccctattctcgtaaacaaatgatttaggtgtaagtggaatcaaggttgatgtcagagtccagggaaagtcacattctttgaccctccctgctccctgccttccataaaggtagtgtatttaatatatgtagaagaaagttaaaaacaaaacaaaacaaaaacacaaggtgtccttgaaggggaccggaagctgcaaaatggtagcatgtgtttaagcctactggctctgctttggagagtaaggagagtctagagactgcctcgcacaaagctctttcaaggtctaggctaccgctttcccagcaagtatacagcttcaattgtgttcaattcactgctttcagggatggttctccatggcaaacgctctgtgaagggtgacctgctgggtgtgaaactgctgcacgacttcctacttcacccattcatctatccgagttttcacggagtccaggagaaagtataaaagttaccttgaggagcaggagagtggaatggttaagactgtttggaatctgaccccttggatttgcatcctggacacacagttgtgtgacctaagggaaaccacttaaactctttatgcctcaatttgcttctctgtgataaaagaataatatgacctgtgtcctacagtagagaataataggtcctagctcgtaaaatgttctcattccatgacacttaaatgagaaaatacgtgtgtggaagtgaccactttgctatatacagatattttattatcattttacaatgccattattttgttccatagtcaaaagtataataaaacaaatgtcaatttgtcttattctaatcctataaagtcaattcaaactagtattttttttaaaaaaaactacctcttaaaaacctggatataataagtagttgaccaaatccaagtgttactgtttgcggttaggtgtcagttccaattgtatagattgggtgataaatcgcctcatgaccccctctttctaaccttcctcctgcacctgcttctcctctcactgggctgcagattgtcagcaggccctgctgctaaggagaaagggggatctacttcaggacctagggcttgtgtctgagatctggagggcctgtagccactcctcagagtgttggcttttgagctagtcatgtccaactgctggctctctttatgtgtggcataattgatggcctgaaagtccctggtggcagatcacctacagggtgcaataacctttcccacctcacacagtgcttttgccttgcctggcttctagcagactgaattcacaaatgagtacgttcagtggcttcctgagctctaggggatcctagccagtacccctctgagctataaaggaagtgaagggcaaggagcaaagaggggaactttggctctctaaagagcatgtttttccgctgtgcattgctggctcctgagattggatgtgtaggtcctgctgttctgcaaacttgatgacaattcaggaccagtcttgttggtcataagtaccctcaaacctcaagggagctatgtttaaaattacttaacttcctatctcccgggcgtaaaaagggggaaaggaacaatgtgcaatactcagaattctgtcatctaatgtagcagagctcgattctttctctttcccagttacttttacatttctcgacagcaaaatacagatccagctctgtctcatttgtcccctagtataggtgagaaatcaagccctgtgccaagaccccctttgctctatgtattttggtatttggagtctttgtttctagctaaatagtagcaattcaaacacttttgtttgttcttggttgggggtgggtggggggcagctggtggtcaaggaagctgggaaagatttattttattgatattttacatggacatgttacagtcttacaacacaaaacaccctgaacttggtaagcacacaataattgcaagcaattattagccattatattcaaagatctaaacaaataaggctcttgcctaaggtgcccacaaattctcagatgtcagtaataccaaatctttcattatagtctctgcatggcaggacatgtagacattacaaaataggaatttccttgtctattatataccaatagggttgccaaatttagcaaacaaaaatacaggactcccaggtaaaattaaaattcgaataaacaaagaatatttgttaaagaatacatatgtccaattcagatttataatgtctgatgtttttagtatgtcccaaatattgcacaggggacctgcattttacctgaccttcctgtgttcctaccacttgtcacactccactgactttgaaacggttccattttcccaaatgtgaaggctgctctcagttaccacatcgagccaacactatgtctatcctaggctaaacaaccaccttaaaaaaataaaaagggtaagtggtgagtgggaagggggatgtggaaaatcattcatattaggcctctcatgtccacccatagaatcaaagtgagtactttttcaaaaaggggctgaaataggaaaatagtatctgcgttcctgtgtctgggtctgtctggttctaaagaatgttcatatcttgaagacttagtacaacctatgtttacttgggaagcataagaattgtgtcaaccctttgaaagacttctaattaaactgctggagctttgatgtcagaatttgagattattattacatattttaaaaagacccaatttcatgtgccactaacaagaaaaaatatgttggcctttacagacagttactgaatttatttcaaaatacaaattagtaccactcgataaactgaatttagtgcatcaatctcattttagaaaatgtactcttacctggaaggggaattcctatctttctggcttttctgttaacggtgaccatcagtagtattggtttttggtgtaaaatcaatgattatatgttactccaggcagctgctgaatattcaaaagatagtaaatggtttcagataggagtattttatgagagttcaaggagagagaaccaacatatgttgagtgtctgttatgggttagagaacacgtgcttcacatgtgtttctactctaaccaacaacctacagagggtgatcaaggtaagttattttccttgagtgataaaattgtctgattctgaaagtgccttatctaatataactcttttttgattttccttacagccttcacctgcagttactttgcttttcaggactctgagcaaaaatctcacacttattaactttacttccaactctgataatatatgtggcaatttcttatatagccaacattttttatttcttctgatggggttatcataagttcttcccattattatcttcaaaatacattttaaataaaatgatgctcatttatttgtggatatctaacccctcacctgtactatgtatttaattttatgtttaaaatgtaaagaatctgggaaattaaagagttcaacctccaacccagtgaacatgtcatatggaaaacatacttctatcttaaccttttagtggtagaacgatcatgagttttcgaggcagtttattcaatagagagcagtttgcaatgaagtctgtgtactaagctggtgttacctcccggaaacttttcctcacaaattctagttctgccttctagggtcgcataaatcaatttaaattctcccctcacccaacccagatgccatttgctaaactgtgtaagttttcagtacatttatagcctggaattcttactatctgatacccaaacagaggataatttttttttttttttttttttttttttgagaaggagtctcgttctgtcgcccaggcgggagtgctgtggcgcgatctccgctcactgcaagctccgccttccgggttcacgccattctcctgcctcagcctcccgagtagctgggactacaggcgcccgccactgcgcccggctaattttttgtatttttagtagagacggggtttcaccgtggtctcgatctcctgacctcgtggtccgcccgcctcggcctcccaaagtgctgggattacaggcgtgagccgccgcgcccggccaacagaggataatattaaaaatggttttgaaacttatttctacacaataaggaaaatcatacaaaagtggcaattcattacagagaaatttaagggataaatatgtatttccttatatatgtatacacatatatacatatacaaatatgtatgtgtgtatgtatgtgtgtatttcctactaacggcaatataaggggaacataaactagaagcaaagtacctctctattcagttgtctcttgagtaattctccctctgatatgtaggggactagaactaagtaagtaagtagccaacatttctatgttgggtttaagccatattgcatccataaatttcataaatgcaattccataaatggtatttaaatttttttttcttgagaaataatcttatcaaatattcaagggttttctttgtaacacaaagcacatacagcatagtattatacaactgttaatccatctgcttttataatcaggctgtgactatctctcccgttccacagatcatctttcgtaagatcagtgatgtgaagaaagaggaggaggagcgcctccggcagaagaatgaggtgaccctcagcattcccgtggaccacccagtcagaaagctcttccagaagttcaagcagcagaaggagctgcggaatcagggctcaacacagggtgaccctgagaggaaccaactccaggtagagagccgctccttacagaatggagcctccatcaccggaaccagcgtggtgactgtgtcacagattactcccattcagacgtctctggcctatgtgaaaaccagtgaatcccttaagcagaacaaccgtgatgccatggaactcaagcccaacggcggtgctgaccaaaaatgtctcaaagtcaacagcccaataagaatgaagaatggaaatggaaaagggtggctgcgactcaagaataatatgggagcccatgaggagaaaaaggaagactggaataatgtcactaaagctgagtcaatggggctattgtctgaggaccccaagagcagtgattcagagaacagtgtgaccaaaaacccactaaggaaaacagattcttgtgacagtggaattacaaaaagtgaccttcgtttggataaggctggggaggcccgaagtccgctagagcacagtcccatccaggctgatgccaagcaccccttttatcccatccccgagcaggccttacagaccacactgcaggaagtcaaacacgaactcaaagaggacatccagctgctcagctgcagaatgactgccctagaaaagcaggtggcagaaattttaaaaatactgtcggaaaaaagcgtaccccaggcctcatctcccaaatcccaaatgccactccaagtacccccccagataccatgtcaggatatttttagtgtctcaaggcctgaatcacctgaatctgacaaagatgaaatccacttttaatatatatacatatatatttgttaatatattaaaacagtatatacatatgtgtgtatatacagtatatacatatatatattttcacttgctttcaagatgatgaccacacatggattttgatatgtaaatattgcatgtccagctggattctggcctgccaaagaagatgatgattaaaaacatagatattgcttgtatattatgcagttgactgcatgcacactttacatttatttataatctctattctataataaaagagtatgatttttgttacccaaggcaatgtaatatttgaagaatcagggtccaacctgccaatgttgccatgacaaatttgatctcaggctgagtatgtatatcgagctatcattttctcactgttctgttaagttaaaagtatagattaatgccaaggaagagttcagtcttttaaactattagtaccatgttatgatctctttccataggatatttttctgtaacttagtgttaggttcttttcccctacaggcagtgtttgctccatttaaatgactgtttagttgcctaagtcagataagagtgtgggatattgaaaacttattgctatgggttttgtgcatgaattacatttttgatcaactatacctctcgttttttaacattatacttagatagtaatcattagctcttatgtaaggaaatccctactccctccttcttggagaacagctgccatcttgtaagctgacattatcaacatcataaatactaaactattaatatagagtatgttattatagaaacactgcaccacagggtataagggccttttgacaattcatgtaagagatgctgaatttccaaagctgataaatgctctaaatttgtatttccaaaacatgttcaagagtgacattgaaaggcttgttagcaaagaaacatacaaaaaaaaaagcatttaagtaatcatatcaaaatgctaactattatggtataaaataaaaaagaatgtaaacagatagataaatttttgtggcatgtatataacttagaaagaatgaaacactggtacggattgttgacacatgaatcctagtgtttgtagtgataacacatgaaatgtggtaaaacaaacaaaccaaccaaccaagaagtagacattaagttgctcgactcagataactgcttttctatcattttattgtggttatagttttttaaagctttttgcacacacttctactgctggacttctgctgagttgattcaataagctattgtggctcaggcaggtccatttgtgaaagggggatactaaagactgaattttagtcttttgaattcaaatcctctttgtagaaagtgcctattatcaagtttttaaaaaaagtcacaaagagttgtcctgtatatagctagtcccttaaatgataaggattgagaataaaatacacattcacttgtaagaacccaggagaacttatttcttttgactaaactgtattttaggaagtcgttcagggaagcatacttttcagtcagtgcatgcacagcatttaatatggggagcaggggagttagtgtttgcatgaagttgaaaaaaatgtgtgagtaatttatatattacgggaccatctgtacatatatgttaacaatatgcaaaagatgatggcaaaatcgaaggagatatcttgatctattatacccatttgtatgagcttttctatctcccagtattcccaaccaaagccactagaactgaaagacatgttatcacattcagacttgagaagtgcaaaacagtgatttataaaaacagttgctattttagaatttctattgaacttcacatgcccacaagatgtgcctctttaatctaggagtctcaaaacatatgagccatgggctccattttcctttctttatgcgtataacttccattaaccataatggaagttttcaggggaacacgtctccatgtaatgctacaatatctacctaccacaaacacaagaaaatgaaataattatggagtaaagaatcagccttgaaattggaattttgttgctttcatggtgaggatgatatctttttcgtgacctctgacatttattgaatttcagggtatttttctatttgtttaagtcaagtttggcttaagcttttaaaggtgaatgtgtggttaaaataagaatctgattatagaagttgttagtttaactttagccagtgcttcaaaactaactattggtgtaaagctataaaagaatgactgtgaacaacatgatgatttgaagttctaattcatggctttgcatattagtggtgcaaatatttactgtgttctgacattgacgtagagtttcacctaatcgacctacaatgttattgttcatatatgtgagaaacataatggttttgaattactccagattgttaggaaggagggaaagtatcaattgtttaattatggtgcagttatcatagtgtcttttcagccatctctgttctctgtgtgcatgatatgaagaggtgctgaatgcaccctgctgttttcagcaggaatgcatgttttcagcaaacattgtatatagagtagtcttttaggttcccagattccacaaatcttagcagttgaatttactcagatttgaatgaagggagaatatttgctttaatacatgcaataatgataaaatcatgttctatgttgcctcaactagcacatagacagtagatgctcttttgaggaccagataactgcatgttttattcctacactgtatagatgctcttggtgcatccagaataaaaattttaatattatatttctaaataatatattaataggagtaaatggatatgtattagaaatccaaacattttccaaagcaatttacacaccttcaatatttttctatgatgttattaataggtaagatcagatgctgtatcctcgacaggtggttgtaacaaaatagcaaaagtcaaattagaatggaaatgtgagtgatgtatcataatggcaggttttatcagtctgtatcaggatattgttgcactaaatgtgatctagcagatggaagagattatgataaaaagcaaataggcacacaaaagccagatgacaataccaaagctatatgaatggtactgaaaatggttcaggcacagtggttgaattgaatgacgtggttgaatacaggcccatgcttcattgttaaaatggaaaatttttatgacactagttgcatcttgcattaagtataggactaaaaatgtcctaagtattttttacaaacaactttatgtatatcagagaaaaaaatggaaaatctggggtttgaaattgctctagaaaaaatgtgtacttctgttgtactcaacactttaataggaaaattagttgtgaccgctaactaaagtaccattatcaaaattaaccttattggagcccaaatgaaaatcacattttcccttctgtttaaggagattttgttcaccctgtgatatctggtccatttgatatcttattttaaatagctaaagtcatttggaattttttttaatattagccttcagagcagtgactgttttgaagtgtgcagtggcagatatttgtgaaattattcatcatatttctaatgaattccactatcttgtataatttttatcttttaagcaattttctatgagtttgttttccaaaattccatgtaggtaatgagaacatttatctagaatgtgcatatcatacatggataactttcaaatatgaatattttataatcatgtgaatgttgtgctataattttttctattaggtgtaaaagtatttctcttctcatcttaatggaaagggggaaaagacaaaaacagtcttttggaaaacaccttaagtcttagtatctgagctttgtcttgtgttctgaatttagctttaccacaaactagaagtgtaattatgggcaagttaacctttcctagtgtaccaaatggtaccatttccccgccaataaataagaaaacaaagataacagctgttgcttccttatatcaacatgctattggtcaatgaaaaaattatctttcttgcaggtgaaaatcacattatgacaagtgatcactttttcattctttcatagaagagtatccacgatgtactctctatcaaaatattcttctagattttagaagagatttcagggattgacggtgatgtgatttttatctaaatattcttttaggttttagaagagatttatctggtcagaggttaatggagagaggcatagtttgctagtggcaggtaagcataaaacttcatacttatgtgggaatttagaactacaaatcaaataaacgtggaaagaatgaagctcctttgacagaagagagagagaagagaaagataggtaaattttgtgatttttcttatttctacttaatcatactgcttggcagaaattctcaattttgtgaaaaaattggtaagtggccaaggtatagagtagttcaccaatgtatctatgtaacaaaactgaatgtgtaccccttaaatttatacaaataaaaactagagtagttcatccttcaactttttatattaaaataatcatgacctgttcaagatatatgattccacatgggcagacactcttataacaaaattcttaactatgtgctatgtgttgtaagttttggcctatattctgacttgagattttctatcacttcatttgtaggataagacccctgtgtttgcattctttatgagggtcaggaccactgaggatttggactgggaactagaaagatgatgaaggcaagggttgagaaaagactgattagaatctatctgcttctttactcttaggcttagaagttaaataagttaactaagcttatatttaccaaggtctcactatgataagcattttatttaggttatcaaatttaattcttgcagcaaccccatgaaggtataggttaaggaacttgtccaggatggcatacttgttacatggtaaagttgagtttctaacacaggcagtcagaccttagggagaaacctttattttgtagaatactgacattacaagaactatctagttcaaccatctagtctaggtttttccagacacatacttttaaagatttcttaaaataattcttaaaaattgcactcgataatgtgaatgtaaatgtttggtttttcttgataggtcagagtcaatgacagagtttgaaatcatactgtcttaagcaaaaggtgccctgtcccaacagtggaattttcctttacttctcctaacagttgaaagacatcggccaaagtaaactgtcaaatgtggtatgtttgatatatggtcactggtatcaacattttcttttccagttgaattttaacctaaagaggtaatgcctaatggttaaggaaagcaagagtcattcaggattttttttctataatttctttttctttttaatagtgggatttggatgagactccagaatttatttttaaaatttattttttgactcattgggttttaagtagattattcagatatttttattgattgcactgatgttggcttcttggccaaaccactattaaatacattatccaaatgaactatttctgtttagaatggcaacttgtatccttatttccaaaattaatgagctcatagtatgtatatttacttcagagagtttcaataattttctctaatgaaaaaatgttaattttctgaatgtgatttatttgttctaccctttgagatttctaaagcaagtgtcttgagataaggagaaaaaaacaagatattacaacactacatgctggaatcttcagcccaaaccatcttgttttcacttggctaataactgagccagaggtaatcatagaaaggaagaatcctacttttaaaataatgactgtgaaggaccccactgacaccatccaaagctttttatagtcagctcacttccatcctggcttttacattaccactgcatgattatttaaatgaggtcatgtcttgtactacttgtaaaggcacttggtcaaagaagagtaaaccaaaaagtgcagcttatgaccagagttataactgaggaaaaaggagtgtggagaagggacagcagttgcttccttttaatgagttttctgtatgtggtgccttttaaatagcttttgtttatttgtttttaagatgacacattgtcattaaggttttaacaaaaacctttggaagcagtttgaaagcttgtcaaatgctggggccttctttagaaataagtgttctcccaccaaccaatgagtttagaacctctggttctgacctacaaacccaatcccctaagcacttggctggttgggctgcattttgatgggaggaaacaaaaagatctgatcactctctctcattcatgcggaatcactgactgttgaatgaccaaagcagtcaaagccaaaatattcaccttgaagcttcaataaaccagattgagtatccataataactaatttaagtaattttatccccattctctgctaaatcatatttcataatataaaatgtaaccacttccctctatccaaagcttttggtcagactctccattgagttagagaaattggactttggcaaaaagcaacataaagattattgttgttcctagaaccattgttgccatggacccctcatttgctcctcaactttttcaaccaaattatagcgggaaagattcctgatgaagccaagactgcaaacaggaagaatacctagctagtaaactatgcaaaatcacaacaaagattcatttataattccatgttacagtgtttgatagtcctaagtatttaatattggtatattatgtcacagccatgaactgtcaacttacacaaaatccaaacgcactttcatttaaaatcaagattagcctatttcattttcaggaaaaaacagttgtcagaattgcttttttgacctctgcagggatgttttcacattgctattcttatgaccctttatcagagagggaataagtgtagtgttcactttcatctccttagggttgactgcaccagcatcttccatcaagcagtcgccttccaccttagaacctgttcacagttaataaagcaagggggaatatgcatttcatattaggaacagatttcttaagtgattgttatgaaaagtggaaaccagtttagaaccatttttttaccctaaaacatccattgtagtttgttgaaagagcaatgacttttagaagtgcttggtactcaaacaacacaaaatgtgcagattcacgatatattgaaaattatagagttctttttagtctatgttctagtgactttgtttacactagttgtggcattttgtatactacaatgtaaattctactataacactaatgttactatgggaattaattttgcaacttcttaaatgtttttgtcactgcaaccatattggtgagatattgggggtattaaaaatgcctctgcctttaagggttaattcaccagaaataattgattcatgcattgacaaaggaaacaatgcaaaaatttcatgtgggatgtttttaataccattatgctaagcagtacttgttggcttttttcaaaatctgattcatgctaagcagatccttttttctacttaaacaaagatactgcaatgtataatatagaaattttgtatgtactgttgacctatcacctgactgctgacaggatgtgtgaaaatattttaactttgtgactttagggtcaattatgaaacaattgtgatcaaaattcagttgcttctgggaagtttgtggtgattatcactttatttaacgtttgttctcaaaaaatggtcattttgaaaagtgaattggcaggtggaagcttttagcccaaaagaaatctgggtttcagcacaataaactgtatttcatcagggaggactaactttgctttttttcacactttatttaaatgtggatattttttcatgatacagaataaaatgtgcattttatggaattaatttgaattgggtctttgttggaaattgctattttgaatttagttaaataagtgaaaagctccccaatattaaaacacaacgcaataggtttagaggaaacagtcttttgatatattagaattccaatgttttcttaaactttcataatatttttcctctgataaattgtatcattatggtataaatgataaagtagtattatatcagaaattaaaagtttaagctccaggagtaaatttggttgaattagaatatttctctgtaccttgaaagatagagataatgagcatatctgaataggaatttggagaaatccttattttaaaatgggattaaaaaatatttctctatcaatatttctaaaattctattaatatcataacattattaatttattccaagcagtgaaatttagaggcttaaagggcagaatgtacatggaataaaagtatactttttctcatgttttgaaaaaaattataaatggctttgccaaattcctattgaaaaacaagagctgaatatgtaacataggatgtctgccacacgagaactgcagatttttcttctaactaaaaaacaagtttgaggaacacttttttggcacatcactgaaaaattattcatacctatggctacgtaaaattacatgttgattacagaaccaccaaataaagcttcgtctttgctatggctgtattagaatataagttagagcattctagagttagctttcaattatataggaatcaaggacatgatgatcacagataacaaaatgaattgtcaaaatgaagtgaaactttctacacaaatgaacagtaattaatgctttctccattttttgttgattttcctcctcttttttttcttctttccttactcacacatgcacatgcacacacagtcaacaataaattgcaacctttccttctaagttccatggtaataattaagaaagataccaatttttggctgggtgaggtggctcacgcccgtaatcccaacactttggaaggccaaggcgggtggatcacccaaggtcaggagtttgagaccagcctggccaacatggtgaaaccctccctctactaaaaatacaaaaattagttgggggtggtggtgggtgcctgtaatcccagctactagggaggctgaggcaggagaatcgcttgaacccaggagttagaaggtgcagtgagccaagatcatgtcattgcactctagcctgggcaacaaagagaaaactccatctcaaaaaaaaaaaaaaattcaaaacatgataatacatattgtagatgtgtgaggaaatactcaagtgccaaataccattacaagcagaatgagaagtttttgtcccataggatgttttcttcagggaatgtgatgaaaaatagaacatgctttaaccttccaaccttcaaacttgtggttagctccttctattcccacccagttaggaggcttttgcttcctgtaagattgttgaaaacactaagttttcctatatcaagttgggtacattctgtttaatctaggaaaatcagtgtaacatgctcttaatttgattaaataaagatgtgcccaaggcgagcgatgcagggctgaccttatatagccagaaggggcattggggatgaattagcaccatgcctactttgagaaatgaagaaaccaagaattggaaagggtaggcaattctccaaagttgtatgtatagtgacaactttggaaattaaagttgggagttgggaggagttgggattaaaattcagttgtcttgactccaagtccaatgtttcttacgctatatcacatgccatctggtttttcacagtgcaaaacacacacacacacacacacaaacacacacactctttagctaatgctactgaaagtgttgctagtctcctctctgaatattgcagaaaggatagttatgtgttcaactctgtcatttacataaaggtgtgtgtcctttattccagttttcttaaaaaacaactgacatctcataaaaggtgtactctctccctttgatattgaagattgtaatttcacattctacactcatgatattctctgtccacctggttttagaatcagaactagacaggttatttgttgtatctggctaaggacacacagttgggtcagagttcaagaagactgaataaagactggctggatgctgaccaccccagatcactcgtgtggagcagaaactggaacttctgggttcctgcttcctgtgggtgcatatgggtgcatcaaacacagctttccatctcatctgattctactgtcctctggcacccaagcttagcttaagtcttgaagtgtgcgtgtgtgggcgtgggtgtgggtgtaggtgtgtgtgtttggggatgacatcttccttggttcttaaaattctctaggactattcccatgaaaagaaaaaatatgtatctgtgttcacagtttataaataacagcgttcaataccaccagtggctgatggacaagtgctagcaacttgtcacctgtagtccttcgacctatcaacaaacgttcctccaatgtataatactgctctaggcactccacactgaccaaattcagctgcatagtggatcttagagttttcttccacaactgtgaatatcctgttcaaagacaaacagcaagattctgttgaaattcttcatgttaatgacctttgaactatggaatccactcactggcaggagtgtcaggaagaataatacctgcttttagagacgggagaatttcagccctctcacgctttctttaaatttccatattctccattcttaacacccttcccctaaatttttacaactcaggtaaggagagcaggttgcagattttcagaggtctggcgctttcactgctgcattcacacactgtttttccttccctgtagttttccattctgctataagcagggagaggagaaggaacactctgcaggcaaccttaagctgatggctctgtggccccctgcctgcccgaggagaaaaggaaggatgaaagcaagatttccaacaattgccattgaatgccctgaaaggaagaggctgagtggaaggagggcagggaggggttttgcctttcaggacatcagcagcaaataagaaatttctgtgctagtgcagttaccaggagcctctcttctcttcctttcctctgctagcgttgttccttgtatagcctataataggttgggaccagattaaatgagataatagcagtgaaaatgctttgaaaaatataatgggctatacaaagcttgaggttctctctatttgcctgtgattttcccagtagtcaagggtggattccagaacttattgagaaagagccataaatattaataacatatattcacacacagctcctagtgaagttccaagattttctcaattatacatagagaaaattggacaagttcaaagtttgttgatccacaacagctggagtccttttaccttcctgtcaactataagggcaaacacaaacactataatagcctctcctctacttccacacttcaggaagtatgtgaagaacctattaacatataggctatatgaaaatatagtcccagttttactaatctgaaattctctaaaatagcagtactattcgtcattttcactttcacacttagttgtcaatatcatgtaagatctctgttacacatagtaggtatttgatgctgtttcagagttcttcctgatttaagattcagcgctataagatcaattccaaaagttcatgctaaagatgtagaggggccactagatgtttcgctaatttaggactctgacccatttagatacagtgagggcatacataatgctggagtggacaaattaaaatgtttttacctaacatgacaccggaaccatgtttaacaccaataccttcattcaacttccctcccttctattctctggcaagatgtctgtaccttttacagggctgcatcttgtgtgtttttcttgttgttttattgaattgactttgatataaaaccaagattcttataattttgcgtgttgtatacggatgtttggataagtagaaatatctactatttttcagtctcagacaccctcacatataatgcttctaacaacctcgttagagaaataagcccataggctctgggtgataaccccttgtaacctcacatagctagaaagtatcagaaaatgttttcaaactcaggtctctgactttcagctcttatttgcctcaaagtgactctcagacctgcattaggcccttggtttttacatcaggacctatagaaataaatgttaaaattattttttggaggatttgtaatctgattacagaattccagggtttagccttgtgctgaagttcctaacataggaaaaatgctagggttccccttcgtgtatgttctatttacagatatggagtattacaattcatggcatccacttagtttctcctttgcatgatgacctatgtggaaaagtcccacaggagcattgatatctgtgcaggacactatggtcatgtatacatgagctacttaaggaaaagggctgtggccaggagcggtggctcacgcctgtaatcccagcactttgggaggctgaggtgggcggatcacctgaggtcgggagttcgagaccagcctggccaacatggcgaaaccccatctctactaaaaatacaaaaattagccaggcgttgtggtgggtgcctgtaatcccagctactcaggaggctgaggcaggagaatcccctgaacccgggaggcggaggttgcagtgagccgagattgcgccattgcactccagcctgggaacaagaacgaaactctgtctcaaaaaaaaaaaaaaaaaaggaaaagggctgtgtcccttcttgtttaatagctccctacagtgtttagaagtgtgcactatacccagtatagctactactattaaaagtcttgaaagaatgcttagagtagttcaagtctatttctttaagactcactcctgttttgaaaagcttcagtacagctaagtcatgcaggaggatatatctatcacttggtattctctttgcattcaaaatgagtgagacatcataaaacacttccaactccctgacaatgtgtattatgtggcctagaacaccatgtgatgccttgatatgtttgtgcgtcaccgggccccaaagacctaaccataagttcccttgttcttgctagatgtgtccccttgacccccagtgaaaaaggcttccacctggctagtttccctattagtcagaccagctgcactccaccagtctgcaacctaacaggctttcattttcttgccatccaacaaatttcttcaaacaatccaatcacatcctcctgtgggaaccaggggttatctcacccccttgttactacaaagtgtgcctcaccatggcctctgattgttctgagtccaaccccagtgtggccctacatggtatgggatgttcttctcctctgggctgtgagtatatgtgaccaacaaattgctatttcatctgcccagggtttggtgtttggccatcttgtattatttagggtgggggactcctccctcaccgacggggtgaacaggaggccactagaacagaatgataattcactttattcaggagaattttagtgtccatcaactaatactgctcaacaaaaattagcacattatggctgttctcactttgatggtttaattaagtgagggtctctgtatatcataaggctttgtagtcaaacgtggtgatactctgtgtataaattttggattttgtcttttgctgtgatttcataataaaggtgattggtttagcttggacctgcatcagccaggtagtaaaaatgaatctctttttaaatccagtttgaatgcttagatcaaatgtgttttcctctttcaccgttcttaatggtggagttcgttgatgcaataaaagtgaaataatgacactttgctttttgcaaatgtcttcacttttcaagatactttgcattttcaaggtatcaatagctttacagttatctggacagttcaacagtgaaggaaatgatactttttcaaagtttctatacaatcttttcactactccaaagagtttgaaatgatcgtgtagatcagtagttctcaactggggccagtgttgctcttaggggatagttggcaatttgtgggagtgttttgggttgtctaattagggcgacagtgcttctggcatctagttgatagggacaagtgatgctgctaaacatcctacaatgaatagaataactctcataatgaaggtattatcccatcccaaatgcccaaagtgctgaggttgagattccctgatttagaccacacggcatgctgcttgctcttttcaaattacacaaaccattatgtgaatgatttgacccacaattcagccacagtcagaagttggcttattcagaaagtaactcatgagaacattcctagaaatagtgcaaagcaccacagtagaggctgggggttagggcacggcagatccatgctcatcctttcagtctgtatataatctctacatcccacagtccctttgtgcctgtctgaatagagcagaaccatattctgccatgacaaagcaaaaattcccagtccaatgctataactttcagttcagaatagactttacagaacatttgtgtctttttcatttgatatttaagtattcatacacagatactagcttctttcatgtgaaatttgtaatttaaaaaatggattagtttttattttggaagaagaatctgctcaacaatcaaataactcttttaactgtctgtcaagttataaatgagcctagttttgatactatccagtttattatagcttaaattgtaggggatctaacaaatgttggtaaaaatgtcttctgtgggctcattagtatcatttttaaatggaggctccgcggcttcattgagctgaattcctgccctgccttgccctctttcctttcttatgtgtacacagctctgactcactcattacacaacctttggaaagagagtatgtgcttagaggcagagatatgggcttgcctgtgcacgtcagtgcaaaaactcattgagaatcctgcttaggtttatgtttccattaccactattattgcagatctgactgaatgtgatggcttctacataattacacacacatacacctcattcatgtaaatgaaataagcttatgaggcaagtaatcatcttaacttgatagccaccactcttatttctttgagaattaggtgatatttctagactctaggaatcttgcttcccttagtcctgacagtgagccacactttgtttacaaatgaattatgtctggtatttgtacattggcaccagtgagatctattggagaagtttcattgtgaaactttattgcttcttaattaataactttattatagtttaactagcatacatttattcactataaatctataatactatgggtttagtaaattcatataggtgtgcaaccatcaccatgatccagttctagaatgtttctgttaccccaagctggtccctcatgcccattgtcagtcctcgctaccctcccaagcctcaggcagtcctcttgtgctttctctttccttagatttgccattaacagacctttcacttaaatagaatcatacaatacacaggctttggtgccaaacttctttctcttaaaccatgctttggaagtaaatccatgttgttgaatgtgtcagcagttcatttttattgctgagtatttcaatacacagttataccccactttgtctagttaccaattgatagacatttagattatttctaattttttttttttgctttataaataatgcctgtgtaggtatatgttttcatttgccatgggcggatatgtaggagtaaaattactgggacctttggtagatgtgtgtttaagttttaaagaaaataccaaactattttctcaagtgactgtactatttcacattccttctaacaacacatacgatggttccagtttctccgcatccttgctaacacgtagtattatcagcctttctgattagttacattttagtgggtctatagtggtatctcctgtggtttaaatgtgtattttcctgatgattaatgatcttaagcatctttatttgtgccctttctatatcatcttctttggtgaaaggtgtattggaatatattgtattgagacaatgtttacatctctcaccttctttttgcctctcgttgccactatttttcagtcccaataggttgacaattaattgatttctgagctataagactaggcacttctcagatattttagtgaattattgggaagggggatcagaggcattagcacttttgggaggtattgcttgaaattacaaagcttccttcactgcttaatatgtctgactatttcaaggaacccatttacactatttcttaataggtgctgcaaagcagtttggtgccaaagattttaatctcaaaagattttatttatcccaatgagagatttgagattttattaatctcaaaagctgattttgaaaagaattcaggaggaattttgcattcctattctgaactgttcttatagttgtctagtattcatccattcatgcaggtaataaatgctagattaaactataaaaatctttaaaagtaaagcaccttaaaaattatagttgcacatctaggcaagatctattccttgcaattcaggcaactcagtatcttgggctggtttacttttcaagctctcagtcagaccctttatttcatggaaaagttatttagtcagggttctatccattagtttctccagcaggctttgcttttctttggtgcattgttttttaagttaaactaaaataagaagatttttctggtgaaaaatcctgtaaagcaggtgatatggctatacaataatattctgttttaaaaaattatagtttgtttcacaagcttaagaattataataacatggaatttaaaagtctttgttgctttgtgttgtaaactcattctggaaaagttgaggaaagtatactattatttttcttttgacttgttggctaatggtcatttttccagaatgacttgatgtgaaagagcatgaactattccaagcaaagcagaattgttcacagttggagagattcaatatctctccaaaccaagtcttttggcttacatttccctgcaacacctcaagccacggtgaagctttgaaagaagatgcccattgaaaagtgtttcacaattctaggacctcagactatactgcttctaaatacactggttctgtgcctgtaaagtgcagattgggctcccactaatttacaaaattaaatcccattctcactctactgatcccgtaagctgattctgtgaaggccaaggccacatttcctggatacccttgtttctccaggatctaacaaagagccacatgtgtagaatgtaatcagtcattgttgactaaacaaatgttgaatgttatcttaacattgttaaatgtcaacatcataaaatggtgaatgaatatcttaatacctcactgtctgactcttagagagactaccttctactcagtattttcaggtttcttcagatttgttccttttggttcaaaggttaaaatgaagagatcactactgtatattctggtatgatgctaataacattttagaatatgtggaattaccaatatacaactatatcattttagttttcctgtaatttttcaaatgtatgttattttacagacatgcattagattcatactacataaaactactacgccttaaaagggagcgttacagaggcatacgggagagagttcgtgccttcagaggagcttagaatacaaggtaggatgctgagaggtatacaaataatataaaggactaggtacaagtggaaggaatgtggtaaggatgcagagaaaataatgattgtggaaagaatcatcctcagacttccagatgggagcatgggtgttgtggtctacctgcatttgtattccctcctgttgctagcaggactgtaaaatgctccattcactctagaaaacagtttgtttcttaaaacactaaatatacacttaccgtaagactcaggaatttgtgctcctgaatatttatccaaaatgaaactaatgttccccccaaaaaagctgtacacaattgtccatagaagccttttttgtaatagactaaaactggaaacaaccaaaatgcccctcaatggtgaaacaaactatggtatgccgatattgtggaacattatgcaacaataaaaaagaataagctattaatatacacaacaacttgggtggatcttaaggtgagctgggagcaggagagcaggtggacagaaagcacagctcctgagtctcaatgatgtgactaatggtcaagagtgtgccttgccttagttcaatgttgaaggatgttccagtgatgtatacaattttccagatctgacctattaatttttctgaacatgggtgtaataaggtaccgtattacctatgcttcttcagagcctattattagctggtttatgagttaaggtttatagaaactatattattttactggatataaattagattgaaaaatgtggcctacagaaatacacgtgtaccattttattttctagcttttgtgagtgttgtgctattccaaaagttcacaagtattgcagatgacaactccccccacccacttttattgtctgttagtgaataaaatttgccaagatttagtattacccttctgaaatagggctgcaaaggcgtttttaacatcttttccactcaaacccacatgtaaattcttaacaatctagcaccaattttttaagttaccctttttgattgaaataattatcaattaacaggcagttataaggtaaaacagggaggtccaatgtatccttcacccattttcccccaatagttacattttacattttgtctagttatagtacaaaatcaaaaccaggactttgatattggtccaatatgcatttatagtactgagtcattttatcacaggggttgatttgtgtaaccaccattgtaatcaaaatacagaactattccttcaccacaaagagctcctttatgctaataccttctagtctacccaaatcccagtcctttcccaccatccccaaccgctgataactacaagtttattttccacacctgtaattttgtcatctccaagttttatataaacaaaaatatgcagtatgggaacttatgagattggcatttttcattcagcataatgcccttaagatccacccaagtggttgtgtatattaatagcttattcttttttattgttgcataatgttccacaatatgggcataccatagtttgtttcaccattgaggggcattttggttgtttctagttttagtctattacaaataagccttctatggacaattgtgtacagcttttttggggggaacattagtttcattttggataaatattcaggagcacaaatttctgagtcttacggtaagtgtatatttagtgttttaagaaacaaactgttttctatagcgactggagcattttacagtcctgctagcaacatgagagatccagcttccccattccctgctagcatttggtattgttgctattgtttacttgagctgtactgtagatgtataatgatatttcttggtggccttaatttgcatttctctattggctagtgatattgattgtgttttttttgcactcattttccatcagtgtatcattttcagaaaaatatctcttcatatatttgtcattttccaattgaatatatgcatatatttactgttgagctttgaggatgagttacgtattctaaatatgaatcctttgttgaatgtatggtttgcaatagtttctctcaatctattgtttgtcttttcattcttttgacagtctttcatacagcaaaggtatttaattgtgattaagtccaatttacagattttaaaaaatatctagtgcttttagaatcatgtctaagaacttttcatgaagttccaggtcctgaaggttttcttctaggttaactcctaaaagttttagactttttatgttttacacttaaatctacgacccctgttgactcagtttttctaaaaggtatgagatttagattgaggtttactttttttgcccaaagatgtccaattattattccagaaccatttgtgaaaaagttcatcctttttccattgaattgtctttgcatttttataaaacatcagctagccttcttcacctgtcccatttatttatgcatttatcatgctaccaataccacatgatctccattactagagatgtataaatgtataataagacaggatggggtagagtaatttcttcccatttattcttgtttttcttttcttcttcttctttttttttttttctctgagacagggttttgttctgtcagtcaggctgaagtgaagtggcctgatcttggctcactgcaacctctgcctcctgggttcaagcgattcttgtgcctcagcctccccggtagttgggattacaggtgtgcaccaccacgcccagctagtttttttgtatttttagtagagacaggatttcgccatgttgcccaggctcgtcctgaactcctgagctcaggcagtccgcccgccttggcctcccaaagtgcgaggattacaggcataagccactgtgcccggcctatttagcaattctagttcctttgctttcccataaaaatttagaataatcttgtttatagctattttacaagctcattgggattttgatagaaactgtattaaacctgtgtattaatttgggggaaaatccacatctttactatattaagttccaagtcatgaatatagtatatcccttcatttattcagcgatatttgatatctttagtcagacttttgtggttttcaaaatacaaatcctatacacatttagttgaatttacacctaagtagttttctcttttttttttgagtgattgcaaatagtattgtgtttttaatttggtttttacctgtttattgctattgtatagaaatataattgatttttgtatgtttatcttgcattctctggccttgccaaatttactcattagttctaggagtgttttcaaaccattcttgagatttcctatgtaaacaatcatgttatctgcagatagggacagttttatctctcccattctgatttatatgacctttcttccttttcttgccttattacactgactaaaactgttggagatgaagaaagattctgggtggttatgaccatcttcatgaaacaaagaagagtttaacttggcaagagcaaaatgtacagttagatattaaattattgtatgaaaactcttgctacaaggcaaagaagggactcgtgaggtggtttatcattacaatgggaagaaccccaagtcccagagtaagtgttaagctcttatataagaagagattaagaaagtaataagaaacattgaataggaaaactacaaagtttttcataatttcctttattattaatttttatttttattgcaatagtttttgggctacaggtggtttttggttacatggataaattctttagtggtgatttctgagattttagtgcacctgtcacttgagcagtgtatactgtacccaatatatagtcttttatccctcacttccctctcaaccttccctgctaagtccccagagtccattatatcattcttacgcctttgcatcctcatagcttagctcctacttataagtgagaacatatgacatttggtttactattcctgcaaaagacattattttgatcttttttaaatagctagctgagtagtattccacggtgtatatacaccatattatgtttattcacttgttggttgatgggcatttaggttggttccatatttttgcagttgtgaggtgtgttgctatatgtgcatatgtctttttcatatgatgatttattttcctttgggtagatacccagtagtgggatcactggattgaaggtagtcccacttgcggttcttttgataacctccatactgttttcccataatttctttttcttaatttttcccaaaactggaaggtgtcacccatattttacattttgaaatttattagaattttgttctcattctagagtctagaatctaaaatccaaaaaatgtcaagtagcaaaagctttcttttttgagactagttttaaagtttttttgtgtgtgtgtgattgtgtgcgcaaaaacaagtatgctttgttatttaaaattattatttttaccttttcactttttaccttctcatctttgtcaaataatattaataaatctttactttcttacaaattctccttgcccagagcttcaaaactttcctttgtggagaaatctgtgagaggatgcttgaaggagattcttcagatcaaataaaggataagtggtcaaggaaaatatttcataacttataaaggttgacaacttttagtaaccttcctttctacttattataaataacagttggtaaaaggaagctgaaaataactgctaatcttagcgtatttattaaagagttatgccagatggaaattttgttagatgttaaaaaaatgtaagcaaacaatagacaagctgaaaaatggggctgtagtgggtagctgaagcatctttcagttaaatcatgtcatgaatacttccttcacatacagtcttgtatcatttcttatggaattttgttgtcatgacaacaagttttacaagagcgtcttcagcttccatagttagaattacacaaaaagagtttgatacaatgaacacaggtgagctttggttattacatttggacaaaaccccttgctttatcacagttatatccatgaaaaaattaaaaatgtgacacttctttgcaacagaaagcctttttctataaagttttccttttttttctgagaaaaaaaggtaaaaggttccaaatatttctcagcttaaatactattagattaaaaggtaatttgtaatgaataagccacgatagcccctaatgcacgaaaggactttgaaattatgttgtttcttgtagacatgaattttgatgaagtactagtaaatcaaatatagtggaacatacaggctgaacatgaaaatactgtcaagaacacgatggtaatctgtattggacatatttttattatcttacttgaaagtctcattatcataacaacaaaactctttggctgtcctgtttctcattgcaaataacttcatgacaaatgaaaactcttttgtgttaattttcaatggcatacaactacagtactattttacagctatgcatttacagacaattatcttcaaaataagcaacacatgcctgtaatcccagcactttgggaggccgagaccggctgaggtcaggagctcaagaccggtcaacatggcaaaaccccatctctattaaaaatacaaaaattaaccagtcgtggtggtacacgcccatagtcgcagctactcagtaggaagctccttacatttgtcaaaaagattttaaattgcttagtgatcctttatattttaatctgattaacctactctaaaatttctaagtttaaagttatgcgcagacacacatatacacacttcagtaatcctactcatttcagaaatgttctatcagaattacagattattgtaaaagtcatgttcttttaattttaaattactatcatgatggcagttaactgctaaaaacaatgtctaagtagataacctaccagactccattttaaacatgtggctttataattcttattatttacttacaaatagttcaaggctgaattacagagttataaatttggaattattctaaaggacgaggaaagagaagtgtgccggccttttctctgcaggtatgactgatggtaattatcatctctgtgtgaggctgtggctcagacgattgataccaagtggccagcctcaccacactgcacccacatgacattgatttttgatttgtggctaaaaccattgtccgctataatggttgcactggataaattgcatacacacttttgtgggtgggagttacttagacctcttattcagaatctgtattttcaacattatgttgaagcaggcaggttgcagccaaaacagtctgttgctaaatatttctcactcacatcttaatgagcaactaggccattagaaagtctgaagacacaggatttattgatagcacaactgtttagcatcaacattcttacagctgtattcaatgccgaaagtaaagccatactccatcttccgtctcttcagatagctacctgctcagcctcgtgaccagatccgagcccaaaaaaaaacaaaaagcaacaacaaaaaaaactcttaagtaatcaaagtatgacgctggttctcccagaagctcctcctcttcatattccctttttccttctattctctagccaaaggtttagtgttataactttgtttaatatagttgcagcctcagcctccatttttagctgatgtaagttatttgaaatgcgatagtacccaacacctatggcctagttaaaacttgctctccctgtgtttgtagtggttcgtgatatagcttgcttatttctcatctcactgatcccaaacttgacacattacagctgctggccacagtaaacctagtggccaacacctgagtcctataattaagttttcctgcttgtcacacaggtgttttctctgaactagccaatccacacccccccacgggaaaccctaaagaataatacccatggagcttaataaataaggcccacaggtcctacctctttctcttgtttcctcactcactgcttgagctttttgctgcccgcaggcttcctgtcagcctcctgtcagcaccactcattgctctgagatctgtaagtagcacgtttcttctgtttcatgattttcgttttgtcgtgtcattgtgtcttacctgattgacacagccgaacctgacttttctctggtcaaggcttccctagagagaggctagctttacttatgtccactattttttttttttttttgagacagagtctctgtcgcccaggctggagtgaaatggcgtgatctcggcccactgcaacccccgcctcgcaggttcaagcaattctcctgtctcagcctgtggaggagctgggactacaggcgcacgccaccatgcctggctagtttttgtacttttagtggagatgagatttcactctgttggtcaggctggtctcgaactcctgacctcaagtgatctgcccgcctcgggctcccaaagtgctgagattacaggcactagccaccgtgcctggcctacttaggtccactcttgatacaaaggcctcgagacccacttagaaagaaaccataaggaaactcatgacacttaatttccttgtataaatttatgtcaacatacacaggtatatgccttgataacagaacatttttcatattcttctgaaaaccaaacaaagcaaaaactgtgtttattttgagtgggatatagttttccacagctatgtttgttgctgtgtcttgataacatatgagctgttacatttcttttcaagttgaaagatctaagttaaatttgccaaatctctgtatgtcagtatgtagacatctaagtgtcttctggcccctctcccagctgttttagtctgtgaatttctaggcagtttctttattgttacttttcatattgtacctaatgtgcttcaaagtagtcatttaaaaatatgtgactcctgttgttcctctttcttcattttcacttaaaacccctctaccttgggtcatcaaagtatgtagaaatacttcttttccaggactttgatttctatacagaactttacaatggagaacttccttctatttcctggcattttcatcgttctttcctcctaagttgaacttctacagtattacgatgaccccctggtatctagggcaaatcttggctcttggtgataagagatttgggaacctctgggagacaggtagaggtcccctgagagagtcctccctgcccttgtgttctggtttttgttcccacacaaggagcaaccttttttcaactctctaattccttcacctaagttctgggcttggtctactgcctgtttcttccttgatcttggcattctccttctaacatatattcctgccctcacactccaggctactgctatctgctcaaggattacccagtgcccgggttctggagtgctttgtgtctgtgtgcatggaggacatactcgttctccctgatgccaaggctgagattccttgctttacttagttgccacattctgtagatttattctttatggagtcaaagtcaaagctgtctttaatttgacctgatagctgttaccatttcaggctcccattatctcatctatgatgtattacaatacaactggtgttagtagcgctgacgttgtcccaccccacttggactgagtccattcttctgtgaaaacttccatgatcctcaatgaaagaagtaatcacttctcttgtattatctatgtacttagtgcttctgagaggaagactcacactgtctcaaataacactggggtttagacctggtgctattctaagcacttcgtaaatatcagctcatttaatttttacaactctattttcctagttctgcagatgaggaaacttgggcatagagatgtttagaaacttgtccaaggtggcctagctaaaacaagggcagagtcataatttaacccaactgatctaaccagcattcgcatgcaagctctctaattactattatcaactctccaagggtattcaagaatattcaacaagttgtaaagtggtaagaataatctgggtttactttaattttttttctattttccattttgaatgctaaatgttatttggacagttttttttttttattttgttttgcttcagtagagttgaagaatccttgactattagtgatattagtgatttttgtatccaatctatgcaagtattaaaatctattagttcaacatatactaccttgaaataatgagttttcaaggagaacgtaaagttaagaatatcagaggcaggcgtgaaataccagagggcctcaaaagtaagcactacttttttttttttgtaagaattaagaaagtaggtagaagctatctgaggtcgaagaaaggagaggagaaacaaaatgaaggattattacagcttgctgagaggaaagtaatgatggtaaactacagactctgcatgtgtccttttgacatgtgattgccactattaattggacactagaattgcataaggatcatatgtaatttagtaggacacatctcctattgagctggcttaatgtcaagacatgggaagaaatacaaaatatacacagggaaaaacatttctaataaaaagtagttcagttttgctttcgtaatattcattcatgtgatgattgaatgtgacatggttgaaacctgaaccaagtttcagttatttatccaaatttggtgtaaaggccaattactatgtgaaactctttttcattgtcacaaaaagacacattctaaaaatagcaatgattttaaaatgtgctatactctgggggggagagttgttttccttgctgtgttaatatctgtaaatatgatctccatggcatataaaccagcaggattatgctatttcaccttcgatttacttctttacctcctattgatttgtttgattagttaaaaatgagggttaaggacgatgtgtgttacaaagattaggtcagtattcaggacttgaaacacctcctgaatttaggatgagacatgagaagtcattttcaagaaggcctttaccatctctctgcttcttgtactcatttggaaaagcatagattgtagcagagtggatgaaagaaggggacaaaatcagtgaaagttttgttctactcaactatggccatactgagcttcatattttccaaaggtatcacatacctctgtacaaaaatacactaaaacaattttaaatgaaatgcttctgtgttatcctggtagccatgcctgtccatgagacaatcaacagtagctatatttacagattacatatcattaagtagagcaaaacaaaaactcccgaattatttgctgtatttaggtatcctttttgtagcatgcatgcctggcatttttatatccccattcaaggcagatatatataattaaaactcacttgtaaactgcaggattgtttagattttagaccgaagaaagtttgaatttatcactgatgttaggaattaccaactaatagtgttaataaaatgtaaaaccacttttggttggttttattgtttttcaattctgtagagtcaaagctccttttttcccttattgctgtaccaggacagacttctctcatcaggggccttgatactgccctgcttgtagaagattctcagtacctcaagttagcatcttctgtgcccttctgtgtaactacaagtattttgggtcaaatgagtaggttttggtgcacagcagccagtggtccttcctccctccacctccatatctccttcaaatgtcaatataaataagtgatcttcatgggatcagaacttttcccataaacatttctttctgaaactatctgtggaaactagagttccgtctgacccaatagccagcctgaggataatcctggtcatgatgtgatttatccccaggtttcctctggaaatcggcttagcccaattctgtactatacacccagtttcagaactgagaaatctagaaatttctctctgcccatagctcaactaaaggagaagctttcctggtccagattgactgcattaaaattatgcatgaatgaaagtctaataatctaatactcattttgaagctgttacttccagtgaaggggaacagaaaatgcaatatgtaaagaaaggaacatccatgaccatcatgttaatagctttcttgctggttaggacacagtgagcaaataaaaataagtgtaagaatttaacaagaccgaggatattaaaatgaatcattaccaagaagggacctaagccaaatactgctgaagtagattccttttgtgaattttatcacatctttgcaatgagagtttttatttgctgagtcttgaaattgttatttttaagcaagggatctaataagccaaaaagccagaaagctgccattcctgcatatttttcaaacatttccttgctggctgtaaatatcaggtaactgcatgagagtcttcttgtatttctttcagaagacatatttaaaagtgtgaatgtgggagtggtggcggtggcaggatatacatctgtgggctcattacttttgaaactccactgtgtgaattccaggagtgttagaacatcaaagccaagttcaatcaatataattgtttatagacatgcttgtgacaagaaactggaaaagcacaacttaatgtggaataacggatcttcatatcagaagagaaaagtaatacttcaaagtctatggacttactttactccagtgtaagtagtttaggacaaagcaatagatctttaaacacaggaacttcggttgatcactaagaaaagttgaatctctgcactcagttccagtaaatataattaacgtgaaaatgtggtcaacattgcctcgttatgtatatggagcatatataatatctgttagatatgtcatatgaacaaatattacatatatggatcataagtgtaaaactggtaaatcacttaatcattgagtttcatgccttatgtgtaattgatatgtctattcatacacagtttctttttcaagcctcacaacttgtcaccccttctggttccctatcttttgccagctgcaagaatcacttgacctcagcgtacaaccctgataggaccaactctgacctccggaaagagagaaagaatctccagacaaatattttgtggtccaacataaagtcaccctgatttgccactaacctggctttgagctcgagtcctgttgactgactggatagtcattttagtctttgtgcctaaatgtcaagatcagagatgggcttaggttaggctctaatgagaattatccttgactcacccaaaaggcccttatctcagcctttcctaaacccttcctcttgtatgtttctcctacttcttcaatccctgcaatctagttctcacctatgagctggcttttccccctcgctttgttctgtcctttgaaccataaggcatccaaatttaccgtccgcaaaagtagctgttcacaaaatacttgatctcctggcttccaaaattctcgacattctgtcctggttgccctctggacttggtgtctccctttttttttttttttttttttttcaatttattagcttattgccccaatcttaaatacatgtgaggatttttctgtctttaatgttgtaagggtttactgagactctttagtacctaaagactgagaacttctgttgactccctgaatttagtcttaccacttgcttcttagctctgtgcctatttaatcaacttatttccttctagctctattatagcctggcccttagctctaatttctttaccctgaggtcttcactttcctaatgtcaatgtttaatgtgctttgactggggagacttcatcaagctatgtgacacgagggaaatactaggttggtgcagaagtaattgctgtttttgccattacttttaaatggcaaaacccacaattatatctgtaccaacctaataacataaagcttgaatttggtgccacagagactcctgtgactgtcggcatttttgtgtattttttccttccaattcagttaaaactgaagcttttgtgaggggggattgtgcaatttatagcaatgtgcctgtgacagagcctggcacacctcctgtgtcactcagaatttggtcagagatgtaaaccatcaggcatgtgatagaatatgggatttattagaggacctgggcatggtacaattctgagggttggttaagcatttcatgtatggctgttgcttttgcatctggtgctaggcctgaggtgagcagggatttgggaaggaaaaataggtgtgaacggagagagaacaaggacaaattcgaatccataaggataaactggaaactgagttggtttcacaactttcaagcctctagtttcaatgaggccgatgactttcaggagaagctgacacggtctttcagggtcctaaaaatgcacctggcccaggattaggaaagctgatggaagagataagacagaagccgacaaggtgaacccgcatatccgcaacacacatgaacttcacttctgacactacgctctcctgccaagctaaacaagaatccagattcgcttctggagtccactcttttcacaaatttctcttgcagtcagctctaggcaagagccatagagagaaaagaattttgagaaagttgaagcttagctacactgacaatacagagacaccatatgccattctttctttctacctctggttcaagtctatagctaaaaaggagtgttaaaagaaatatataaattctctaagtctggtttaaatgacctaactgaattggcaatctctgattcaatcaacatgatcagtttataccatttgtcaggaaattgaacatctgatgaagtcttttagtctttgttctcgacgctggaccaagttatttctctttgcacagttattgtgtgtctaggatttaacaggacctctgaagctatggctatagcaattttgtacttctttcaggcatggtgggagggataattggtttatgacacatgtggcccttttaagcttcttgggtggaggtgaggggcatcatgccacccacattcataaagctgttcgtttaattattttactcatccaggcccactgctgataatcctgatatgaacaccatacactgttcttctgagggcaaggttattttagttttagaaagatttccagagctttttaagcccgttagagctctgaagctctggaagaaatgatgcatttttcaccatattaaataatacattcaagtgtaagtggctttcaaaatgaggaactaaagaaaaggccacaagatgaagctgctcttgctgtgtctccaaggtgactggcacatagcaataggcctgccctgacaaggctgggaacagtggcctgggtgaaaagggattgtgtaatcagtacagctcccttcaaagctgtcgctcagagactggatctgactaaattcctcaaaatagccacttcaggtttttgggagataacaacttgttttttgtggcagaaaagaaaatagcccactccctgtatcaacttccaaatttaaaaatcaaagatgatatgttaattttctgaaaatgaatcccttaagaacttaggtttgtcacatttgcaagtgtgtacagggagacgaatctgaaatctgagaaacacgtccttgatcagccttaggataggagcagcagaaggaaaggattcttaaatccagtgtcagccacttaactgaccagtatctttttctctgaaaaatgttagcatttcttaatatttggaatgtctatggaatttatatgtcagccaatattctgttaaactcagaatattaaatctgagttataagcactacagataagtgattccaagtgctaatttcattcctaatttctaaattaacagtttctaaatcttccagcaacaagtctataatgggtcaacaagtctataagtctatcacgtgtcatctaatcattgatagagataaaaaggattttgtctttagtctctcatgagaataggttttacctttaatcgatgattagatgacacattgtagacttgtttttacggtcaggcccccacgtgtgttgtgcatgtgttgtacatccatggattcaactgcagatcaaaaatatctggggagacaaggaatgattgtgtttgtcctgaatgtgtagactgttccctaaacaatacaatgttacaaccatgtatgcagcatttacattgtgttagatattataagtagtctggggatgatttaaagtatacaagaggaagtctgtaggttatatgcaaatactacttttttatgtgtaagagacttgggcatctctgaatttagacattctggggggtcctggaaccaatcccctacaggtaccaagggatagctcagttagcattaaatgatggttaaacacaatctgattaaaacctctagtattatgtgaagggcaaggtaaggaccctgaagtatggcagtggggtcagagaagggatggaattgatctcttaactttgacgggagcagtaggggcagtgggagtcaggagggatagagaaaaaagccaatttggagatttctagcttgggccattgggtagatggtaatgcagtgaactgagaaagaaaatgcaggaaaaggagcaggtggcagatgagagatcagtttgcaactaatagctggaactaatggcctcatcactggtacctctgtggaaattcatgctggttttcccatcagtatccatcctcctgagcatgaaaaaaacaaactcacttctccccatctgcatttagtgaaggggtatagcagctgctttccaagtccctacagttggaaagtcccgtgatgctgtcagcatttcagtgtggttggttggtactggttcaactcgcgggtggatttccctgttggtaataatagtgtgttggctgttttcagtgctggtgatatgtctgctacttggcctatgaagcaaaattgctgaaatagagcacctgagaaagcatcttaaaatcgtgttcttttaaaatgttaactaataaactctagtttgatgttttaccagaacctgtgggattatgggtaataaaaactaaaaatgtgaggttgatgtgctggaagcaataataaaatttgctttttatgcacttttagaaaatgcataatgttctagatcaggcagcacagtagctgtcataatgtgttggcatcttgtcactcttactttatcctctgcatagggttgtgtttgttcagactgaattgcattaagctgttccttattagagtaaaacatactcagttccataaatactgaattaaattcacttgggtattttaatggtggtttttaatccagcctcttgctttttatgctcaatcttaataaagtcagatgcattaagtgacaattgagacgttctttacattcttatgtaatcagagaatggggtttcatgaatattaacttattgtgtgggtgtgttataatgtacattcaaatttttttcttgtctacaaagtataacgtttaatagagtggtcctgccctggtgtaattacttttgtatttttcagaatacctacccacatatagtatgcattggaatatcagtcatagatgttatactctgcccaaagaaaaagagagtgataatgaaaatacggctgtctaaaacatgaatttggaaaatttaaatggagctacatctttaaaaatatctgaacatgtcatttcttaaaaccttaaatcagctccccaggttttgccaaagttactttattataagtaaaagtttgatttttttaatgtctttacataggtacaatgagcattcctttgcttcacctctggatagtcacggagtcatttaattcttgcttcaagtgttttctcttacccacccattcctttcaccaccaccacactagtgaggtctttatcacatcatccctgagaattctgacaagtctttttagtaggacttcctgctgttagtctatccattcttcattataccagaataatcttctttaaaatggatttcttattcttttcagaaatgatcaatgggttcctgtttctcactttatggatgggatataaattgaatcctgtaggatccaaggattttcataacatagaactctatcaattcaatgtttacatcagtcatccattagtcttaaactagtatttttattgttcaacaaatgcctttttctttccctattgtgtattagtcagggttctctagaaggatggaataggatatgtgtgtgtatacatatgtatatgtatttggaagtttattaagtattatacaatctcaaggccctacaataagccgtctgtgagctgaggagcaaggagagccagtccgagtcccaaaactgaagaacatggagtccagtgttcatggagaggaatcatctggcacaggagaaagatgtaggctgggaggccaggccagtctctccttttcacgtttttctgcctgctttatattagctggcagctaatgagattgtgcccaccaggttaagggtggatctgccttccccagcccactgactcaaatgttaatctcttttggcaacaccctcgcagacacacccaggattaatactgtgtatccttcaatccaatcaagttgacactcagtattaaccatcacactattgcttccccttcccaaatgccctcccaattcctctgtctatccaaactatatcccctcacttcaatgtcctgcttctaggctcatcccctctttgatatcccccttgaatgtccactgatttaattatctctaccacactgtttagtagctaataagatgctatttgaatatgtagtactctgaggctaaaacaagctttcactttttaaaaacatttaattgtaggaaacatctcaacaaatacaaaagtaaacagtttagtatgaacatccatatatccatcagccagcttcaacaagtattaactcacaatgaatcttgcttgatctgtgcctcacctattttacctcccataatattttggagcaaatctcaggtatcatgtcattttatttgtacatataatatgaaataagctttttgacagtactgtgtacctgttcttaattgccctaagcacctgaatccatcctgcaatagtcaggaggcacctacctagtccaaacatctccatattcatgaccatatccattactacatgcatatttttcatacctatacagtgtttacatctgtatgcatgtatctgtatctatctgcatctataactatatctcatctctataggtttatgtctatataccaagagaggtttataaccaaaagatgtgttaacaagatagaccactattatggaatgagaagacatattctactatacatccagcacaagcatgtttcgatattactaatgacatactttctaccgacttgtcactgattacctgttacccttggagtgatggctctacatgtctcactggagcccacgttaaaatgaactctgaggtctctggccagccacttctttttcatccctttgttttctgaaaatgtactgtctttttctaattggccagtaagagattcttctttgggctagatgagtaacatcctgattatactaaagctggcaacagttctagcaattttctgaaggcagaatacagatactatgacaccaccatgaatgtttgagctcgagactcctgggaactcactgatatgcagactttctttaggggaaaattttgaatggtgttatatcaccaactcctctggtagcaaacatgctttatacttcaactcaacatttgtgagtaccaaccatgtttaaaagtatattagatgctgggtagtttaagtcttaagaaaggtattgtccctgcgatagatggccttatagacacagaaaagaatgtgtttaatatggtattgaccatgccacttttcttccattgctctccacccttccattctgttaccctgtccacagattgctccaatctgaccattcatcctgtttccactgcaggctcctctgtcatttcttcaaatgttgatgtgcttcagggttactttgtcctcgtctctttttattgtgtgtattctcccagagatatctcatgtcctctaccctggtgattaatagtgatacttctaattaaaatagctcctgcattccgagtttgtatctctcgaagtttacaggacatttcttttctctcccaatcctttactcttctcccattggcaccccatacccctgccaaagcctggctgttagcccagcatcctcctctaccactcccctcattccctatgtgctgttagaaagccttgccagacctttttaaaaaaaagtctcaaatccttctctcattttccattaatagtcaatttcactagctttgaatctcttccttggaatattcccaaaaatctatcagatcttcctgtctcttctcacctcccccaatccattctgcatatcagaacaacctttacagaatactccatgaaacacaaagcctaaacgtgaaatatggtattactttgattaaaaaccttttagattctctattgcctacatgctaaactcaaattctctacaaggaagaggttcctcaaatcttaactttctctccttctctagtctcatttcctttcttttctcctttcctctctcacctgtgttctccctaaccctgacaacatacacacattctcccatttccacatcacattgaattgcttctgtgtcttatgcctggaaatccattctcttagtttcccaggagaacccttctaacttttctatgacagtttattgttttttacctgaagtctgtctttcctgcttaggtagatttgacctctcaacattttttatctttaccacgcttggtacataatttcataaagcagcggtcctcaacatttttggcaccagggactggttttctggaagacaatttttccacggtggtagtggcgggggaaggtttcaggatgaaactgttctaccttcagatcactagtcatcaccttctcataaggagcatgcaatctagatccctcgtatgcacagttcacaatagggttcatgctcctatgagaatctgatgcagccactgctctgacaggaggcggagcgcaggtgataatgcttgcatgcctgcagttcacctcttgctgtgcagcccagttcctaacaggttgaggaccaatacgggtctgtggcccaggagttggggatccctgtcgtaaagcacccaagccactgcattgcaccatgtgtctgcacctatgtcatcttctacaatgggtccgttaaggagaagaacagagttaaattcacctctaatttcccagtatctaatggagtgtgtggtctatcaaacacaaaatgtatgttgattacagattggatgaaagaataatgggaaactttaatattcagctacatgtttgtatatttataaactttatatttgtgggcataaattccgactctctaccattttacactccttaaaactactaatactgtgacaggtatttggtaattaattttactcttttagatgtgttgtagcccatgttaaaaactaactgtttgagtcaatgttttctgagggaaccataattcaaacttcatgttgggtcttgccactaaatgtagtgaacagttcaggattttttgactgtccagcctctgaaccttcttaggtttccactatgtatcttggtgagagacagagcctgcatccttctagagatttggaaagcccagttcatttagattcagtctcatgcttgccatcatctagcccagagacttgagatgtaggcttagctaaccagaccaagattctactggcatttgaactttgaagcagcaacatacagtgaaatgcattcatttgtacagaaaccacaccagaagtttgtacagaagtttcccagtgtggatggtggcagccaggattgtgtcctctccaatggcagaggaagaagtattctcccttaatttcctttggtcctggcacctacctgatgtttcctagtacttcctcatttgctaagcctcattctcaagccttccaagaagtttcctgagttactccaatctttttgataaaatcatttcacttcaattggccagagtcagtttgtttctttcagccagcaaaagtgactataatattgatgagctgagcatggtagctcacacctgtaaccccagcgttttgggaggccgaggcacgctgatcacttgagaccaagaccagcctggccaacatagcaaaaccccgcctgtactaaaaatacaaaaattagctgggcacggtggtgcatgcctgtaatctccgctacttgggaggctgaagcataaaaatagcttgaacccaggataaggaggctgcagtgagccaagatcgcgccactgcacttgagcctgggcaaaagagtgagactctgtctcaaaaaaatatattgatgaagtttacttacaccaaattgtttaagtggaagattgtgctagtatgcgtctagctgaaaaatggatgcatttaattcactaaatgcgttggccaaagctatctcaagtaatgaacatagaagcaaagtgttcttctaacacaccaccagggagcagactctgggtaaatgacataagtaatttatggacaataaccattgctttgccttcagatatttctttatctcttttgcaagcctttccccaggtgccatctgaaagggaaatagtaggcggctaatgaaggtgttctcaacggtattatttgctgcctcaagaaaaaggaatggagcaattgtctgcaatcataaccagatgttgcaaagctctataagccttaatggctgttgtttcaatacagctttttaggaggggaaaaaatcaataacactaaaataaattatctatgggaagaatttactggccatttttcatgagaaaattactgtacagagacttaattgtgctttctgggtatggtttaaaagtcaaaaagctaacgaattatgtttgtacttgcatgtttggctcttgtgagtttatgaattatcactgggacatctgtagagcctttactactgaaaactacatgcgatgttgaattttaagcaactgcaaatatgaaagaaaaatgccatactctttagctgagaacatgtagcagtcctaaatggaacggatatgggaacttaagacttaaatgtatcaaaactatagattcttctcttaagttggacctttggtgacaacaagaatagtgagcaatccacgcatgaagctatctagatattttccggctactcagacatcagattcatgggcagactgcccatgaatctaactagtaggtgctgggatctgagttatgttttgaaagcaaaaccttacagtctctactactgtttccaaagggtggcccttggaccacatgtctcaatcacttgggatgcttattcaaagttcagattccttggccccaccccacgcacttgaattagaatctctgtgggtgtattctgcacagatatgtttcccgagtcattgatacacactcatagtattgattattgacaatgtctctcttcttaaacattcttcttagggccagatttaattctaatcaaaatgtgtagtacatatttacatgcacgactttgtctttctctcctatctctccccctcctatcctcggcttttcccaattcatttgacagcatctcctcgccacacccctatccttttctagacaatccattatccagtaccttgctttttactgttctctcctaacaccttctgctctctatgactgcagacactcagaatttggctattatgttccttgaaccctcaaactccattgttttgttaaaacaactgtcttggggttttttcggtggtggtggtggttttttttttttgagacagagtcttgttctgtcacccaggctgaagtgcagtggcgtgatctctgcccactacaaactccgcctcccgggttcaagcaattctcctgcctcagcctcctgaggagctgggactacaggtgcacatcaccatgcccagttatttttgtatttttagtagagaaagggtttcaccatgtcgcccaggctggtcttgaactcctgagtcgggatccacccacctcagcctccccaagtgctggattacaggcttgagcaaccacacctggcctgtcctggattttatccccacagctaggtcatctaaagcaataataaactattaagataatctgtaactcattagagggctggagaaaagaagaatcctttcttcctgagtgaccctcaggcatctaacagaatctcccctctgtaaagcaccaggttggccatctcttccaagggagtcaattaagtatgaatttttttttagctagtatgcttttaataaatatttgttaaaagaatggtgggaatttcagcccaagttgcagaaagtagtagcacgaagcataggtctgtgagataaataaagcttctagttcaggaatgaggaatgaggaaaggcttttgagtggcaggaaaatgatttaagagaaatgaagtcagaatatgctgaatgctccaaaaaagtcattaagacattggagggctatctagtgccctagtgagagagtagaaggtggggagggaggggtgtgtgtgtgtgtgttgcgggagggctgggggtgcagcagggcagaataattaactcttaaaggaacttaggtaggagttcaacagacaagtctgaagggattctagatgaaagaaacagcatgagcaaaaacagaaatgggaaaagcctgaacttgcacgtgtagcagcagtctgaactggagacaggcaggagcggggttgatgttagaagcattgaggaagcaaaatctaaagggaattgactacagctgtatgtgggtgtgtggcagagaggaggctggctttgctttcaagtccagctgacactaaatacatttggagtttgactgtgataatagcctcatctttctataagtattaaaactgttttctctggaagtctcacccatgtagagttcggctctcttgtagctctcatgcattagtgaaaatgcagctcctatttccgtccttgggttatttgctgaaagcacccatgtgatgattgtcttattactggaattgcccaagtaaaattttcaggaatggagaaagcgtatttgaaaattttagtctgcttttcttttgaaatgtgaagcatgattttcttgggtgagactagaaatcaaaggccctttaattgattgctttccatcagaaataagaagcgtcacgatcttgttgttttagtgaaggataaaacattacccttaggcaagaaactacaggaaaaaaggaaaataaacattatagttatgttacaggtaaagaaacaaggtaaaccacattaaggagtatcccttcttatccaggcggcatttagtgttaagtgctggaatctgttaatccaataataagatttaggaagaagaatctaatatcttatatttaaatagtaatctttctccccatggacattacatatatttttgaaatttgtattttaaaaaatctacccgcaaatactttatgttcaacatgcttttttgatccctgagaaatttttttaaatattttgtttcagtgacatttcttccaggattcaattccttttcttgaagagtttggaatgaaccaattacacatgggtattctggcgaagagtggtaggaatctttcatatcagtcacctggcctccttcatttcaatttaaaaatacttctgttaccttatttggcagcttgtctctgtatttcttcagcttgcataaagcagtaaattttgctctaggagaaaaattgagaagagattattactgaatttgagaagagattgttactgaagtctgcctattttaggtcctaaatttcatatgaaacaagacatttgattgtttcacccttagtacgttcacagttaaacatgtctcaggaactcactaagaacacgtactagaaacaagatagcaaataatccacacagaatgcagacagttaatctccaaagctttcagctgccacaaaagtgaactaaaaatatcagtaatatttctaattctgatgataattaaagtgcattctttaccccacagggtaaagagacctacctaagtttaaactataaatgtcactgtttaattatttatttacttattttattttatttttttatttttttttgagatggagtcttgctctgtcacccaggctggagtgcagtggcatgatctcggctcactgcaacctccgcctctcgggttcaagcgattctcctgccccagcctcctgagtagctgggactacaggcacccaccaccacacctggctaagttttgtatttttagtagagatggggtttcaccacgttggccaggctggtctcaaactcctgaccttgtgatccacccgcctcggcctcctgaagtgctgggattacaggcatgagccaccacgcccggcctagtttaaaattctaaaacacattagaagtttccatttttatgattttaaacttacttagccttcacaacacaagctagctaaggcatggcagatattcttattttgatgtgtgtgaaaattgatctcgtcaatggctaggggtagatccaacagcatgtaagtgacaaaaccagaactcaaatcctgatggtcttctgacttcaattgggcatggtgccaagagtaaaggatataaattacctccctatttttatacaaaaattcaaaataaggctgtcactaaagtaaacaggcacaagtatgctgcagcaatacattttaaaaatgtattttaacttttataaaatacatactgtgataccctaacttgtattagcttgattgactcttagctgaaaaagccagacagattccatttggctccttcatttgcaagacattaagatctccttacccacccccttcctcaaggacttaacttgtgcaagctgactctcagcacatcaaagagtgcaattaactgataaggtactgcggcaagctgtgtccacagttcccaggaattcgctcgggtgatagtataataaagcccccgcgtttgtgtccggagcccccacacctatcaccttgtgatgaatttaaagcccctgcacctggaactttgttttcctgtaaccatttgtcttttccattttttttttgcctgttttacttctgtaagattgcttcagctcagttcctcctgccctctctaaatgaaagtataagagaaaatctagccctttctttgtggccgagagaatttcaagtattagccatctctcagtcgccggctaataaaggactcctgaattagtctcaaagtgtggcgtttctctataactcgcttggttacaagaataccatctgagaatatttgacaaagatggtatatagtacttatgtactacatgttattttgaaatctgtgtacattgtgaaatggctaaattgaactaatgttcattacttcaaatttttgtggtgagaacaaaatctactcaggaattttcaaaaatatgatacactataattaaccatagtccccatgctatggttaattgatctctagaactcattcttcctaactgaaattttgtgtgatttgacgaacatctccccaacacccactcacactccagcctcgggtaaccactgttctcctctctacttctgaattcaattacagattccacatgtgagtgagatcatatatgtctttctgtacctgttttatttcacttaatgtattgcctgccaggttaacccatgctgtctcaaatgacagaatgtccttcatttttaaggttaaaaaaagtcatatataactcttctaggccaggtgactgatataaaggattctatcactcttcaccagaatacacatgtgtgactggttcattccaaactctcaggctcatatacattttcttgatccattcacctgctgatggacacttatgttgactctatatcttgcctattgtgaagaatgcttcagtgaaatggaagggcaggtacctctttgacatactgatttcatttcctttggttgtatacccagtagtgggattgctaggccatattgcagttatatttttatttttttgagggccctctacaacagtagtaaaggccattctgattaggtcaaccttgtgcaaaggttcccttttctccacatcctcaccagtacttagtatcttttgtctttttgagaagagtcattctaacaggaaggaagtgatatctcattgtggttttaatttgcatttttctgggattagtgatgagcatttattcatatgcctgttggacctttgtatgtcatcttttgagaaatgtctagttttgatcctttgcccatttaaaaattgagttgtttccttacattgagtttcttatatatttcgaatattaacaccttatcaagtatatgatttgcaaatattttctcccattctataggttttctttactctgattctttccttggctatgcagaggctttttagtttgtagtcccacccatctatttttgctacctgtgcttttgggttcaccttgaaaatatcattgcccagaccaatgtcacggagattttccagtatggttacttctagtagttttatcgtttcaggtcttgcttataagtctttaatccattttgagttgactttttacatggtataagataaaaatcaatttcattcttctgtatatggaaatctagttgtcccacatcatttaatgacactattctttctccacggtgtgttcctggaagctgttgggtcaattgacagtaaaagtgtggatttatttctgagctctctattctgttccattggtctgcatgcctctttttatgccagttccatgctgttttcattagcatagttttgtagtaaattttgaagtcaggtagtgtggtatctccagctttgttcttttgctcaagattgttctggctatttggggtctcttgtggttccatacaaagtttagaatttttttttattttggtggaaagcatctttggcattttcacagggattgcattgaatctgtagatttcttttgggtaagtataggcatcataatattaatattcttccaatccatgaccatggaatgcattttcatttatttgtgtgttcttcaatttctttcatcggtgttttatcgttttcagtctatagatttttcacctccttggctgaaattgtccctaagtattttagttaattttagtggctagtgtaaatttgtattgttttttattgatttatcttttggttagtgtatagaaatgctactgtttttttgtttgctggtttttgtatcctgtaactttactaaatttgttagttctaatactttctgtggagtttttagggttttctatttactgtcaccccaaaacaggagcaatctaatttcttcctttccaatctggatgccatttttttctttctcttgcttgatttctctagctagatctttcagtactatgttgaatagaggaggtaagagtattgtcttgttactgatcttagaggaaaaactttcaacatttccctgctgaggatgacattaggtgtgggtttagcatatgtgaccttcattatgttgaggtacattacttctatacctaagttgttgagaattattatcataaaaggatgctgggtgttgtcaaatgttttttctgaatctactgagatgatcatattgtttttgtccttcattgtgttactgtggtatatcacatgtatttatttatatttatttctgctaaactatcctggcatcctagggatacattccacttgttcgtagtataggatccttctaatgttatgttgaattcaacacttcatgcaccttcagagttggcatcatgtggatggtgcaaaggtttacatcttgtaccctctggagttgcagctcaagctatacctgggccttcttgggccacagctgaggctgccaaggggcactgcaccagagtgtggggacagagacttgatatgaacatgtgcaaatagctctgagatcgcatgggggccctaggctttttccttgaaataattcttccctcagagacctggtacttctgggccagtgatgagcatggcagcctcaaggatctctgagatgcctttggggacattctttcattgtcttaatgagtagcactggcttccttctgtctataggaatctatcaaagggtaactttaccacacccttggtttccttttctgaacactttttattctttatatggccagactgagaattttctaagtctttggttggtttctctgttgataataaattccatatttaactaatttctgtttgcattttattataagcagataatagaaaccatgcagcaccctcaacaccttgcttaaagttttctcatgccaaataacctagtttatcactcttaaattcctcctttcccaaagcagaagggacacggacacaattcagccaagttatttaccacattttgtaacaagagtggactttcctccagttcccaataagataatcttcatttccctatgaagacctaatcagaatggcctttattgtccatatttttaccaacattctgttcaagaccatttagatgttctctaagactgagactgtctctgtagctcttctgttcttctgaggtcttgcaagaatcacccttaattttctgtcatagcaatatagcaggttttcagcattcatttcagaaccattccagcctctacccatgacccagtttcaaagatgttcccacattttcaggtatttgttacagcaacacccaactcctagtatcagtttcttagtccatttgcactactgtaacaaaataccagagactaggaatttatacaaaataaacttttattgttctagagatgaagttcaagatgaaggaactgatcaattaagtgtctgataaggacctggtcttcatttttaacatggtgccttattggtgaatcctctggaggagattaacaatttgtctttacatggcaagaggaatagaagggcaataaagcaattccttcaacctggaaaaagctttccaatggagcttttgagtgttaaagccaaaaagatggctagaaactatgaattaaaaatatgacaggattttatgagaatgctagcaaaaagtcaggaatatgggacttcatgaaggcttcattcaaaaaagttttatgatcaaaatatcaaagcaccttgtcaatgtaagaaagtatatatatgtgctatataaataatatacagcacaatgttggtatcaacttgcaattcttagatacttcagtgtgttcagtagaagtatgtctccaagtcccatctgtcaacttttctttcatggtcctgattccaaatttagtgtcccaaattaagcttcactggaatggtcaattacttgactagggctagcacagctatttcaagaaaattctcagtcttttttttttttctgcaagttcgcagtttttacacgcatcatctgtttaattcttactttgtttttaatttgctttataaagttctaagaaatattacttaagaaggacacattacttaactttttcataatgtattatcttcaaaaatgtccacagaggtgtttttttcttttttttccccctaggactgtcctgccttttggtaaaaagagcctcccaactcccatcctacccatctttccactccatactacaaaagtcatggagacctcctatgctgtaggccagaaatcccttcctactgaatcaggctggggtgcaccacttaatagtttgatttttgtatcatgactgtgcttcatgttcatcttgaagagtatattcccatcatctaacaattcacaacaggatgttaagaaaggtatttttgtgttaagcaaggcattgttcagcctaaagaaaggaggaataaaattttacacattgtggtgttgaccaaaagtatctgagacaggtctcagtcaatttagaagtttattttgctaagcttaaggacatagacatgacacagcttcaggaggtcctgagaacatgtgcccaaagcagtctggctatggcttggttttacacattgtagggagacataagacatcagtcaatacacataatataaatattgatttggtccagaaaggtggaacaactgaaagcatggggacttccaggttatagggggattcaaagatttcctgattggcagttggttaaaagagtttatctaaagacctggaatcaatagaaaggagtgtctgggttaagataaggagttatggagaccaaggtttttattatgctgatgaagcctccaggtagcaggcttcagagagaatagatagtaaatgtttcttatcagacttaaaaagatgccagactcttaattaattctctcttggatcaggaaaaaggcctggaaagggaagtgggttctctacagaacgtagattttccctacaagagacaactttgcagggccatttcaaaatatgtcaaagaaataaattttagggttaaatactttgatttcttttagggcctgctatctgtcacttggtatcttattgccacaaagtgtttgctttgtcagtcttaaggtctccattttaatgttaaatgctggtgagctgtgcttgaattccaaagggatgggagtttaatgaggtatgtcgatcccccttctcatcatggcctaaactagtttttcagatatatttaggaacactcttgcccaagaggaggggtccatttaattggttgggggtcttgggattttatttttggtttacaatggcatagtgagatgataccagcaaagaagaggctttccccgtgtagttgcctatccattgtctactttcgtctttggaaaaaatgcctggtttccaggactgtatttcctcatagagctattaagaagaatgtggtagttgttgatctctcctacacattcgggttgttttgtttccaggaatagagctggtttaagttcctcacttcctttgaagaaggaaccatgggacttgctttggctcacaaacaatgagcagaagtgacctgaatcactttcaagaagatacagctagtgtaccactcagcatgctccctttccctgacttcgcaatcacagaagcacagagatggagcttcccttggcctggatacctgagtgagggtaatagagggcaagtggctctcctcaggtgatccatgaaaagtaacatgagcaagaaataacacccgtgctgttttaagccaatgatattctctgtggtttgtcattacaacaatcctcacagatagaagaatcaaatgcaataaaatgtaaaattgcttcaaaaagtttaaatccatataaacctaagctcttatttccataagagatgtctgttcttgttcataagatagtctctaaattggtcacattgtaagcatttttaattaagttcaggcttgatatttgtatcttatcaaatgatgtgtttcgtgttttgttaggttggtgcaaaaggaatgataaaaaccacaattttgcaccaacctaaaaatgatttcattacttttaatggcaaaaaacacggttacttttgcaccaaccgaaatactttgatacacaggattctggaagctgcctgcatagcttcctttgaaagtggaaacatcttatcacaaagatgccattgttggacagtacatagttataggataagggatcatcttgcttttccatgccagggatccatcaaaatgtagcaagaagttgctgccatcttcactggccattctggaaacttaagacaatttggccctcatgtgtctttgtgtacaactcaccgctttcatgtttttgcttggttacccaatgagaaagtggggccctgattaggttagaacagagttcggagtgcaaatcagctccagtgaatggcagaagtgcagttctaagttattttttaaatcacaggtaaaaacggtttggaggcctaaaataggtaagggttgtaaaacataatataatgattgactctaatagtttctttttaaacctaaaatacatgtcaacacaataaaagatcattagatgttttttcactatgtgcttctaaaaggctagtctattcctctttttccttcattatatttctctccgtgtatttgaactccatttttctgcttcattaaccttcaaagaagccatgtaacaggtgcttggcgcatgtaatttcaggaccctaaaaagatgtcttaagtaattaacaatcacataaaatatgcattattaatgcattaaggatttttaaaggactgttagtaattaatgctgttatcagttataactcttactatttttaaaataatacatttatctgaccttaagtctcatctagttgaaacaattgttttgactcagtttataatgttttcttactatttgatactttaagttatggggcttcttgtagtctaagctgacgtggaacaaaaaccagaagtaggttaacttctaaaaatgatgactgatatactaatatgtaactgttttagttcacctgggtagaatgatggagttaaagccttcccgttctaggcagaagagaagccactatttttcctttcattttttaaactctgctttatttgcctccccccgccctccaaaaaaggcatttagttcaatgggtttttttttctcccgggaagattagcatagcacatatgatgaagggtgcctgccctatttgagggttttttaaggatagtattctgatctcttaggcttaacaagcagctcttttaaagcttgagcaagcaataaaagcactccgtccctggggtgacccaagagtctaaagggattatgtgtcttcacctcagaggaattctgcctagcctgaagaaaaaaacagaatctatgaaaataaacctattgtgctgaattagaggcaacacgcatatgagatgctcagctaataaaatcagtatgagaaaatatttatacattttaatatgcttagtgtgttatttttgtttctcaccaggccactgtgagtgtggaaggtatctgcttaatcacgaccatctgcttggaaaacttatttaaagtagaagaaagatgcacaattagtgtgtttgtattaacataaacacacacatgctcaggacgactagtgttattttcccttgtaaggttgaaatccctaaaccttttggatccaaaaagctgatagttttgactgaaaacttccagctgactgcccttcctgaaatattccttgtacttaacgttttgcttagctagttttttccttttctctatttttgctgaaagaacaattgggatgtggccaagctggatgattcgggagactcagggagaaatgttctccacacaaaatagtcattgcagttcttctgggaaaccactggtggttcatttcagtgtgtgtccaaattgttattgtcttgtcagacttcaaaacctttcgtattttgagatgggaaagcatctaaattggtccatggaaaattagctgaaatgggagcggattatattcccagtcaacagcaaaagcacatcatcatgataaaggaattatatataataaaaagttacagtatctaaagaagttgcaaagatagacaagtcttctcagcatagctcattgggtgggacttgacttaaccaatccactgatttttttttcctttgtttccaaaatgcgatttttctactccaatagtgagagtattgtaaacgttaaattgtgaactatcagtgagaataatacagtttgtaatagattcactaaattagggggaaaaaataaatcattcacatagccattaaatcgcaaacccaacctaaaagctattacaaataagactaagatgcattgcaaggccaggtgtggtggctcacgcctgtcatctcagcactttgggaggccaaggccggtggatcacctgaggtcaggagtttgagaccagcctggacaacatggtgaaaccccgtctctactaaaaaatacaaaaattagctgggcgtggtggcatgagcctgtaatcccagctactcaggaggctgaggcaagagaatcgcttgagcctgggaggcggaggttgcagtgagccgacatcctgccactgcactccagcctgggtgacaaaagtgagactccatctcaaaaaaaaaaaaaaagatgcattttatttgttgctgacatggtaagtagtttagagaagaaatgtgccagtgtaactgcattatatgagtagtgagtaagtaagcatctgctgtgtgtaagactatatgctagttacactatggttcattatatacacaaataaaaactgatagaaacaatacagaagttggataagcttcccaaggctttaatagctagcattgattcaatagtagtgttaactcaaattcctcaacaaactttacaaatatttcctgaaaggagagccagaaaataaccttaaaagaaaaaggataagaaactctgtaaagtaaatctataaaacctaattcaattcaatggttcagaaaagtattgttgataaaagattgaactcattcacaacttaatcaccaatattatgcaaacacctatttacattgacggattacagtcattgccttgtagatattagctgcccacttaccctctgagcttcattttccttatctatgaggtgggggaaaatcagaatgcttgccccatagaattagcttgaggactaaacaagtgatacagatcaaccagtaaatcaagtgtcttggctacaggaagttctttcgaatatggaattcagatcatttctttcctatgtcttcccaattgcattgagaataaaacccaaacaccgtatcatggcctttgatgccctaaacatctggcaattgtctatatctctgtcctcaccttatgtcatattcccttcatgcagtgtgtactagtctcaagtcttggctgtgttctgataccctgaatccagcaaagaaatgctcacctcaggatccttgtctctcttgctgcctcttcctggaatgttcctccccatggcctctcagagatgctactgtcatcatttacattccagttcagtgtctccctcctgcaagaagactttcctgatgagcagatgtgaagctgttcagcccctcagctcacctcataacactccgccacattcatctggtttattttctttgtagactttatttatgactaaaagataactttcagagaaaggtaaaaatcataaccctcataaataaaaatgagcattttaaagattctattttatcccttaattaacatccaagcagatgttaagacgagttcaaaggacaatctgtagatctggcaaatttatatatagatcaggaacactgaaatgaatgtgcaaatggagactaaactggctttttatttggggtggggagagatgagggagaagtcaattttacctcactaaacttcaggtatacagatgctcctcaatttacaagagttacacctcaataaactcataagttgaaaatgtcataagttgagaatgcatgtaatacccttaacctaccaaatgttgtagcttagcacagcctatcttaaatgtgttcacaaacttatcttagcctacatttgggtaagatcatccagcacaaaccctattttataatacaatgttgtatatctcttaaaatttattgaatactaaaagtgaaaaaacagaatggttatctgagcactctaagtttggtttctattgaatgtatgtagcttttgcaccttcttaaagttgaacaatagtaagttgaactatcctaaatcagggaccctctgtaaaagaattgttttacattgctctctgttatctacaacttaaagatctgtaaaagtgctcaaagacagtgaatgactagaagcagatatcttctaggtagtgcatagttttccactgaatatgaattcacatatttcttctaggtcatatgtgaatttatttatttcactgtttgttttctttttaacccactcattcacccaaatatgccctttatgcaagcttcctgagggcagggattttaatttgtacattgatgaatatcaagtacctggaatcatgcctgatatatagtaattactctatagctatagttgatactttttttttgaaatatgtactatcttgttcacacttatattttcctttttccctgctaatttcaacattcttagacatttgaagcagagagaaactcagaaaacatcaaatttaaaccctttgttttaatttaaaaaaacaccaaaatttaggtctagaataatttgcacaatgttggcagagccagagttagaaactgctctcctgatatccatcctggggttctttctccaaccaaaattttcttaaatttgaataatgtaactcctttaataggaataaaaagcctgagaagtcatagaggcactgacttaagagctcagggtctatcaaaatatctttcagttgtgcttttcaccacaaaagacaagtctgtccttgtaactgataaaatattattgtagattattaaaatagcaaattaaaggaattttttttctcaactttttgaatacatcagtggattccagtttaagaaacacttcaccaaattgtgactctccagccaatctgacattgtagctttgtgtctttttttcaccattattctttgaaattgcgtttaattctacaaatgtctagatgtgtggctattaaaaataaggtcatatgagacaaaaaactgaaaaagttatagtcaactatctcagatgtagaatctggtgaaagaactgaggcaaatatacagtaattataataacaggcaaaatgtgtgtattggtcatggttctctagaaaaacaggagacagatgtagatgtagagttggcccctgcacaatgagggggttagggcactgataccagccaccctgagcagtgaaattttgtgtataactttgactcccctaaaaattaactgttgattggaagccttaccaataagtcagttaacacatattttatatgttatatgtattatatactgtgttattacaataatgtaagctagaagaaaggattaagaaaatcataaggaagaaaaaacatatttatccgttttcatttaatagtaatcataaaggtcttcatcctcatcttcacattgaataggcagaaggaggaagaagatgggttggtcttgctgtctcgggtggcagaggcagaaaaaaatccatatataagtggatctatgcagttcaaacctgtatgcaagtgtcaactctgtgtgtgtgtgtgtgtgtgtgtgtgtgtgtgtgtgtgtgtgaaagggatttattataaggaattggctcaagcgattatggaggtagaagtcccaagatctgaaattggccttcaactgactggataaggctcacccacagcagggagggcaatctgctttacttagtctacctattcaaatgctggtttcaactaaaacctctgacccccagaatcatgtttgatcaaatatctgggcaccctgtggcactgtcaagttgacacaaaattaactatcacatatgtaaatagccataaaaggtaaaatgtaatggctatgaagattttaaaggtttgcaagaagagtttacatcagaaagaagctactagtttcccttacctattcaattgtccactgaacagctatgtattgggcacttatatgggagagatgatattttaagggctgagattttaactccaagccccatctccacagagaatgcatgttctgacactgtgaaccacacctggaccatagagtcaccagacatttctccttgctcctctgttaagaaagaccatggccttggtgccccaactcccacaatttccttagctacttacctgtcgtctctcactttcaatgctcctggcagattagctattgcattcctcctctgcattcacccatttccagcatagccattagaaaggccaaagattattggtccatcctgggtctgtggtcacattaaggctttaatcctcctctctccttctgcctgctagggcatgctcatatcttcttgttaattttcactgagctcggactacacaggatcatcacagtcactgtggaagccactctgcatatgtgtgccctgtgtgctccatgacacctcatcatgcattcagtattattctatagctgcatatttagtacaggcattgttatatgccttacagacattcacatttgcacatcccagtaacgctgaagagtgggaattattatgacccgcattttgcagatgagaaaactggaattctaagatttaaaaaaacaaaacccaatgtcatgcatctaaatagtaaacccaagacttaaaattacacagcccagttctggattctcaattcttctggctgtgttgttctgtcctccataacatcagccacctcttcagacatcctgtaactaccattcctttcgttgaacttccatttcccccttctgtttcccttttccatgtctgcctacatactcttttattaactcttttctgactctaaacctgctcagctgtctctatcttggagaaaacaagtccttaagttaaacaaacaagaaaagtctttttgttcagcacattgttcggtttggcactgaacgctgcaaataccagtcaccttccctcccttcacaccagtttgcagaaaagtagcaagtttctacttttcttctatcacatctcctttccaaaccttgaatgtagcctacattcctcttactttgtcagaattaggcctttccatcccctgcagtgtccacgctgtcaaatagaatgagccttgtgctatgcgacctctgtgttctgcttgatactgtggactacggttatttggaatatttcagcattggtgtaacttctgcacagagcagtggttgttgactaagtgaggatggggtacaattttgtccccaagtctcttctgtcagtgttcccatgtatttttgatcaacatgactcgggtggttgctactggcctcaggtgagtagagcccagagatgccgcttttaaatacactacaatgtacagataacctcccacagccaaaaaaacttcccagcctaaatgttaatagccacaaagttgagaagcctttagatagaatgaaatgggaaggaaattattgaaattttgtgattcaaactccaagttagactcacctggcttatacttccataattggattatggaatttttttgtctacagtttgccagtttggcatctggcacagagcccaagagtttgaaatggttaaggtggcagacagtatgtcgtgaccaggttctgggtgtacgtcagaatataacatcaggtgctaaacaccagctacaaattgctaagaggtacgcggtctggatgtctttcaaaatctacctgtgtgccgtgatatctaggttggcagcagtgttcctattatcagtgctcaaaattcagcttcatgaaactaatgccagggaattttccacagaggaccttattctcctgatttctcctcatttctgacttgatttggaacaatatagctttagtcttctgctcatcactgctcaggggttgggatatttagaagttggttgcagatttaataaaaacaagattttattatattctggaatatctgaaaaataataaagcacagaaagtcaagcataattcctgatagaagaattgcaaatttcctatacagttgtaaattttcaacaaatacttgttgaatacactacattctttctattttgactcaatgatgatcatcacatacttaaccttgaaatccatggtcctctctaattccaagatttcttcagttaaatctcagcctggccccagtcttcctcagcttctacttctcatgaattctatgagcccttgctctactcaaaccagtaaattaaagtttcaaaaaatacctggtctgttattacttgtttctctgatgtaccagacttgtacaatagaaaaaaagaaaaaacacttctcaaaatttaaattccatacaatgaggccaaatcgttttaaatagtttttatggctagaattagagttaaatttatacccacactacaataagaaaatccttagcaaaataatggaaaagattgagaaaatgttaatttttatttaaaaaaaaactgcatatacctatatgtaaaacaggttcctatctagggatctgatgctggatcatatgtcatcacaccttttaaataagtagacaatgcttgtcaaaatgataccaaatcatttctctacttcatgtccttccaataaatcctgccgtacaaagagcatgtaacaatctgcattcaattaaggcttcaccaacaattagattatctctacaaagttaatttatgtgtgatcacatttaataataaagatgcttcatcaaaataccttccttccacaaatgtcctgaggacatcagttgcttttttgccttgcgttgtggaaccccttctcctaaaatcctgttgtcctaccgagttagacatttcttgactctccattgctatagttttctttcatttgaaattttctctctcccacgaagctcactgtatctctgctatggtgggtagtaaaccaaaaggagtaagaacattttggttttgaaatcagacattcaggatcttagtccttacaccttgatccttcctagccatgtgacttggcatgtgaggcttctcaaggtaagatggttgctgctacttccacttcaagcattccatccatgttccacgctgagagaaaaggaaagcaccaaactgaaagccttctcctagcaaggttttatctaggaatgggtactttctctagggacttctgattatattctattggctagaataatgtcacatggctaccctagattaaagaagggcttataatgggtttatttttccccatctacaatgttggagaaaatggagggattgaaggaagacggttatgatgatgctcactgagtcacccttcactctgtcatgggaggtatccctccgagggtgtgagagttccatcaatgtggaaggcttgataaggcatctttatccatttatttaatttcagtgtggtcatatatttaaaattacatattcttggttaggtggattcgttgattataatatctaattataacgggatgaaatctcacatagaagtgtcttaaaatgattcttgaaaggaaatcatgatgtgaatataaaatataaaatacaggacaaggtcattatcacacacaacctgaatttaaaaaaattaccatctaaacagatcagacgagaagccaggcaaaacacacacacacacacacacacacacacacacactgcaagatgaatctcacctgaaatgtatattagagcttgacataccagcatgaagctataatagtaagcctgaaaactactcagaatttaaaacttgtgaacatctagtatccagaacatgaaaataaacctctccaacttttttaaacaatgtttaaattcataggattctcagtccattactttaaattttttagtgaatttatagataaatatttagaactttcttatgaagttttctaacctaatagggaaagacgaaaatacatcattggggaaacacctgttcttttgccacagcataattggctgaaatgacttggaaaataatatggtataaaccgaaattcatttctcggcaaatgctatggaaagactcacggggaaaatattgctgctgcagatttggaggagatagcatttgaataaattatccagtatgggagaatggttatagaatagattaaagtaaaaatgtttcaacatttctcagcttaaggcagttttaaagactctttaaatgactatacaagtaactgcatttttgtgaaccactaaaggaaaaaaaaatcctccagagattatgtattctcattataaaataaactttaatgtagttcttaggagaaattgtgctataatttggtaataaattaattcaaaatcgtaatggcttaatatacgacaagtttattttttagtcacactaggtttgctatgggtctaatggcttcctcccaagaagcatcttctaagcaatgacctagagaactagtgtgctccacttttgtcctccatcagcttagataacgctgctaggtctccctagcaggaaaagaaagggctgaagtttcttgcaggggctttttactgcctttggcaacaaatgacttcggttaattctgcttacattccattggccatagttaattgcttgattaatgtcaagacggtgagtaatagagcttcctgtatgcctaggaaatataggaggattgaatgcctgatgaccactagtaatgttcttccacttcaataaacataatttttaaaggaagttgtgtgtaaaaatgaatattatggagtagtttctttggctggagcaagaaaaggattctgaagcaatattaatacaagatagtaccatatgtaaaactcatttactgcatttttcacagacaatgtattttagcaatgaggtagaagccacagtatcatcaatgaggttaattttaaaatacaaagacttttcaacacagtagaatcctcaaaatacatgaatgagatggagggtaactaggagaatcatttgtaattaataggagctttcctggaaatcttgtggtaatatatgatattgttatagaactggaagatgaattatgcacttgtaaaaataaaaaggcagagtttcaaatttgatcatttttgtgaggacaaataactgttatgttgcctgacataattttttggagggtgaaaactcaaacactcaaaatttacatttaatatttaataaaggggagatacttttgaataagaccatatggagaaaaaaattttgaaaacaagtatacaaaaatgtagaaatactttactcataattgaaagcattacagaaatactgcttacataataattcacatatacttaaaaacactttaaaggggatcttaaactcctgaagaatgaaacgaacaccattcaataattagtggatgagatttaaaatcatacgtgggatttaaaatcatatataatctacattatctaacccttttatttgaatcttatctgtgtgaagtatctttgactgtgttggtcaccgttgaatcaggtatctaaataaactgaatctggaacatcctaatgcccacatcaaaagcactcaataaaggtggatgggggagtggtggtggtggtacagcaacagggtagcccagttaggttgcacaggcccatctaaacacgtatgattatattattagaaccaggaaactggttactagaaaaagtactgaactgtagagagaaaatattaaatattcaagcacctcgcaacaccaccagttttatttgaggaatttctttaggcattaaaatacaacaataaacaaccacagtaacggtaataccactaacattcttgagcatttattgtgtgcttagaaatttgtgtatgaactcatttaatatagtcccatggcttaacacgtggattttgttcatatattcttttatcaaggttgtaaaatacctgattcagttctggtatcatatcatttttattttattttgaaacccatttttattttgataagaatacttgagttctaccctcttaacagatttttaagtgtataatatgatatagttgacagtagatacaaggttgtacagcagatgactaggacttattcaacttgctggactgaaactttatgcctgtttattaacaactcctcacttctccctgtctctgacccctggccaccaccatttacagtctttgattctaacaattttaactattttatatacttcatataagtgaattatgcattatttgtcttactgtcactggcttatttcacttagtataatatccttaaggctcatccatgtgttgcatattgcagaatttccttttacacctaaatagtgtccattgactgtatgtaccacattttctttattgatgatggacatttaggttatttctacatcctggctattgtgactagtgctgcaaagaacatagcagtgttaatatttgagctcttgacttcgattttttgaaaaaaaaaacaaaacaaaacacctcaggattgttggattatatgacagttatgtttttaattttttgaggaacctgcataacgttttcctcatagtggctgtaccagtttgccttcccaccaacagtatgcaagagttctaatttctccacattcttaccaatatttgttgtcttgttttttaaatagccattgtgacaggtttgaggtgatacctcattgtggtggtgattttcatgtccctgatgattagtgattttgaatgtttttgcatatacgtgttggccaggtatatttgtatgtcatctttggagaaatgtatgttcaagtcctttgcccatttttcaattggattactgttttggtttttttgttttattttttactattgagttatagacatttcttatacattttgaagataagcccatatcaaatatatggtttacaaatattttatcccatttcataaattgtcatttcattctgattttcttggtaatgcaaaagctttttagtttgatatagtccaacttgtctgttttggcttttgttgatagtgcttttggtgtcatatctgaaaaataattgccaagaccagtgtcaaggagcttttcccctacttttttgtaggagttttatagtttctgttcttacatttatgtcttgaattcattttgagtttggtttttgtatatggtgtgagatgcgtcattattttctatgtgactatccagttttcctagtcccatttcttgaagagactattattttcccattatgtagtcataacagccttgttgaagatcagctgaccatatatacttggatatatttctgggctctccattctgttacattgctctgtatgtctatcattatgcctttaccatactgttttgttttttttttgttgttgttgttgtttaatatatggtttatttatttgagacagagtttcgctctgttgcccaggctggagtgcagtggcatgatctcggctcaccacaacctctgcctcctgggtgcaagtgattctcctgcctcagcctcccaagtagctgggattacaggcatgtgccaccatgcccagctaattttgtatttttagtagtgatggggtttctccatgttggtgaggctggtcttgaactcctgacctcaggtaagcctcctgcctcagcctccccaaagttctgggattacaggtgtgagccactgtgcctggcttttttttttttaattattattatactttaagttttagggtacatgtgcacaatgtgcaggttagttacatatgtatacatgtgacatgctggtgcgctgcacccactaactcgtcatctagcattaggtatatctcccaatgctatccctcccccctcccccaccccacaacagtccccagagcgtgatgttccccttcctgtgtccatgtgttctcattgttcaattcccacctatgagtgagaatatgcggtgtttggttttttgttcttgcgatagtttactgagaatgatgatttccaacttcatccatgttgctacaaaggacatgaactcatcattttttatggctgcatagtattccatggtgtatatgtgccacattttcttaatccagtctatcattgttggacatttgggttggttccaagtctttgctattgtgaataatgtcgcaataaacatatgtgtgcatgtgtctttatagcagcatgatttatagtcctttgggtatatacccagtaatgggatggctgggtcaaatggtatttctagttctagatccctgaggaatcaccacactgacttccacaatggttgaactagtttacagtcccaccaacagtgtaaaagtgttcctatttctccacatcctctccagcacctgttgtttcctgactttttaatgattgccattctaactggtgtgagatgatatctcattgtggttttgatttgcatttctctgatggccagtgatggtgagcattttttcatgtgtcttttggctgcataaatgtcttcttttgagaagtgtctgttcatgtccttcgcccactttttgatggggttgtttgtttttttcttgtaaatttgtttaagttcattgtagattctggatattagcctgttgtcagatgagtaggttgcgaaaattttctcccattttgtgggttgcctgttcactctgatggtagtttcttttgctgtgcagaagctctttagtttcattagatcccatttgtcaattttggcttttgttgccattgcttttggtgttttagacatgaagtccttgcccgtgcctatgtcctgaatgggaatgcttaggttttcttctcgggtttttatggttttaggtctaacgtttaagtctttaatccatcttgaattgatttttgtataaggtgtaaggaagggatccagtttcagctttctccatatggctagccagttttcccagcaccatttattaaatagggaatcctttccccattgcttgtttttctcaggtttgtcaaagatcagatagttgtagatatgcggcggtatttctgagggctctgttctgttccattgatctatgtctctgctttggtaccagtaccatgctgttttggttattgtagccttgtagtatagtttgaagtcaggtagcgtgacgcctccaggtttgttcttttggcttaggattgacttggcaatgtgggctcttttttggttccatatgaactttaaagtagttttttccaattctgtgaagaaagtcattggtagcttgatgggaatggcattgaatctgtaaattaccttgggcagtatggccattttcacgatattgattcttcctacccatgagcatggaatgttcttccatttgtttttatcctcttttatttccttgagcagtggtttgtagttctccttgaagaggtccttcacgtcccttgtaaggtggattcctaggtattttattctctttgaagcaattgtgaatgggaattcactcatgatttggctctctgtttgtctgttattggcgtataagaatgcttgtgatttttgcacattgattttgtaacctgagactttgctgaagttgcttatcaacttaaggagattttgggctgagacgatggggttttctagatatacaatcatgtcgtctgcaaacagggacaatttgacttcctcttttcctaattgaataccctttatttccttctcctgcctgattgccctggccagaacctccaacactatgttgaataggagtggtgagagagggcatccctgtcttgtgccagttttcaaagggaatgcttccagtttttgcccattcagtgtgatattggctgtgggtttgtcatagatagctcttattattttgagatatgtcccatcaatacccaatttattgagagtttttagcatgaagggttgttgaattttgtcaaaggccttttctgcatctattgagataatcatgtggtttttgtctttggttctgtttatatgctggattacatttattgatttgcgtatattgaaccagccttgcatcccagggatgaagcccacttgatcatggtggataagctttttgatgtgctgctggattcggtttgccagtattttattgaggatttttgcatcaatgttcatcaaggatattggtctaaaattctcttctttggttgtgtctctgcctggctttggtatcaggatgatgctggcctcataaaatgagttagggaggattccctctctttctattgattggaatagtttcagaaggaatggtaccagttcctccttgtacctctggtagaattcagctgtgaatccatctggtcctggactctttttggttggtaagctattgattattgccacaatttcagctcctgttattggtctattcagggattcaacttcttcctggtttagtcttgggagagtgtatgtgtcgaggaatttatccatttcttctagattttctagtttatttgcgtagaggtgtttgtagtattctctgatggtagtttgtgtttctgtgggattggtggtgatatcccctttatcagtttttattgcgtctatttgattcttctctctttttttcttcattagtcttgctggcggtctatcaattttggtgatcctttcaaaaaaccagctcctggattcattaattttttgaagggttttttgtgtctctatttccttcagttctgctctgattttagttatttcttgccttctgctagcttttgaatgtgtttgctcttgcttccctagctcttttaattgtgatgttagggtgtcaattttggatctttcctgctttctcttgtgggcatttagtgctataaatttcactctacacactgctttgaatgtgtcccagagattctggtatgttgtgtctttgttctcgttggtttcaaagaacatctttatttctgccttcattttgttatgtacccagtagtcattcaggagcaggttgttcagtttccgtgtagttgagcggttttgagtgagtttcttaatgctgagttctagtttgattgcactgtggtctgagagatagtttgttataatttctgttcttgtacatttgctgaggagtgctttatttccaagtatgtggtcaattttggaataggtgtggtgtggtgctgaaaaaaatgtatattctgttgatttggggtggagagttctgtagatgtctattaggtccgcttggtgcagaggtgagttcaattcctgggtatctttgttgactttctgtctcgttgatctgtctaatgttgacagtggggtgttaaagtctcccattattaatgtgtgggagtctaagtctctttgtaggtcactcaggacttgctttatgaatctgggtgctcctgtattgggtgtatatatatatttaggatagttagctcttcttgttgacttgatccctttaccattatataatggccttttttgtctcttttgatctttgttggtttaaagtctgttttatcagagactaggattgcaagccctgcctttttttgttttccatgtgcttggtagatcttcctccatccttttattttgagcctatatgtgtctctgcaggtgagatgggttgcctgaatacaacacaccgatgggtctcgactctttatccaatttgccagtctgtgtcttttaattggagcatttagtccatttacatttaaagttaatattgttatgtgtgaatttgaacctgtcattatgatgtcagctggttattttgctcgttagttgatgcagtttcttcctagtctcaatggtctttacattttggcatgattttgcactggctggtaccggttgttcctttccatgtttagtgcttccttcagaagctcttttagggcaggcctggtggtgacaaaatctctcagcatttgcttgtctataaagtattttatttctccttcacttatgaagcttagtttggctggatatgaaattctgggttgaaaattcttttctttaagaatgttgaatattggcccccactgtcttctggcttgtagagtttctgctgagagatctgctgttagtctgttgggcttccctttgtgggtaacctgacctttctctctggctgcccttaacattttttccttcatttcaactttggtgaatctgacaattatgtgtcttggagttgctcttctcgaggagtatctttgtggcgttctctgtatttcctgaatctgaatgttggcctgccttgctagattggggaagttctcctggataatatcctgcagggtgttttccaacttggttccattctccccgtcactttcaggtacaccaattagatgtagattttgtcttttcacatagtcccatatttcttggaggctttgttcatttctttttattcttttttctctaaacttcccttctcgcttcatttcattcatttcatcttccatggctgataccctttcttccagttgatcgcatcggctcctgaggcttctgcattcttcaagtagttctcgagccttggctttcagctccattagctcctttaagcatttctctgtattggttattctagttatacattcgtctgaaattttttcaaagtttttaacttctttgcctttggtttgaatttcctcctgtagcttgtagtttgatcgtctgaagccttcttctctcaactcgtcaaagtcattctccgtccagcttttttccgttgctggtgaggaactgcgttcctttggaggaggagaggtgctctgctttttagagtttccagtttttctgctctgtttctttccccatctttgtggttttatctacttttggtctttgatgatggtgatgtacagatgggtttttggtgtggatgtcctttctgtttgttagttttccttctaacagacaggactctcagctgcaggtctgttggagtttgctagaggtccactccagaccctgtttgcctgggtatcagcagcggtgtctgcagaacagtggtttttcatgaaccgcgaatgctgttgtctgttcattcctctggaagttttgtctcagaggagtacccagccatgtgaggtgtcagtctgcccctacttggggggggtgcctctcagttaggctgctccggggtcagggatcagggacccgcttgaggaggcagtctgcccattctcagatctccatctgtgtgctgagagaaccactgctctcttcaacagggacatttaagtctgcagaggttactgctgtctttttgtttgtctgtgctctgcccccagaggtggagcctacagaggcaggcaggcctccttgagctgtggtgggctccacccagttggagcttcccggctgctttgtttacctaagcaagcctgggcaatggcaggcgcccctcccccagcctcgctgccaccttgcagtttgatctcagactgctgtgctagcagtcagtgagactccgtgggcataggaccctccgagccagatgcaggatataatctcatggtgtgccattttttaagcccgtcggaaaatcgcagtattcgggtgggagtgatccgattttccaggtgccatctgttgcccctttctttgactaggaaagggaactccctgaccccttgcgcttctggagtgaggcaatgcctcgccctgcttcagcttgtgcaccgtgcgctgcacccactgacctgtgcccactgtctggcactccctagtgagatgaacccggtacctcagatggaaacgcagaaatcacccgtcttctgcgtcgctcacgctgggagctgtagaccggagctgttcctattcggccatcttggctcctcctcttgttgttttttaagacaggttctcactttgtcacccaggttggagtatagtggtgcactcttggctcactgcagccttgacctcccaggctcaagcaatcctcctgccccccagatagctgggactacacatgcacaccaccatgcccagcaaatttttgtattttttgtagagatagggttttgctgtgttgcccaggttggtctcaaactcctgagctcaagtgatccacccacatttgcctcctaaagggctgggattataggcatgagccactgtacctggactaccatactcttttgattactacagcttggtaatgtactttgaaatcaggcagtgcgaggctttcagctttgttcttatttctcaagattggtttggctattggtggtttttgtggctccatataaacttcagaatatttttctatttatgtaaaaatgccattggggttttaatatagagattgctttgaatctatagatctctttgggaagtatgaacattttaataatattaagttttccagtgcatgaacacaggatgtctttccatttgtttttgtcttgttgaatttctttcatcagtgttttatatctttttgtatacaagtcttttaccaccttagttagatttattactaggttttttattcactctttttggcactaacataaatgggattgttgtcctaatttacttttcagatattttgttcatgtataggtattcagttgatttttttatattgattttgcaacctgcaagtttactgaattcatgtattagctttaatggatttttttataatggtgtttttagggttttataaacattaatataagactatgtcatctacaattttacatcctcctttctgatttggatgtcttttggtttttcccttcaattgctctggctaggccttctagtactatattgaatggaaatggcaagagtgggcatcctcatcttgttcctgatgttagaggaaacactttgtttttctctgagtataatattagctgtgggcttttcatatatggcctttattatcttgaagtaattttcttctattcctagtttatcaagagtttttattatgaaagaatgttgaattttgcctaacactttttctgtatctattgcaatgatcatatgattttcatgatttgctccattaatgtatcatattagttttcatatgttgaatcatatttgtatcccagggataaatattacttagcaacaatgtataatccttttaatgtgtggctggatttgctttggtagcattttcttgagaatttttgtgtctatattattcagggatattggcctctggttttcttgtgctgtcttttcctggtattgatattagactaatgctggcctaataaattgagtttggaattgttccctcctgttcatttttttttttttttgaagagtttgagaaggattggtattagttcatccttaaatgtttggtggaatgaacacatgaagctatgcagctctgggcttttctttttggggaggtttttgttactaattcaatatccatactagttatagatctgttcagaccttctatttctttattggtaggttgtatgtttctaagaattttcttctaggttgatcatattagtctctactgatcttttttatttctgtggcatcagttgtaatgtctctatttttatttctgattttgagtcctctctttctttctttcttagtttaagggtatgtcaactttgcttgtttttttttaaaaaaactgttagttttatgtttttttctgttctttatttcatttatttctgctctaatctttgtatttcctatcttctcctaattttgggcttggtttctttttctagtttcttgaaatgtaaaattaggttgtttgaaatctttcccctttttaattaagggacttatttttatgaacattcctcttagcactgcttttgcttcatactgtgagttgcatatgttgtatttttgtttttgtcttgtttacctaatttcctttttctctttctatcttttttttttttttttttttttgaggcagagcctcgctctgtcacccaggctggagtgcaatggcacaatctctactcactgcaacctctgcttcctgggttcaagcaattctccggcctcagcctcccgagtagctgggattacaggcatgagccaccatgcccagccctaatttccttcttatctcttctttgacgcaatattttttcaagagtgtgttgctaaatttccatatcctaggagcatttttttgttgaacataattacaagacaggaataaatggaagtgctaaaggtcaaggacactcttattaacatataaataatatataggcaatatataaatatttatgtagcaggaaagcactagttttatgcagcctcagggatacaatgcggtaaatcaaaatattcttcttttcacatgcccttttatttatgggaacacgtgatccagctctagccaaagagaggaaactgaaaaactcagaattaagcttttgggaaagtcagggcatatccatctgtctatttttggtttttaaaaaaaaatttacccaaagtttggggtagaatttggtgttagagatagacattttagaatcctcaccaatttaattttttaaaattaagttttgagaatactttatatattctagatacagataatttttcagaaatgtgatttggaaacatttttgctttattgtggcttattaattctcctgaagtgtcttttgcagagaaaaatttttcaacttggaagaagtccaatttatcatgtttttcttttatagatcatgcttttgttgagatgtctgaaactgtaactcaagtttacaaaagttttcttctaaaggcttcatagttttacacacttacattagtatctctgatccgtcttgagtttttatatcagttggaagtctagattgaggtttatttttgttgttgttcatggatgtctagttaattcaacaccatttgttgaaatgattatctgttttccagtgaattgccttagtgcctttatagaaaatcaattgatcatatttatgtgggtctatttctaaactctctatactgtctcactaattgtgtgtctattctttcacccatatctgattttcagcagaggagtaaacacagcaaaacatggaaataaagaccatatattaggttggtacaaaagtaattgcagcttttgccattacttttttttttcttttttctcttgagatggagtctctcttgcccaggctagagtgcagtggcaccatctcagctcactgccccaggttcaagcaattctcctgcctcagcctcctgagtagctgggattacaggcatacaccaccactcctggctaatttttgtattttgagtagagacggggtttcaccatgttggccaggatggtctcaaactcctgacctcaagtgatccacctgctccagcctctcaaaatgctggaattacatgagtgagccacagcgcccagccttgccattactttcaatggcaaaaaccgcaactacttttgcaccaaactaatagagtatttcaataatgcaggcaagaaatgatggtgtcttaaaacagttggtagcagcaggattgaaaagaaataatcgtattttggaaatatttagaagagcacataggatgtgcttcaaggtgcaatacagagtatgagtaaatatgagagtaaaaggatgaagtcaaggatttgggcctgaatgtctagaagaaaggtgtttccatttttctgagactggagacactagagagagacaggattgagtggaatgaagagttcagtagaggttaagtttgagagtcttaatttagggtaaagtggaacaaagttgtgatgccaagtagccagttctgtatatttgagaccaaagttgagggtagaaattggtgctacagatagacattttagaattctcgtcaagatgatgatattataatctgtggaacataatgaaataatctaaaaagatacatagaagaggtatgtgagtccaagacctaggacacacaatgtttaggggtctgggagacaggtaagtattgggaaaagtaactaaccagacataggaagttatatcaaaggacaaagataatagtattctacagtctaagtaaagaaagaatcagagccactgtgtctattagtggtttctgataaacagaataaggtgaggcctgagaagtcacggagaaatggacataaactcttttggtggcaggggaatggtgaagacctgcttggggttgatttaagaaatgggggaaggagatgaagttgagataacaacactagagttctgccataaaggaatcagaaatatgtagtaactggggtagaagttggagtctaggcagctatcaaggtaggacatattagtgcatgtttgtatgactttgggaaagattcagaagagaggtaaaaactggtgatgcaggtgcaaagcaacaactgcaagaggatatgagattgagtgttctacaaaggggttcttagactttatgaaaggacgaacaataaaaggaataaattataatgttcaatagtagagtaactatagttaagaacaatgtagtatatatttcaaaactgctattaatagaaatgaggacttgaaatgtcctaaagcaattgaaataacaaatgcttgaggtgatggatatcctaaacaccctgaatacaaatattttttaaataaatggggaattttacttttcataaaacagaatatcccagggctattaaaacaatttctcaatgccaccaacatccccaaatttatcttcccatccagccatctttagttatttatattttctaccaactttatacctattattctgtagtctactttgaactaccggaactgggactctgagtaagaagggattgtgtttatcagactcttttagcagctggcttcttgttaaattctgccgaaaaggaggtgtaccgataaggggtctgagagtggaaagaaggaggaacaattttgattctggctccaaacacattgacagttgctctagtagctgctggttgttgaagagttgtggagaccagatggctgtgcatttactcctgcaagccaactcttcatggctttcagctctggcaggggcagcattctttggaagttctagttccggcatgttagaaagtgcatgccaatgggcttcactgctaagatgatagcaatttcctgatttcagggtgacatcttgtcttctttctgctgctccagcccttttcatgcattttaattgttttactctattaagttctttctgcttgaaatacttaatgttttcttttgtttgttttcctctgtaggtctttactgatacttggtaacagcagaggtatctgaggaaaaaggttatcaaaataagaatataaatggacttgaaaaaaatgatctcattaccagtggaaaatatgatactgataacccatggcattctttattttcacaattaactcatgtattatctgttgaatcctgggaaagagcacccatagaagacaaggcttggggggccaattgaacactgaacctgaccattacaatggtaatggtggcttaaggatggtgaaatgatttgagcacttctaactgcatcagagagcttacacaaagaaaacaagcttaaggcttaaaactttcagcatcagcaaggattgagagctgaaaaccagactcaaaatttgtttctgtagtttgaaaactataagtagtatttgtatactttccaagtctcatgtgaaaattagggtcttaattgaaatggagataaatgtttagaattgaaaaggaaatcttcgggtgaaatctgaaaaccacaagcccctcaatttcctgagcacccttgccagtacaagaaattcttcctcctttactacagaggctcacctgcctgaagatcccctgaagcaggtgccttgtgagaagatgctcattctcccctagacccactccaatatacccaattccttctagacccattaccagagtcatagtacagaaagtcctggaaagacatgtaaaaattctaactaggatatagctaagtttaaactaaaaagtaggaaaatgtgcattttataagagccaaaacttggaaaatatgtgttggaatggattctaagaatcttagtgggagcttgtggagatcagcagtgaaatggcgtggctagagtagtttatctcacagtggacccagcagttctgcctagtcattctgtagacatttccttggttcctaaatgcagagttggaacaggcatactgagaaaatggcaaaatcattacattgtgttagtccgtttgcgttgctataaaggaatatctgagactgggtaatgtataaagaaaacacgtttatttggttcacagctctgcaggctgttcacgaagcatggtgccagcatctgtttctggtgaggacctcaggagcttataatcatggtgaaaggcaaaggcgagccacaggcgagagaaggagcaagagagagagggaggaggtgccaggctttcttaaataaccagatattgtgtgaactgataacgtgaaaactcactcattgtggtgaggactgcaccaaaccattcatgggggatctgcccccatgacccaaacaccacccactaggcccacctccaacatgggagatcacaattcaacatgaggtttggaagggacaaaacactcaaactatatcacttggttccctgatctgtagagtgtgggtatttgtggtttttatttctgtagaagcccaaggaatttctcttctttatcagcatgtaagccagagccactgctttatctgtgggaatacaacagaaaataatgccctcatagaagacgagagtcgaaggggtaataattcttatcacatcctcatttaaccgccccatttggcaaatcgattgtagagaatgactgtggagtatcgtaaattcaattaagtagtgattttaatttacagctgctgttccagacgtggcatatttacttaggcaaatcaacgcagcccttgacagccgatatgcatactgattaagtgcttttttttccccctctatattaacattaaggactaccagaagcagtttgttttacctggcaaggaaagggcggtatcaactcattaactctcctcctctcagtcataagggtgtggagaactttgacacttttgacatcctatagatcattcattacactgactggactggaagaacagcacatggccagtatcctagaagccttagtaagacaaagatgtgctagagggtgggtggtgaataccatgaaacttaagggctctgtctctttggaaaagttactaagggttcagatgtctggggcttgttgggatatcctttccaaagtgaaagacaagttgcctaccattaagaaagaggcactttttcgtgtgtcttttggtggggggaggggggagggatagcattaggagataaacctaatgttaaatgacgagttaatgggtgcagcacaccaacatggcacatgtgtatatgtgtaacaaaactgcatgttgtgcgcatgtaccctaaaacttaaagtataataaaaaaattttttaaaaaagaaagaggcatagtggtctctttgaatttaggaaatagcttataccaatttgagtgtgctgccctcattcatctgctaagcaactgacagtgttgggtgagacctggagcaaaacaaggtctgcattaggtccaagctgcggtgcaaactagtctaccatttagggcttttgacccagctggcataatgctgctgaaatctatgacaaagaggcctatgtatagacctctggctcctgctttttaatgagcccaaatagagtctaaatatctggacttggaataccaggtgatggtacaacctgagatacccatcatcaaccgaatgacatctaatccaccaaatcataatgaagtacgtggacattaacactcttttattaagtgaaagtgttatatatgttctgaaccagtgactacagtatggtgcttttaaattccacagccaaaatgccacaggttcaagaatcaaagggtagaagtggaaggtgttcctcccattattatttttaatagcctattccccaaagtgctgctgcttcttcctaaaaaattgggctccactgggtcagttatcttagttcctaagagattatatgccagtatgtattaagtacttcaaaggctctctgcaacttagtgaggcaaattaaattgtcctcttctcacaacggggatcaatataccactggtaggggcagtactgggattgaacccaggttctttgggttccaaagactttgctctttctcactatgtaatttcagcctaaaagatagctgcagaatgctgctacttcatgttcttggtaccagaacattgagcccttacccctaccacagtgaaaaccgtgtcatgctggcaccaagcccatttgttctagttactatgaccgtgtagcagccacccccaaataataacttatagtttgttcataactccacaatttgggtagggccctggagggacagctctgttctacacggtgggagcttgaaggttgatggctagaatcacctggagaattattcactcacacgtctgtggttgatgcaatcacctaggaccttaatgggggctgtaggctgggacacttaggcatagtctctccatggggccttggctagcttacaacacagtggctagcttccaagggtgagcatataaaaaacagacagccaagtagaagttgtatggcctttgatgacccaacctcagaagtaatatcattacttctgcttctttctacttgttcgacaaagactggccctgttttaaggagaagggaagtagcatctaggatgtgatggaaaagtggcaagattctagaaatgcatgtgagaccagagatattgccattactattcttgaaaaatataatctgccacaccattaccaaggctaattgaggagtgggactaaacttaaaggtatatttacagactcagccatggttaattcagggactatggtggtcttgtctgtgggcagcatctatggtccacaggaagctgaaaaggtaagccaagatgctgcccacagacaagaccaccatagtccctgaattaaccatggccgagtctgtaaatatacctttaagtttagtccctacccccatagaaagaggcccctctactcaatttatgatggcttttgagtattctgcccaactgtctttgagtgcaacaatgaatttttattgccttctttgagtagcataacatcaaatgtcatggggatttttacgaggaaacagcagtaccttggtcccactctgtcatataaaataaagctattactaattacaaaatcattttataaggtagaaaagtaaaggagatacatgcggaagtcatgttatgtacagagggcaaaaccagccaaaccatctatccttatttcctaccagaagttagaaaagagatataatagtttgatatatgtcatgctgtatgagtactgacacactaaacaaggaacaggacagagcggcaataaaaattggggaatgacactcagtgattacctaagtaattccttgacctggtaaacacacgtttcaccagtcctcactagttcctaggctctcagcaacctgttccaagaaagtacttagccccttctctatcactacccggagtgtcttgaggagtccccaggagtcgaggtggaagaggaggatgcttcatgtgttcatagataattatcctgtggtctacctacttcctgttagaactccaatttccttgccaacattttaatctcgtaatgccccacaaacagcaagacctcctcacagggcctgtgcaatgtgatatatgaagttcaggggagatctcttctaatcagccagttatagatagtcattctctggacctctcatccgaaccacatgaacccagtttatccagcttctcctccattaacctggcacccacccaaagctttgggctggacactgacagcatagagcagtttcctgcctacttgttcctttgggcactgcacaggcatcacctgtgttcttcactatgcccagaggagtttgcatccctttctaggctcagtagacggctcttaattacaagtacctccgttttgtcacttcttaaataagtctttccaatgttctctaaatgtcatgctgggtcataagcagtaatgagatttggtgagaaaggcaggactctggtggcctggaagaaagtctgttgtagctgcaggaattattcttggaggaacaaaaaaagttggaaataaagacaagccaatgatgagattgcaggagaatgcagcttgaagcttggtcagatacataggaaccagccacctgatagtggctttccccatcccccaagtcccaccttctctcagcatgggagagctagataagggcaaaagtggaaccactgagtacaggagataaacatttctaaaatgtgaattttggctgggcacggtggttcacgcccgtaatcccaacactttgggaggccgagatgggtggatcacctgaggtcaggagttcgagaccagcctggccaacatggtgaaaccccatctctactaaaaatacgaaaattagctggatgtggcgatgggtgcatgtaatcccagctacttagaaggctgaggcaggagaatcacttgaacaggaagtggaggttgcagtgagctgagatggcaccactgcactccagcatgggtgatagagtgagactccatctcaaaaatcaataaaaataaaatgtgaattttgtcttatctcttcttgattaaaatcttgtggtagcaccctattgccttttgagtaagagcattaactcctacacatggcatataaggacctccctaatcaggtccttcctaccttgtcagcccccttgtctgtattcatttgctagtgctgccctaacaagggaccacagactggggggctctactcccagtctacttcctttgtttctgcacataagttacttaacttccctgaacctcagtttcttcatctctaaacatggggttagtagtgccaattctgaattgatgtaaaattaaatgaggtactgtattcaagtaaaataatcataatcattagtctttagaaattgatgacatggaaacatttttatatttaatgtgaagacaaaaattgtatggaattaggtctaccatatgagctcaattatgtaacaaaaaatcacacacatgcacacaaatatagacatttagaaaaatgagtggaaacaaatatacttctgttagttgggtcttctagaagcaggcattatgatggaattaggattttaagcactttgtgggagtaagacctgtgagagaaaaaaggaagaggaagcaggattgggcagaaaaagccttcagacaagtgtgtgtgaaaggaaagaggagggagagcaggactggacaggaagggttcacaaaatagatgtgacacagtctctgccaacccagtagagatctctggagcaagactgatcattagagaagttccctattaagcaagattggccaggccctggtacctccaccatgctcaagtatagttactggctggctttgcctggaaagagcatggcctcaactcaaaagctggagaggatccctgatatggtttgactatgtccccatcccaatctcatcttgaattgtagctcctataattctgaggtaattgaatcatggcaacggtttcccccattcttttctcgtggtagtgaataagtctctacttttttagaggtttccccttttgcttggctctcaattctttcttgtctgctgccatgtaagatgtgcctttcatcttctaccacgattgtgagttctccccagccatgtggaactgggagtccatgaaacctcttttttttttttttttaataaattacccagtctcgagtatgtctttattagcagcgtgaaaatggactaatacaatccccgaggtgtttcatatctggaggctgtcagcccattatgcttcttgcagctgtactgtgagttctttctggaagggagattcaagtggcttacctccgtagcagtcacacccattactctttagttaacgagagtaagaactatctccatttttttcctcataattttctgtgttttaaagaattcttatacttcatcattcattctcttttaatcagatatgtattttaaattatacccagaaaaaaagtatatttcttttaaatacagtaagatagcctgtaatactaaaatagtactagtttttataattattatagctaatatttgttcaatgcttattgtatgccccctggtatactaagtgcttaacttgcacttttttttagtccttgcaaatgaagtattcttcccatttcatctgtcagcattcttagaagaaaacaatataactttggttaacttagaaaagaaattgcttggatgaaattgcttggatgggccaggtgcggtggctcacgcctgtaatcccagcactttgggaggccgaggtgggcggatcacgaggtcaggagattgaaaccatcctgactaacacggtgaaaccttgtctctactgaaaatacaaaaaattagccgggcgcggtagcgggcgcctgtagtcctagctactcggtaggctgaggcaggagaatggcgcgaacctccgaatgggaggtggagcttgcagtgagccgagatcgtgccactgcactccagcctggcggacagagccagactctgtctcaaaaaaaaaaaaaaaagaaaaaaaaaagaaagaaattgcttggatggacataaggaaactacagccagcctacaggaaggctgaggcatggtctagggatcaggggacccgggagtgcggcagtgcagctaggatggatgctgcctcctgaccgcaccacactgccgtggctgtgctcttaccatccattcttcatgtccctttacaggtgtgtgctgtgccctccagaggcaaagtctctgcaggcagagttgttggcccatacaaggtcatattgcagttgacaggatatctggcctctttggctaccatggtgggaagatttacaagtggaggatgctaaaaggaaagaaaaaaaaaaagggagtatgatgccgggtagaaagtagaagggaaggagtcagagaggcagagaaggaagatgggtaggagagaagaaaggacggggaaaagtgacgagaaagaacaggaaaaagaaatgtcttctattttcattttataggtgagataacagaagtaaaacaccttcctctcagacattcagatgataagtggtagagccaagattcagcaccaggcagcctgagttcagattctgtgactgatttattttatttatttagggtttttttttttttttttttttttgagatggagtttcactcttgtcacccaggctggagtgcaatggcatgatcttggctcactgcaacctccgcctctcaggttcaagcaattctcctgcctaagcctcccaagtaggtgggattacaggcatgtgccaccacgcccaacaaatttttgtatttttaatagagatggggtttcaccctgttgaccaggctggtctcgaactcctgacttcaggtgatccacctgccttggtcttccaaagtgctggtattacaggtgtcagccaccatgccctgccaattctgtgctttaaataatcctactattcttgcattccaggctctgagaggccagaaaaagagagaatacactaaatactaatttctaatcttccaaggtcaccttacttcctagactctgcagcaatccagactgaacccataattatatactggtttgacttgaccactacttctgttccttagaaaaaccatacaccagttgagagaaccaagtaccctgagaacatgatgtaagccagagaaatttttttaaaggctgacttcaagtgcagaatggaatattttaaggtaaatcacacttgcctctaaacagctttttttcaggtctaactcacagcctttcttacctgctcaccaggcaggagcagcagctagctgtaattgttgctttaatacctcaactctggtctttgtatgaactaccgtaaataaataaatgtgtgaatgaatgaatacatgcatgctttcctcaaatgagtatgcctttccctgggactttttttccacattgataaaatctacttttttttttcttgaagtatttaaacagtttctaaaatgagatctgccacttggagactcccatgtcttaacaaaactgttcattatctctttctcttaacatactgcttcccatggatttttgttgaaaactcagtttgtcagttgcccggactttgatctctgacaatgtgacactggccatttgaatttccttctcctactaagagatacttttagcatatctgttacttgtgactcgtcttctgcctaccactcttaagttctggaaagactagaattgttcctgaagtgctcaaaaaccagatggcaacagaaaccagaatgtaaacaatcatccctggaattggggtgatgaacatcttaggaggtaagcaccagggcatggccacaagaactcttgcttttgattcaggagagctgggtttgaatcccagtgccaaaatgcattaactgtgtgacctcgagcaaggcacttaacctttctgagccttggttcccttatcttgtaactaagaacactaagctgtgcctctcttgggagctgtgaggctcaagctgaatggtgtgtgtggttgagtttggaactagagagagatgtataaagaatgctatctttgttgttgtgaacagtctggaaggagtcttagaaaactagaagagtatgtttcaagctttctgccttgcaacaaacattaagttttcctctggcaaaccccaaatagacctttccaggcagtggccaatcatagacaatactgtgagccaggaagggaccatccctggctatcaggcagcatggtgccccagctatggttcctgactaacacaacaacgaaccttgatgcaagcaaaacagtgggcagctctgcccatgttggagctgtgaaattgttagtccgtgccatttctaggacgactcctctgcacatccatgctgggtgtagacatggggaaaaagctgcttaacatgttatgttcttgcactgtgcttttaacttttccctccataccctttattgcttactatagtcatgtgtttatgtgagaaaatgtttaatgctgatgtctttcctacattttaagttcattaagggaatgggagatgctcattttggacactttcaagttctcaacgcttctcaaaatgtcatcaccaactagtcacttaaaaagaatttactgatgcatgaatagtaaatatgtatttttgagaaatttaaaaaccaagatagtattacactgtcatactgtgtgggaatatttgcttttccttttggatttctgttacaatagaatcataggagaggggattaacttgataaggatacaaggatcaatggaaacatcatattatccctatttcatattttcattgagtagccaatatgtactgagataatgtatgaaaaatgtattttgctgcttcttttgtctgtctcctttaatttctaaaacactaacacagcagtgaagtatttaagcttttgttcattcttcaaagagcctttgggaacattgtacctttagacaggatcccagaatctcagggacacttgtgtaagtatgtgacattcatccttggtgaaaagaaactatcataaaaacagctgggaaccctttattgagtgtgttcagacatttcccaactcctatctcattttccatgtacagacaattcatgtacccaatgacagataaaaattttgaagagttgttttatgcaaaacatttccaaaaagtatctacaatttacctcatcaggcaagaaatatgaagatgtatatttttctttttggttgttaaaaaaagtgctttctgaaatgcactgtggcattgattgggaggaaaagtgagttttagtagctctgagatactttctaccccaaccatccgtattaaagttccatcataaattcagaactttggttgttccatgaattggatgaagcatgctatcatggcacagtactttgcaggcctccagcaagcccaacaactgatggtttacagctgtcatggttgcagcagtgggagctaataagaaaatctctaggatgtctattaaagcaactagaatgcagaataagaaaaccaaggtgagtattctgtcagagataaggacctgatttaatggaaaagctggtgctttcatgccactcagccaaggcatgtattgagaggaagcattacataaataatgccctgatacagcttgggcttctgccaaaatgctaacggatgtgaacaaagaccaaaacaacatgtcaaaaaagatgttttttgttttttgttttttttttaaaccacaaataagtagataacatcactgcccatttgcagataggcatgctagtttttaaaaaatgttacaaggatttttatggccccttaagttacattccacatacgggtaaaactgaagctatttataggccaagatgtcttggtctcaagaaactcatagtacaatgaaaaaggcaagtaaaccagcattacatagtaccaaaaaggagctagactagaccaagtgcatcatagagggaagagtttgtgtcttcatcttagtatatctccagctcttagtccaatgtctggcacatacattcagttcttactaaatactgaaatgggtaataactgaacatagagcttcataatacaggagctcagaggaagggacccttaatcaagtccaagtagtgggggtaaacagaagatcaaaaacaactttacagaggaagtgacttttgtacagaattacgacagtttggggctgaacaagcaaagaggtcaacaacactataagcagcaggaaaagtttatccaagaaagaggagagattaagagcagggcaatttcctagatttgcaaataaaatactttgttacgcaggtagctatgtagcacaaggtaggtggtagggaatagacgtggagttttttgatggacagagaccagatcttgtatgctatagtgaatttgaatttcagcctttcttaaacaaccatcaaagcattttaaacagtaaactgacataactggatatacaatgttaagaagactgctatgatagctttgtggaagttcactcagctatttggggctataaaattataggcagagtgtaattgagaggttttgagatgatctaggcaaaacttaggggagacctgagataaggcagtaataacaaggatagagagctgtggactcgtttaaaagcgggctcagtgactcacgtctgtagtcccagcgctatgggaggccgaggcgggcagatcacctgatgtcaggagttggagaccagcctggccaacacggcaaaaccccgtctctactaaaaacacaaaaattagccgggcacctgtaatcccagctactcgggaggctgaggcaggagaataaaataaaacaaaataaaaaataaaagatatatgggaggtagaattggcaaagactagagattatatgtaggaagagagaaaaacaggtgtcaggaaaaatgccaaatgctcaggtttctgacttgggcacctggagaaggataatgccattcattgaggtagtgaacactggaagggaagaatttggccaaggtagatataaatggattctcttatttatgtgatcagcttgagggtctggggaaattcaaactaaggtactcaacaggttgtggaatatttgagtctgtgtattatagttcataaaagatctctaaggctgtaactttgagaatcataagcttgtaacttgtaactgtagagagtctagattagatcatgcataagattacatagaatgagagaagagcctgggccagagccctgaatgaacagtaagagggacaggaaaagctcttctaaatagcttgtatccagaaaaagctgcataaacagggaaagaaagaaaatgtgggtggctggggtatatgtatatccattaaaggaatggcacaacgacaaaacaggtaaatcaagggtagatcaacatcttagctctcagaaatatgatttaatcttaaacttattgtctccaacatctagctttcccagatcatagattaaatgtaccagaattataaaatctgtttttttctctcatgcaagtggcaaaaaaggtaccttttagatgatgctagcaccataggacatccccaaagacaagtatctcctatttgagaagcaagatgtgattgtaacacattcctgtctgtctttcctgatgaggctcctgctgcacattttgggatttgtttttttatgatggtgggggtcggtggatggagtctgaaagtaggaacttccaaaagatgctacggagtgtagaaaggtttaacctttatatatctttggaaaagtatgctcttgaaaataatatattgacatacatgtcacctatgtccggagtggtgatgggcaccacgtgatcaataaggtttccatcaccccagatgctggggattttactgctttcctttaaacgtgttttctgagaaggtgttttttataatgctctttctctagttaagttggatattttgacaatgtaaagtttgctttatttgtgagccttggcacttaatctgatgagtttattcccactttcactgccattggcaatcatgttgaaaatggaaatcagctcaatgaaatctagaatatccacctattagatgcagctgagaagcctaaagtggcctggctcaggacaggttcagttttgattaaactaaacacaattcgtgcccaattctattactaagtaaaatacttatttatacttgtttctggatataagcattcttttaaatgtgtttttttgtacattacatgtatttttcacaacaataaaggcagcatggaccatatctgtattagaatagaagagcgaggacttgaaaacaaggaaacaagcctacagaattttctataagaaatgcccaaataaaagtgaaaaaaagtttaaaaatcagtggatttcttttcaaacaaaaccacattttaaaattttcttcacatttattatttcctcactgctaccctgtttaaggcaagacttctttcccccgttttacagatgaagaaagtgaaacaagaacactgaatgacttgacaaaggtcagatttagagaacagatgagaatttaaacccaggtcttccatattcacctgccagaaatcattctttattccatggaaatggagaagtagtcattcttaattctcttacttaagaactgattaggaagtcatgcatttccaaagtacgttgaaagcctctgaatcaccatccttagggaacacatttttctcgaacaaagagacatctagattttttatttggtgttcattaattaaaaacttcttaataagtacattttacaggtgaaattcaaccattctaccaaaaacaatgtttattacgtgtaacaagaatcctggttaatcattttttccttttaaaccactcagtagccaaacttagaatcccctatcttattctttttggttttatgaactcgtctgatatgaagaatctaggataggcaattgactgagttcacagtgacctcatttcaactgggaacataatttaatgaacatttcttggcaaccgagagaatatttttctagctacatgtgaaggttatctttacatatgtaactcataggcaatacatatgtgtatactgtatcatgtgtactatatatatgtgcatcaggatatatatacacacacatatatgtggttattatgtgtgtatatatatcctgaagcattcttccttttgttctgaacaatttcttattcttttaagaggttagatttatttttgcaccatgactgagactaaatggataaaagtgcaattagattctatatcatactaaagactgagcaattagttccatgtaaaataaggcttatgatatatttttaagcaggctttttaacaagcctttgtaagagtttactatttaatgcattctgctagtgtaatagcactgaactgcactaagcttactgctcttttaaaaatcaacccaaatttctgctcatttaattcatggttgataaggtatttgtacatgaacttgtcttacatgtcattccataatctgggaacataaatttaactcaaatttttgttttgtgatattggaatttttagctaaattaacaagtccagcatattggaatttttagctaaattgacaagtccagcataaaatatatattgctggtagcttaatagtttaattcatatattaaactatttcatttaacatattttatattgaagttttatcattcctgtctcagaaatttaattttggcttaagatgtaataaatgctgtcataagacttggacttcatatttttcaactcctgaaaatttggagacccctgctttgccaaatcacagcttcatatgttacaggaagaatagcaatttagaaacctgcatttttttttctctgtactggccaaaaacctgtgcccctggagaaaaatgatcttgacaaaacagatataattcatttggatatttagacaaaagaataggcaggattaatattagaataaagtttatttttttccaattccacatgattaaaatgcttagttgtacaaagatcgcctgtcatagaggtcacatattgtaaaaagaaaaaattagaaaagtataagtatgctcatttgcccctattctctagaacatagtcattgtgaaacttttggatcttcatccatgaaatgggtgaaaatgtcacatttggtgtcatttcaatttttatgttttatgagtgatattatagatacatgagatacataaacgtatctatttgatgcatttgggttttatccaaataaaatatatataaatttattccactgaaacataaatggagatatggcttcatttattgcttcatggatgttcggacatcaattatatgtcccatttcccggtagactaaatttccatataacttaaatttttatagtattatgtaacaaagccttaccattttcagaattggcatatcaatttttttcttattcttgcatttcaaactctttctgaatcttactttttccacatgaactatagaattacctcactaatcttatctcaccccaaaaaattcatgctagtattttagaataaattttattgatacataatttacataaagttaaatgcacccattttaagtgaacagctcggtgggttttggtagatatgtgtaactggacatttccgtcaccccacaaagttctcttaagcttctttgtagcaattctcccatcctggtcccaggcaaacacggatctgctttctgtcactgtcgactaaaatttcatgtaaacagagtcaataccataagtatatttgtgtctggcttattttattgagcatggtgttttggtattcatccatgttgtgtgtttgaagcagtttgttctttattgctaagtagcattccaccgtatgagaatgccactttcatttgttcacctgagaaaattcatggggtcaaataatagctaggcttttagtgtgaggttcgatgtttatctggttagaagtaggcagtggttagctgtacagtggttgctgtagctctggtatcagtggctgaaatctgctctgttatcccttttttgactccctgttttctttgggttttcttaaagactccttaaatagtcttaggcttagaattctttagctgtaatcccttcctgttattatataggagccctactgatgtgaaggggggggggaagcaatctacagtccagtgattagatcttttagtgagcccgagttagatatttcccttcctccacatcaaagactataaagggctggagttgaatgcttcccttccccccgggctagttaggctttggtaaaataccagctggctaggctctggcaaaataatttccttttccgggtggtcttatttaaaaataacagaaagttccagctgtatttcaaactggttactttttccttcctcctgctggttcctggaagtaaaactcacagaagtgtggacatcccattaagctgtatccccttgaaatttttaacttaagctagtctacactgagcctctagcaattcataatttaaagtaatccttctgatgctggctccaggcgaaggcttttgcttcctgcacactgtgattctctgtatctacctgtctgtctctctggttttcaaggcagcagtttgccctttgacctcagtactccgatggatctaataagatcttcagttcattcagatttttcttgttgtgaagatgagggtgttgacttctaaggtcatgttagcttggaaacaggaagtactcttgttattcatttttaaaatttggtaatttggtgtcttactgagttatgcaagttattgatatattctggagaaaagtgttttatcagatacatggattgcaactaattttcctttcaatttcctttcttgattgtccactgttagtataaacaaaataagttgatttttctattttgaccctatatcctgaaaacttgctaaattaaattagttctattagcaaatttgtagatcttttaggattttaaaatatacataatcatgttgtctacaaatgtaaacttttacttattttttgtgtgatctgtcatttcttgactaatcacattgtctagaacctcatatagtgtgggatagaaatggtgatatcacacaggcttgctccattcccagtgttaagggaaagtgttctttcactattaagtataaagtggtaggttttgcacgcacatcctgatatggtttggctctctgtccccacccaaatctcatgtcaaattgtaattcctagtgttggaggtggggcctggtgtgaggtgactgaatcgggggcagacttcccgacttcccccttgctgttcttgtgatagagttctcatgagatttggttgtttgaaagtgtgtatcacttcccctttcacttgttctttcttctgcctgccatgtgaatatgtgcctgcttcccctttgccttctcccatgattgtaagtttcctgaggcctccccagaagcagaagtctgtacagcccacagaaccttaagccaattaaacctcttttctttataaattgcccagtctcaggtatgtcattatagcagcatgagaacagactaatcaggttgagggtattcccttctgtgtctagttttgagagtgtgggttttacttttcacaaatactgttgctgcatctattgagttgataatatattcctttttaaaaaatcctgttaatgatgaataatatcaattgattttttttaatgttaagctaaccttgcattcttgaaataaatccaatttgatcatatgacttatccttttgatgcactgctggattcagtttgttaatattttgttaaagacttttgcatccatttataagtaatatttataacttttttcttctaatgtctttctctggttttaatatcagggtaatgcttgcctcaaatttgttaaaattgttacttacacctccatatactaagtttatgtatgactggcacttattcttaggtgttaagtagaatttaccagtaaaataatatggacttagacttttcttgtaggttttgtaaaattataaattcaatttctt

SEQ ID NO: 1186 - DNA, 1215 bp, Homo sapiens
atggttctccatggcaaacgctctgtgaagggtgacctgctgggtgtgaaactgctgcacgacttcctacttcacccattcatctatccgagttttcacggagtccaggagaaaatcatctttcgtaagatcagtgatgtgaagaaagaggaggaggagcgcctccggcagaagaatgaggtgaccctcagcattcccgtggaccacccagtcagaaagctcttccagaagttcaagcagcagaaggagctgcggaatcagggctcaacacagggtgaccctgagaggaaccaactccaggtagagagccgctccttacagaatggagcctccatcaccggaaccagcgtggtgactgtgtcacagattactcccattcagacgtctctggcctatgtgaaaaccagtgaatcccttaagcagaacaaccgtgatgccatggaactcaagcccaacggcggtgctgaccaaaaatgtctcaaagtcaacagcccaataagaatgaagaatggaaatggaaaagggtggctgcgactcaagaataatatgggagcccatgaggagaaaaaggaagactggaataatgtcactaaagctgagtcaatggggctattgtctgaggaccccaagagcagtgattcagagaacagtgtgaccaaaaacccactaaggaaaacagattcttgtgacagtggaattacaaaaagtgaccttcgtttggataaggctggggaggcccgaagtccgctagagcacagtcccatccaggctgatgccaagcaccccttttatcccatccccgagcaggccttacagaccacactgcaggaagtcaaacacgaactcaaagaggacatccagctgctcagctgcagaatgactgccctagaaaagcagtttgccagtttggcatctggcacagagcccaagagtttgaaatggttaaggtggcagacagtatgtcgtgaccaggttctgggtgtacgtcagaatataacatcaggtgctaaacaccagctacaaattgctaagagcatctatggtccacaggaagctgaaaaggtgtgtgctgtgccctccagaggcaaagtctctgcaggcagagttgttggcccatacaaggtcatattgcagttgacaggatatctggcctctttggctaccatgaaaaaccatacaccagttgagagaaccaagtaccctgagaacatgatg

SEQ ID NO: 1187 - protein, 405 aa, Homo sapiens
MVLHGKRSVKGDLLGVKLLHDFLLHPFIYPSFHGVQEKIIFRKISDVKKEEEERLRQKNEVTLSIPVDHPVRKLFQKFKQQKELRNQGSTQGDPERNQLQVESRSLQNGASITGTSVVTVSQITPIQTSLAYVKTSESLKQNNRDAMELKPNGGADQKCLKVNSPIRMKNGNGKGWLRLKNNMGAHEEKKEDWNNVTKAESMGLLSEDPKSSDSENSVTKNPLRKTDSCDSGITKSDLRLDKAGEARSPLEHSPIQADAKHPFYPIPEQALQTTLQEVKHELKEDIQLLSCRMTALEKQFASLASGTEPKSLKWLRWQTVCRDQVLGVRQNITSGAKHQLQIAKSIYGPQEAEKVCAVPSRGKVSAGRVVGPYKVILQLTGYLASLATMKNHTPVERTKYPENMM

SEQ ID NO: 1188 - DNA, 2967 bp, Homo sapiens
atgccggggggcaagagagggctggtggcaccgcagaacacatttttggagaacatcgtcaggcgctccagtgaatcaagtttcttactgggaaatgcccagattgtggattggcctgtagtttatagtaatgacggtttttgtaaactctctggatatcatcgagctgacgtcatgcagaaaagcagcacttgcagttttatgtatggggaattgactgacaagaagaccattgagaaagtcaggcaaacttttgacaactacgaatcaaactgctttgaagttcttctgtacaagaaaaacagaacccctgtttggttttatatgcaaattgcaccaataagaaatgaacatgaaaaggtggtcttgttcctgtgtactttcaaggatattacgttgttcaaacagccaatagaggatgattcaacaaaaggttggacgaaatttgcccgattgacacgggctttgacaaatagccgaagtgttttgcagcagctcacgccaatgaataaaacagaggtggtccataaacattcaagactagctgaagttcttcagctgggatcagatatccttcctcagtataaacaagaagcgccaaagacgccaccacacattattttacattattgtgcttttaaaactacttgggattgggtgattttaattcttaccttctacaccgccattatggttccttataatgtttccttcaaaacaaagcagaacaacatagcctggctggtactggatagtgtggtggacgttatttttctggttgacatcgttttaaattttcacacgactttcgtggggcccggtggagaggtcatttctgaccctaagctcataaggatgaactatctgaaaacttggtttgtgatcgatctgctgtcttgtttaccttatgacatcatcaatgcctttgaaaatgtggatgagggaatcagcagtctcttcagttctttaaaagtggtgcgtctcttacgactgggccgtgtggctaggaaactggaccattacctagaatatggagcagcagtcctcgtgctcctggtgtgtgtgtttggactggtggcccactggctggcctgcatatggtatagcatcggagactacgaggtcattgatgaagtcactaacaccatccaaatagacagttggctctaccagctggctttgagcattgggactccatatcgctacaataccagtgctgggatatgggaaggaggacccagcaaggattcattgtacgtgtcctctctctactttaccatgacaagccttacaaccataggatttggaaacatagctcctaccacagatgtggagaagatgttttcggtggctatgatgatggttggctctcttctttatgcaactatttttggaaatgttacaacaattttccagcaaatgtatgccaacaccaaccgataccatgagatgctgaataatgtacgggacttcctaaaactctatcaggtcccaaaaggccttagtgagcgagtcatggattatattgtctcaacatggtccatgtcaaaaggcattgatacagaaaaggtcctctccatctgtcccaaggacatgagagctgatatctgtgttcatctaaaccggaaggtttttaatgaacatcctgcttttcgattggccagcgatgggtgtctgcgcgccttggcggtagagttccaaaccattcactgtgctcccggggacctcatttaccatgctggagaaagtgtggatgccctctgctttgtggtgtcaggatccttggaagtcatccaggatgatgaggtggtggctattttagggaagggtgatgtatttggagacatcttctggaaggaaaccacccttgcccatgcatgtgcgaacgtccgggcactgacgtactgtgacctacacatcatcaagcgggaagccttgctcaaagtcctggacttttatacagcttttgcaaactccttctcaaggaatctcactcttacttgcaatctgaggaaacggatcatctttcgtaagatcagtgatgtgaagaaagaggaggaggagcgcctccggcagaagaatgaggtgaccctcagcattcccgtggaccacccagtcagaaagctcttccagaagttcaagcagcagaaggagctgcggaatcagggctcaacacagggtgaccctgagaggaaccaactccaggtagagagccgctccttacagaatggagcctccatcaccggaaccagcgtggtgactgtgtcacagattactcccattcagacgtctctggcctatgtgaaaaccagtgaatcccttaagcagaacaaccgtgatgccatggaactcaagcccaacggcggtgctgaccaaaaatgtctcaaagtcaacagcccaataagaatgaagaatggaaatggaaaagggtggctgcgactcaagaataatatgggagcccatgaggagaaaaaggaagactggaataatgtcactaaagctgagtcaatggggctattgtctgaggaccccaagagcagtgattcagagaacagtgtgaccaaaaacccactaaggaaaacagattcttgtgacagtggaattacaaaaagtgaccttcgtttggataaggctggggaggcccgaagtccgctagagcacagtcccatccaggctgatgccaagcaccccttttatcccatccccgagcaggccttacagaccacactgcaggaagtcaaacacgaactcaaagaggacatccagctgctcagctgcagaatgactgccctagaaaagcaggtggcagaaattttaaaaatactgtcggaaaaaagcgtaccccaggcctcatctcccaaatcccaaatgccactccaagtacccccccagataccatgtcaggatatttttagtgtctcaaggcctgaatcacctgaatctgacaaagatgaaatccacttttaa

SEQ ID NO: 1189 - protein, 984 aa, Homo sapiens
MPGGKRGLVAPQNTFLENIVRRSSESSFLLGNAQIVDWPVVYSNDGFCKLSGYHRADVMQKSSTCSFMYGELTDKKTIEKVRQTFDNYESNCFEVLLYKKNRTPVWFYMQIAPIRNEHEKVVLFLCTFKDITLFKQPIEDDSTKGWTKFARLTRALTNSRSVLQQLTPMNKTEVVHKHSRLAEVLQLGSDILPQYKQEAPKTPPHIILHYCAFKTTWDWVILILTFYTAIMVPYNVSFKTKQNNIAWLVLDSVVDVIFLVDIVLNFHTTFVGPGGEVISDPKLIRMNYLKTWFVIDLLSCLPYDIINAFENVDEGISSLFSSLKVVRLLRLGRVARKLDHYLEYGAAVLVLLVCVFGLVAHWLACIWYSIGDYEVIDEVTNTIQIDSWLYQLALSIGTPYRYNTSAGIWEGGPSKDSLYVSSLYFTMTSLTTIGFGNIAPTTDVEKMFSVAMMMVGSLLYATIFGNVTTIFQQMYANTNRYHEMLNNVRDFLKLYQVPKGLSVMDYIVSTWSMSKGIDTEKVLSICPKDMRADICVHLNRKVFNEHPAFRLASDGCLRAVEFQTIHCAPGDLIYHAGESVDALCFVVSGSLEVIQDDEVVAILGKGDVFGDIFWKETTLAHACANVRALTYCDLHIIKREALLKVLDFYTAFANSFSRNLTLTCNLRKRIIFRKISDVKKEEEERLRQKNEVTLSIPVDHPVRKLFQKFKQQKELRNQGSTQGDPERNQLQVESRSLQNGASITGTSVVTVSQITPIQTSLAYVKTSESLKQNNRDAMELKPNGGADQKCLKVNSPIRMKNGNGKGWLRLKNNMGAHEEKKEDWNNVTKAESMGLLSEDPKSSDSENSVTKNPLRKTDSCDSGITKSDLRLDKAGEARSPLEHSPIQADAKHPFYPIPEQALQTTLQEVKHELKEDIQLLSCRMTALEKQVAEILKILSEKSVPQASSPKSQMPLQVPPQIPCQDIFSVSRPESPESDKDEIHF

SEQ ID NO: 1190 - DNA, 73038 bp, Mus musculus
gaatctgttccacacagctgctatgtctaggaggtagcttagattgatcttcatggccggcccctgtctcatggtcttcatttctgaactttctcaggaccaggcctgtgcttttatggttctggttctggagatgtcttgattctgcagttatcttcaaggaaacatttgccaagtggtcatgtagggtgtaggcatcccagtcccttggactgacccttcctttttttttttcgagacagggattctctctatagccctggctgtcctggaactcactttgtagaccaggctggcctcgaactcagaaatctgcctgcctctgcctcctgtgctgggattaaaggcgtgcaccaccacgccagcccctgttctttttaaaattaagttcatgagctggagagatgactcagtagctaagagcactgactgctgttccagaggtcctgagttcaattcctagcaaccacatggtggcttacaaccaactgtaatggaatctgatgccctcttctggtgtgtttgaagagagcgacagtgtactcacatacataaaataagtatataaatctttaaaacaaacacaaacaaaacaaaaagcacctgttgttcttgcagaggacttgggtttagtacccagcatccacatggtagttcactaccatctataactccaattccatgagatctaaagcgctcttctgacctctgaggatactaggtacatacacacacacacacacacatacacacacacacacatacacacacacacacacacacacacacacacacacggtgcacaaacatgcatgcaaagacaaaaacaaaaaacagaaaccacaacagaacaacgataacaacaacaaaaaattaatttcacttacttgataacctagaacacaaacttagagagggagagagggagaaagacagaaacagagaaaaagggggtaggagagatattgttttttaagtcagggtgacatatctatctcctcaaacatacaccacacctatggtaaaacattcataatcataacacagggtacagtagaactacatgtacccgttagctgaaccaaccgctacttggtgatctctctccccctcccttcccctcccctcccctcccctctaagtattgaactcacagcctcatgcatctatatatgcaagtgctctgaatacatcagccctgaccctgcttctctctatatacacacacacacacacacacacacacacacacacacacacatatacacacatatatataatacgtatttgtctctggactcagccatatcctggtattgtacatctatggactgtgcaatttgtcttgtagaaaggatcgagcttgccttggggtggggggaggctgacctggtatactgagtttagagttgtgagggccatgtgatgttgcagtccttcaatagcaatcaaagctcaccctcaaaatgtatttttaactcatgccccgaggaactagaaattaatgacttgcattatttacacaaagacgttcactcttgatggcagcaattttttaacattatgtttgtctaactctgtcatgagacataagtcaaatatttaaggtttgaacagggtgattaagccaagagagttatctaagtcagcaactgctaggcaaacatatttctccttctctcttcttgtaatgaaatagaagagaactggttggggggggggaggtagattttaatctggtctttaaagcaaaattcaaactttaaaatgtgagaagatgaaaaactgagtcagtttggtaagaatttaccacccttagcaatgtacacgcaggtcctctggcacacagagaaatgctcagaggttgtgttcctcagcctattggaaagggtccacctaccatgcctcagtctccatccgccctgtggtcttattgaacggctgtccctaagggtgtaaaacgtggctggaaggttttactcaattatctggaagtccttctgggatccaacagtgaaccctctggatttttgaggcgctggcattattttccagcagggctgcactgcagatatccggccccaggcttcaagggccttgcattggtattcaggcccctccagtgggctgagggtcctgcagtagtttctgctctgcttgctgaggtgtctttcggtgggtgcagcaacaacatcccccagggtctgtaagactgccatctccacctgcctgcaaccaaagaatgacctttggcacagacctttgtcaccttgctgaagctggtttaataataggacagagatcatggtgggaggtagcgtgcttatctctgggcagtgagtggcatctagttactaaaggactgtgctgtattctgtctggccagtgctgcacacgttacagaaaatgcttggtttaggcagggcaggaagtcatcccttagccccagcagacagaccccaccatgctgtgtctcccttttcccagataggttgtatgtgaatgtgtgcttctctctatgaaagcagtggtgacccttaaccacttttattctgcttcgacatatactccaggaactgtgctgttcgttccatatagggaaaacttaagaaaaattattcacagtagtgaagaggtgggaagaactcgagtgcccatcaggtaagcgagacgtggtccatcccatggtgcaatgttactggctctgaaaaggaaggacactctgatataagctgcatcatggatgggcctccaggacattgtgccagctttacgaaaggacagaagtgcatcttcagtcacgtggtgtttctagagtcactgttatcatagaccaggaagaatggtggggtcaggggttggggagctgctgtttcttggggacagagctgtagtttgagaagagaaggtgctggtattggtgatgctgtaaagctgtgggaagcatttcaggccaaagtatgatgttaacatttattctattggtatttttttctttgcaattaaacagaataaattattttaaaaagaaaaaaaatggtggtgcatgcctgtaatcccagcacttgggagtcagaagcaggaagctgaagtaatttcagaagtctgcatggtctacatattgagtgccaggccaatgatgctattcattgagatcctgtctcaaaataagcaagcaagcaagcaaacaaacaaacaaccccccccatgaaaaccccctcaaactaggaaatagcagctaaatgaccaggttaatttttttccttttttattcattaacatatttgagtagtgtgggggcagggatattccatggcatgcatgtagaggtcagagggcaactttgtggactttattctctcctacctttgctcgggttggaggatcaaactctggcttgagtagcaagtgcctttaccaaccaactaagcaatcctgccaactctaattagaagttcttaacaatcacccacgaggtgccagcaacctgtggacagtgacctgtggccaactgttgttagtgtgacatgtgacaactcaatggccacagttactctgcaaggagggattttcaacttggatagatatcagtcctgattctgacactgaatgggttcatgaatcttacctccaaagtctccttgaccttgaccagcccacagagggaggggactggcttggtcaaagggtcagcttggcctgatgttcagtcaaactggaaggagaatgggttagtctatgaagcttgaatgtaagaaacactgagtctagagcatgcaggaatgggcactatgtgggaagagctggctctatctctgtagactgagacagaactcctactgtgtgcacagccacagctgtgatgccatctgggagctgtgacttaggagtggactgttgggctgaggaggttggtatgggactcaccctgatattcataagccacatttatcttctaggcattccaccacctacacaaatcactggatgccagcatgagcatctattctgaggccaggatgtgcacataaccacctcttcccatcagaatcttctcagttcctaagggcagctcaggcatgtgtcccattgggcctgggcagggcactggtgggcagaggcttcctggcccttccatccattccaggctcctagaacttgtttccttgtcctgaccctgccctccttcttgagcaagtgacttggccaccgtggaactcaaaaaaaggcattatgttattattgtatctatagatgttgtcttcttttccagggttatttgaggctatgaacaaaaagggcttagggtgtgtattagtcagggttctcaagaggagcagaacaaatatatgtatatattacaggcacacataccacacaccccagtgtaattaaagagcttcaagtgttcctgggataaattcagtgctgggctgctgtcctgctgagagagaaagcactgaccttgaatttaggcctcctccctacccagtgtggttgtagacattgttagctctatagccacattggggttgatagggaagataaggctgggactcttcctggccttggtgcaggctggccaccttggagccggatcattatctaggaattcagcttctagaaattcatcccttggggccaggcacctttgtaatggactgggggccagataagtttttcttttcttttcttttcttttcttttcttttcttttcttttctttttctttttctttttctttttctttttctttctttctttttttaattctttgtcagctttgttatttaacaaacatttgctggcttgcctctttcttttgatatgtcagaaataaccctgttatctccttgtcaagtaagtctggaacttgcagactagcaagcagtcgctttttgtgcttgggcatggtgcagggccctggattaggtggttctgaaatctgttagaacaaaaagcacagacttgggcgttgaggttagaaactggaagaatagttcttttcttatttatttattttatgtgtatgagtacactgtagctgtacagatggttgtgagcctttatctggctgttgggaattgaatttaggacctctgctcgctccagccaaccccacttgctctggcccaaagatttatttattattatgaataagtacactatagctgtcttcagacactccagaagagggcatcagatctcattatgggtggttatgagccaccaagtggtttctgggtctgagttcaaactcaggaccttcggaagagcagtcagtgctcttacccgctgagccatctcacccgcccagttctatactttttaaaggctgactcgacttccattttcttcctgagggcagctcaagcagagcgaggcccacttctacagtctgaattctgtacatacaacccctgttcccgccagatcaggtcaaattacatgaccatctcctgcactggatgtgtcttccatatagtcctcaggtctggggtttccatttcaaacctcaggtggacaaaattgcaagcacctcctttaaccttcagcaaggtcacaagggcagcacctattaacctgtgtggcaatggctccaattttcaagactgtggatgtgctggggaactctaacatttccatgatctgagcactcagtcctctggtctctgttgagctggtgtttctggtccctgctgtacagtgtgtagaggtggctgcaggttatgcatgcccccgacagcctgggaactgggtttgctacaacagggtggaactatggcttggagcagtctcttgcatgtgcctataggtgcctgcccatgcgtgatgtccctggtggagcagctgtttagtctttcccgcttttctattgctctttgtagcatgcacccgtgtacagtggctgtcatgtgcactgggctcccttcttcacccatgctacgggggaacagaaatgtgcagattttcatggagaatactttttttcccccagtttatcctgggagatgattacatttggaggtcacaaagggatgctgaaggccaatttgcacttggcagctgctgctgctgacaaacactgcaagctaggtttctttatcagcctctggaggccacataagggatctcctgcccagctgggctcccatagcttgagaacatctgaacagcgaattagacatgccagtccctacagctgagccgatggccctgagctgatagcagtgatgagcagtgcaatctgagatggtgaccagacagtggcattgaatggccattttgggtgacactctgtgcataccattggtctaagtggaccatattttgcatgaagaaagaatagcattgtggagctggttgcctggaggcagatggaccttaccagagcccaaggttacccctcacagaacagtactaggtggtcccttcctgaccattgctggaataatgtgcattggggaagtctatatgaagcaggctatggccttggtctatcttgatggtggcctcccatcaagaagcattcagcttaggctaaccctcagatgccagggcctatggttgtgggtgacaaagcctagaggcaacaggaagttcctttgtgcctacgactatgtgcatcaaagccctggacctttaaaagacaagcagtcacagctaggagtaggcgttgctggtgtgtcttggttccttgaagctaacagcttgaggtggataataccatataggagagacacatctctacctgtactgtaccgatggtctcagctgtagctgaatatcagtgcttcattaggcctagatggtgcctgtgagcaagggtagacctctgaggctggggaagaaggtgacaagagagccaggcctttgcatcttatttcttgagtggcttaaaagcacttcagagggctggagagatggctcagcagttaagagcacgggctgttcctccagaggtcctgagttcaattcccagcaatcacatggtggctcacaaccatttgtaatgggctgtctgaagacagcgactgtgtacccacatacattaaataaaaaatttttttttaaagaaagctcttcgggggctggagagatggctcagcggttaagagcgccgactgctcttctgaaggtcgtgagttcaaatcccatcaaccacatgatggctcataaccatccgtaatgagatctgatgccctcttctggggtgtctgaagacagctacagtgtacttacgtataataaataaataatattaaaaaaaaaaaaaagaaagctcttcagaggtactggggagagggcctggttgcaagtgttttactgaatcctgtaactcatgtagcatttgtaatcctagcactactgggagatggtgggtagagacaggtgacttcttggaagcttggtggcagttagactaggctctgtgccaagagtgccaaactatcttgaacaaaaggaagaaggtgcacagcacaagccagcacacacacacacacacacacacacacacacacacacacacatgctcacacatcacacttggagagggaggtagggagggggcacaatggaccaagtgatgcacatctcattgcagcttgagaaattttacagtctagtgctcattgaataacatgttctcagagtttcccagtctctaacctctgcatgcgtggtctcatgtcaagaaaaatgtagtttcataggttgagtatttatgcatcagattttggggtcctgtctggagcaggtataaagtacagtttcattccgtttttggtaatccttggagtcagcagaacatcacatccttcacatgtgtagggaggtgtggtagctgatgtactgcctgtccactggttctgtgcgcgctgcttactttctttcaagttaaaatacctggtgcgacattggtcctgaggctctccatactgcgctgatggaaaccttgcatctcaactttgtggggattaaaacattcccataggctactctgccctgttccatgggctcttccttctctaagtcaccaagctcacagggcaccccctccccactcaagctcccagtggacctgagtgtattgacaataatcttccttagcttcaccgggtacagcgttcagtgttgtctgagttcccagcctgtggatatcatgccacagtaatagaccttgctggtgtgcagtcagccagaagaaatggggctgagagacaggcacatttgtaaaaaggactatagctgggcatgtctgtacatgtatgtaatcccagtacttgggaggtagaggcaggaggatcaagaattcagtcatctttggctctatatcaaaatttgaggccaacctgggctatgagaccctgtctttaaaaacaatagagggggagggcagggaaagtgactgggggctatggctttttgtaagatgtgttgggtatgataccagggtctctgaaatggtaggaaccctctcctactgagcctaagtttcaagtgtttgccagtctggagggtgttctgaggaggagaaggtggtcactatttccacctaaggtccagctgagcaggggaaacaggtgatagcccttccctatttgctatggatagctcctggagggaggtggggtgacagtatgatctgagcaagttgtgccctatcccccataggagctggaaactgtataagaggccattcctgagtggcccatgtttcccccaagctccttcctggcagagggcagaaagccggccatactgggtacagttgggctttcccagaaatggcttttctgagttagtttcaaaatgttttattctcatcggtaggatatgcaaatccctttaactcccgtatctcagcctatcccagcggtgtcactggtccggcagctgccttccagtccgtgtccctgattgaactgggccaggccacctggctggccctgttccacaggttgtgagcagctctaggcatatcacctgtgtttctctttgaccatctaaaacagttttgggtgacttgttgcacctgggggctatggctttttgtaggatgtgttgggtatgataccctaacattttagttccattctctcttgaagaatatttgtttccagtttttcaccagtctttcattgaaaatgcacaaggtcctgaaattccggaagatctgtgacttccaccatgtggtgttctggaactctttgctcggatcttcctgtcactactaccttcggaatttacctgcccttggagccaaagggaggaactgccaccctccaagtttgggctgcaagggttccccaggttggatcgtggaacactcctgccagcaggtacaaagagtctcgggcttggctggctaggcctgtcccagagcccagtgaccttcttgggtgggattacttaaccccagggtgcacagcgtcccctgattggccattactccctggcctaggttagcagcctgacctggtcagggcctgggcccagatcaccagcgttggtggagatgaggagctgcaaactgagagaaaggagccatgacctgtggggtggtgggagaagagccccacgggagtttggaatgagaatggaagaactgaagctgtggaagtggtgaatgacaggctcttggagggcgggagggctctgagcctgtgttgtgagtaggaatgggaggaggacgcggtcctgcggggaggaactggtgtctcttatgctgagggaggtctgcatctgtgggcagttcattcagcggtggcctctaggggttgggtttgtgcgtaccgagtccttgagggtacagggctctggcggggcaaccctgagactgtggctacaggggcggagttttaaggggtggagcgtctggtgggcgtggtcgttccggaagcctcccgaccccgccccgggcaaacttttcccgagccgtgggggcgggcaggtgaggtcacgtggcgggcaagggcgggccgggcggaccccgcccctacgccggagtccggcggctgctctggagcagcgtgtggctgcgagggacagcagagtctaacggagccatgcccacgaactttacggtggtgccggtggaggcgcgcgccgacggcgccggggacgaagctgctgagcgcacggaagaacccgagtctcccgagagcgtggatcaaacctcccctacgccgggtgagcttggccgcacctgcaacgggacaaaggcagaggctgggcccttctgctgccgctgggccgctctgactcgttggttggcggcggcccgcgcggcgcgtagcggggcgatgggaaggggtcagaagggccaactggtatctgcctggctcggaggagtgacccgagaccgggagaggattcttgggctggtggtttgttggccctgttcgttcagtttcttgaattcagtgctctgctccttgcttgaggcgcccgctgcatatctccctgttggcctgactcagtcagccctgggggcgcggttcccacctctctgcatggcctgactggagcatcgaggctggagcaccggaaactacttggtttggcaactctgacgggactagggaggagttgcagagctactggaggtacctatggaacgggaaggcccaggtgtctaggtggtacctgggagagctggaggtacagacccctggatgggtgatctcactgacggacagcttcctctgggcaagctttcttttgctccaggatggcccagtgtggtcaaccgataaatccgactgggatcccagatctgcctccactgaccttggaccagccaaacttcccttgggatcttagaggaaggacagaggcccgtgtaagcctggggagggggctgcgcactctgagcgcgggcttctctttgctgctctttgttccttggatccggagctctctggcactttcactttccacggggtggtgatgggcctgggaatctctctccatcctacttctcagcaccctctctgctgatggcaagtcaccttgaactgactgcttcctccctgttccaactctcttctagacctagatcctaataggccctaataggtgagaggacccagcacagacctacagctgcagctggccttgcacctaccccaagttttacattggaggtttgggctccaggttctgggtctggaaggaaaagagggtgcaatcctcaagagatggacggatcttttatatatggcatcagagcttttgctgctcagaatacaggcagtagaaactgcgcttcctctagtccatacttttaggagcctgcattcatagactaggagtgctggcccggaagtggcctagcccaggtccgcagcctgcctgtctcactctgtgaccctctccatgagatgctggactgtccagctttctctgcacagacaaagcattctatgtctcagggctgctgcctggctaaacacataaaatcagttgtaaggtggaggcagaatctagaagtccaaactcagtgtccatcagccagggaagtgtgaagagggtcagcagcatcacagagacccccagagtagagcccccaaagcccttcctggtgcccagtggcctgagacagacaattctacaattctgcagatgtcctatatgattagtgtctcaggcagaggtaattttccttttgattcatttcttgttccctacagtatcaggactctcaagtggtgcctgacgccagtcagggctgaggattcagcttctaggaagggaagtgactgtctggcttcctgaaatttgcactgttaacaagaggacaagcatgcacttttaattccttagttgtcttgagacgaggtcttatgcggccttgaattcaatctgtagctgaagatgaccttgaactcctgactggagcctctagcaactgcttgtattacagtagtgtgttgccacacccacttttgttatgttttgttttgttttttaaatgaattgctggtcaggattgaacctgggcttggtactttgctaggcaaatgctctaccaactgagccacatcctgagtatgtgtgttttaatgatcctttcacgctccaagctgaacttgagtaacttggctgggcttatatagaacttgcattttggtgctctgtatacttaatatttctataatgataattttggaaacttcagccgctgtaccatgacagggatgactttgttgtagtcacagtctgctggggtttgtcctgaactctttgcttttttaaaaatttttagttattatttatttttgtttgttttcaatttttattattttacttatttacattccagtcattggtctcccactccacctctcagtaccccctcccacagttccttatcccacttctctaacctcttgcctctgagagggtactcccctccactccccaggccattccctttcttggggcctcaagtctcttgaagattaagggagagctctgctatatttgtgccaggggcctctgactggcctgtgtatgatcctggttggtggctcagtctctggggggtaagttgagattgctggtcttcctatggggttactctctccttcagcgttttcaatctttcccccaattcaaccataagggtctccgacttcagttcaatgcttgggtttaagtatctgcttctgtctcagtcagctgctggtagggcctcttgggggacagccatgccaggctcccgtctgtaagcacatcataacatcaggaatagtgtcaggccttaatgcccccttatgagatggatcccaagttgggctgctcattggaccatcttgtcctcatttctaacaggagcgccagataccagccaggagtagggaagggatctcatacttagttttttggtgggaaagtcctgtagaggcaggatgaaggcttttcaaaggttgcctgtgtggatctacaccatgtgtgtgggcatcatttgtgtggtcatgtatgtgggtatatgtgtgggctacaggccagagccaacttgcctggtcacaggagtcatctttgaacactgcagccctgccctgtcttgccccctattcagatcccttggtagttcttggaagtaccattttctagagatgtctcctgcgtgttgcttgtgatggagtgagtttggagacctcattaggtctacacagatccaggctgcagttgaactggaccctcataggctatccagcttacacacagccagtgtctttggaaccagaatgtgggtctagcatcggacccacattctatctagtctgcctagggatttcaagctgtgaacacatggctatagggaacccacagccctcttgtgcctggtacagattctattttaccagggatacaggtagtgtgagggcaggaagtgaacctttctttgggccataaccaggctgcatcttaaccttgacctctcctggggctgagacccaggcagggcctgggctggcagttgagtggcagaaatgcagttggttctatattgtagatagtgtatgtctacttataaagtccttggccctgtgtgaggagctagcctcccaacacatatactaaaaatcgattgggcaaggagagagcaggcgtggtgagtgtgacatccacattttgcttcctcagatttttttttagcttccgtttccccttctctcagggcccttcccttaagcacgtgttctagaaggacttgggattgtgcgtctggacaggggacatgtccctcagcctcttctgcaggacagatgttggacctagattttatttattgtgagattcctctagaagtggaaaggatgtgtgaattcttggtgttcggttggaattgttttttatcggtggagaggacactgcttgcggccagggtccttcttatcagagttgggcatcattagatcttaagacctatagggaacctgtcaggaaacgtgcagggtgaggtgccccaggcctgggaaaagaaattccacaatggagtctttctgggtttactgcaaggtaatccctacctgggggccttccactccaggtcagatctgacttctgtgcaggctcccttctagtctgcttgcaggtcccccttcggattccatccacgtggtattatgctctgtagctgacttcatgttggtcacctgggaacttctcttgttagaggtgaccctgtctcctgatacactagcggagacagtcctgagttacctttgtcctgtctggaggttgagtggaggctgggcagtggatagtgttctgtgccctcagggctgctgttgacaggggtcacagttaggacataacgattcagagaggtgcacagttaggaagaggactgagcaggagacctgaggccctgctctgctaggctaggacgagaactaaaagcctcacctggccttttcagaaaagggtgtgtcacactggtgctggagatccacacgggggctggtgggccttctcgctgtcttgcctggagtccttgaaggtggcgctgaatgctgaatgtgtgagcacggaccctaagacctttgggagttcttcatggtggggttgagggtcatttacagggatagcagcacctgatgtgtgtggaatccaagtaagagggaaacatgcacagtttcccttttcaaaccaaagaaagtgctgggttatttattgctcagtggtagggtgcttgccttggggccatggctttgattaccagtgttcatattgtaggacaaagctgcacagaatagctggaggaaacaaaggatcccacagatcaggtgactgctggcaacccaggtggctgtgggctgcgccccacctcttctcaactgtatccgtgcaacaggcccttcccttaggaatcagaggtacaggtgtcagcaccagtcatcttgctaggcccatgctcttgtgggtgagcatgcatatatgcattgtgtgaacacgggagggttaggggagctgcttcctccccaatggaaggtcacatggtattaggcattgccatttcctatggccagactgcctagcaagtggcttggtatcactggcacggccttcaggactgatggggcatttgaatgttctctttacccagtcattgccttttttttttttttaaattaatctgagggtcgtcgcccagccttcctgaccactgtgctgggtggatgtcttaactgctgcaaagggttgaagagacagctcctgtgatgaaaggccctacctaatgccatgcgcttaaggccaagcagacttgggctgtctgggcactgggcatcgtagtcacattgatctagaaagatcacctggtaaggcggtgtctctcttgggcctggtgtatctgtgacctggcacaataggaacctaatatgatatatagggcaatatgtgatgaagagtgagttctgtggggctgagtgtcaaagggacataggtaggatgttgatctgttgcctgctggagcagtgggagagtgggcatgtgttccttgggacatgggagcaaagaagaatcccagtagggtgttcagggatggtacgggccactcaccagtggtggcagagacaaactgatggcttccagaaagtcagccttgtagtctttaggagatttgtgaagggcctaggctgaggattaacttagcttttgatggtggtgactcagggtagccatggggtactgaggtggccttggggaattccttaggaaagacggccttgagcctggcaggtggagtattatgtgcaagtgtgtgcatgccacagtggctgaggcaactctatcagagcagggctaccatggattctagtatgaagaggtttcccttaggaagcagctagcaacgagtagcattgtgtgagctgctgggctgtgtgttcttagcatgcattatacatatatatataaaatcttgtttgtttgtgtgggtgtggtactgtgaagttgcctgctgttcctagtacaccacaggtgttataggcatagcctaagagctgctttgggtgttggactctggctgaggagaagcagacgtaggcagcactgattggatttttgctgtgcaccccagaaaacatctcagacctaagcattcaccttcaaaaccatttgggagctgtctcactctgctgcctgcccggcaatgaattggggagagaaaggtcaaggagtaaagatgtatggccgccaccttagcagacaaggtctgacctgggagtgtcatggcaggcccatgctccagtgttgaggggcagagacattgggccaggcctgctgccttctggtgcttgagacaatggctccctcttgctagctgtacagttgggtacagcgtggggtcagacacccagcagtatagcggagagtgcagctggctagacagcctgtagttcctgttgctcttcagacattaagccctgcctttgcaagcctagagggcaaagtttggtgtacagtgttaagtattaaccactgttcccaagctcccggccctggccaagtggctgggtggagttttctgtcatttggagtgatagctacacaggaggcagccactggagtgtatgaatcctgctggactggacttcagagggaagactcctctatgtagaggcaaggaagccctgtgtagacagaagtggatgacactcaggagtagttagtcagtcttgactgtggtggcttgaggtgccaggtccaaatgggtgctgactttgagtccccactacggatcagtcataaagtttattaccttcctattatgcaaaggagagaaactgccctttagggtaggatctgggctgtgcagataagccttccatttctgttcaatggcaggcccatcttggtgatgagactttcagctgtctgttcatgtgtatgtccatggtagccaggccacaagcaagtataggtttggggcttctgagtgtgtaattgtgttgtccctggatctgagttgcttagtaagcatgtcagatgtcccctttggctgcaggcgtctatagaatcaagtctctcttaagtaagggcctgcgctgctggtgctggtgtcttagggtctaggatacctataggtgagaggcaagactggcgccaccagccagttgctggggtacctaggctgtttcctccttgggtaggcttgttttaagaaaaccattgggttaggtgtagaggtgggctggtgtattgggatatgagctggcagtgccacttcttgatctgatattctcagatccactcatgtgttttatcacagccccatgagggaaggatctgaggaattctagggaagaaaagggtagcagtccagatctgtgttttcatagttagacatgttttcacttccttgctagttcaatgcaggggcttgggtgtcatcatctctggccttctggtggcctgagctcctgtctttgatgtttgcttacgttagagtgacccatttctgaagatggcaaatgacttttgagcatttctcagtgcctcagtttttctcaccagggcctcatctcttacaaaggcagccgtgacctttcatctttaggcccatccttctgtgggtctctggcgccagcaggctgggcctggctttctcagaggctcaggaaacatctgatggccactggggaggactgagtgctctggaggccagaggagggagtgccagtggctcttgggtttcccttttcatttaatggagggacttgaccacagcccagacaagtatgtaactgaagctgcccctgggaggatctgattggtgtcctgtggggctgatgtagggggtgcacaggctctatcctcctgctttttttttttttgagacagggcttctctgtatagccctggctgtcttggaactcacgctgtagaccaggctggcctcgaactcagaaattcacctgcctctgcctcccaagtgctgggatcaaaggtgtgtgccaccatgcctggccttcctctgctttgttgtggacctctatcatctgggcgtttggggaacagcatgccctttctcagctccgatgatgctctgctctctggagaagagagacaggatcatggctagcaccagcgtgtgacatgggatgggagactgaggtcactgagactgtcttcctgaagggtatacctttttagattaaaagtcccagactgcttaggtagcttctacggctgtcatcccatagatgactaatgtcctgaggtttgccccccacaatggaacagtctggagctctaatttcttttggccttgtgcggggagtatgttgccatgtagatgaacagtgggcatgtttctatgtacacgtgtgcatggtatgcacacataggtgcagtgtacatataattatggtatatactaatgaatgggtgaaaacatgtatatgtgtgagtgtgcatgagtaaacatgtgtaagcatatgccatatgtatgcatgtagaataatgttgtgtgtactgtgtccgaaatcgtgtaattgtagtgtgtcagcttgtctgaattagctgcttctttgcatagaatctcttggatgtcaggtggtaaggctccactctgcttctctgggttttagctggtttgaacatagatttaaaagcctattggaggagatgcctacccagactgctttgtaagaggacataaggaataccagtgacctttatggtcacgtcttggggacagtcctactaatcctagggtaggaggtagaacaggcttgccacatcgtttgggaagccttgctttactactctctgggccccccagacctttttactactgttcctctgagaatctttgcctttcaagctatgtgagacatggtgctactgagttaggctagggagagcaggagagtggacaactagttgtgcatttaggtactaaccaaggtttgcagggtttcctgccctcctaggcattaactttgctcacacacctggcttgacagtttctgcttaaacccagacctgttcccatggagccttgtggagagaagtggggctgcctgccactctggtgcagatattctcctgcctgtgcattagagccccacctgcagcccagcagcagtgcagccttgaagcaaagtgtattgctttgcaggaagaaggtggggttgggcctgagtgcagaggaaacactctaagccactaacttcaaaagttcccacactgaatcagagtgacagagaggccaagtcgggcctgaaagtcttgagcaggacttggaacaggtgggaaaggactgggcctgttccctgaaggacagagtggctctcgactggacctctctgtcctggaaacctgagatgggaggcaggggttagaggaatgtgcatggaaaatgctataagaagtaagtggccctcttacttctgtgggtggttcttggttctcaatatttcctttgttttctcttcagaacgcgttgttcattcagccagcagtttgctgttgaaagtggaaagctgtcagcctggggtcttgtcagtcagcctgtggctctctctcattaaccatgctctatcgtctgtccccctggcctggattttccaggttgctggattttcaggatgcgtgaaagttctaagaatctggagggcagtcaagagccggtgggcattcttttgagttttcagggccctgaactctgaaactcattctagcacaaaaccatttcacaatgcagccaccagggtagttttatggtggtggtcttgtctcggtgcaggccgtcctcaggaagccaaagagcaccttaatgttaccaggtgggacttcattttgttgtgggtgcttagtagccaggcctatgagctaaacaggttgcctacctcctcccccaggcctctgtacacaaactcagctcctctgtgacccatgccccatctccagtgttgctaagctgggtagactttccgcctacacttgatggcaggaaagggaggaggctgctggcctttgcagccagctctattggccagcctcctcaacctatcagggaatatggctctgagtccccggggttgctttctatccctcccttgagccatcgagggattagtagtaatgtcctggagtggagccctgcctgcctcaggaagaacaagggtgggagaaggctatgcctgggtcatgctgttaaggcctggctgcctgtgaatgggtctgggggcctgccaggttgtgcctggtttctccctactaagacaccactctgcagggagcaggctgggagtggggaatcaacttgctgccctggagcagatcctgggctgagggccagcggtggttctggcactgcttggctatgcctatgaagcttggctggatttcacaaatacctgatgcttatctagtggagaggttgtctcctcccatgcccaggaccctggccacctctgacctatgtgcacacctctcttacatagtcagaatctctgaagggactgggttcctaaagcttgaagcctttagttcctccttcagtgggactggagagactgcagctacaggaggaaactgcattttgtaacatgcttgctgaaaaggaataccgcatttgcatgctttagaggaatccattaagacatatttgaggggattggagagatggctcagcaggtaagaacactgactgttctttcagaggtcctgagttcaattcccaataaccacatatgtgaggggtctctaagtagaaggtgggtaggtgctggttggtctttgttaaaagtcagcaaatttgcatttccacaggtgagttgcatccaaacacaaccttgtttgtcacatgcaggtcacaaccaaccacagcattgtgactttctgggacattatgcttactattatctgtggttatccatacactttaaaatgcatcaggcttcagttggacatctatgaagcagggagagcctatatctagtgggcatctgtgaacaactgtccccaggctaacctagggctgtccccatgtaagatgacaaagtgaaaagccaaggtgtttctccaggttgaaacgcatcctgtagccttcatgacagaggtcagggttggcccaggtcccttgcagcttataacatgccttcccaagcatctgatgcacttgtaaggaaactccatggatctctgtgggcccagggccctggtgagttttcataggaggccttgcagtgggcttttcccctgtgaagaactgcagcctatgaggaaacacgggcttgtgggcagtgtttacagaactgccagcccttgtatggtggtaacagtggctaatcccctttacgtcatagacaggatgcccagacaacaccctgaccatctaggtcggtaacagggtgttacagcagatgggtcttaagtgggggttccaagggtggtaggttgttggggtggctgatcaggatctgggcctccctggtgccaggtaggaatgatacagtccgcctgaccttatggcagtattgtggagctgtgctgcggctagtccgcactaaagagttatgatgcttactctctctgcgactactgccatattccccggagggtctctgtccactgatgcctaggttctgaggggtttccttgtttgccctgcatgttctacttacatgtatgtctatgtaccatgagtgtcttgtgccaaaaagaagccacctagaactggtgttgcagttggttgtgactcaccttgtgggttttgggaattgaatactggtcctttgaaagagcagtcttagtgtctttgtcctgtcccaggagtcctcaggatatctagttgtccttgtaagagtttcttacacttactcatttctggtaacctgacatcatgggagtaaggttaggtcctggagagttctgtggggatcatttcacttcccgcctgggtctgggtctgggtctgggaggaagggtttaggggatgagtgcctgccctttatttagtataacattgggtctttcactgtcccaggattcagccctgttaacctgatcactggggacagttgtctgaggcccctctactcaatctcctctctaggtctctcccttatcgagttggctgctctatctccttcactgaattgtccacagtcagaccctttagcctttgggtctgacatttagccctttaatttctctttcgacaaatgacacaaggcgtggtcagctgatataccaccctctctggtttctgttcaggctggctgcccttggaacaatcctttgctgctgaggtatcagctggcagctagtaggtataacacagggagtaggccctggctgccaaatggggcagtgaaggattacggagtcactggctgctagagatgcctgagacctttatatatgcatctcaaaggcagatgtcagaagatagctgcatgtggcacaagataggcatggtaccttcagttgtatctttctaggagtctgtatggcttcccttggatttgaggttctttgatgtttctgtagttgattgttttatagttttatacatgatgttaccaatgcaggcaccagctctgctggaaggtttgctagaagtgcttgccttcatgaggaatctccatggtttgtggccccctctaatctaaaggagaattccctcagtactttagctcctctcttctgtatcccaagacctgtgggtctgtgggctcagaggctctggggtttgtagcagatacatgacagctcagccaagcagtctttgtctttctgttgtttccatgagtgaggcttgcagggaggagagggtacattcataagtcatttgttctattctagattttatggctgaagatccttacctgtcatttgttattgttgttttatttttgtgtttctgagacagggtttctctatatagttctagctgtcctgggactcaacacgtagaccaggccggcttcaatctcacaaaaatcaacctgctcctgagtgctgtgatggattaaaggcgtgggtcccagccatcagactctgccacatttcttaatgacaaaatcagccaggaaagatacactgtgaagcagaaaagatacactgtgaggcaggaaagataaacactgtgaggcaggaaagatacactgtgaggcaggaaagataaacactgtgaggcagggaagatactttgtgaggcagggaagatacactgtgaggcagggaagatacactgtgaggcagggaagatacactgtgaggcagggaagatacactgcgaggcagggaagatacactgtgaggcagggaagatacactgcgaggcagggaagatacactgcgaggcagggaagatatactgtgaggcagggaagatacactgtgaggcaggaaagatacactgtgaggcaggaaagatacactgtgaggcaggagagtggggagagctgaatgacttagtcacatctctagtccatcaccaactcttacagaacccaggtgtctccaagtagtgttctctgtttccccatcctgcatttatagggagcacttggctttgcatatttctaaatcttgctacatctcagctatggagggttctgggctctgcctgccccgtgacttctgagtgaaccctttctggttgttctgtcaccgagtaaatggcaggccattgctttttttttgtttgtttgttttttttttttttgtttttcgagacagggtttctctgtatagccctggctgtcctggaactcactttgtagaccaggctggcctcgaactcagaaatccgcctgcctctgcctcccgagtgctgggattaaaggcgtgcgccaccacgcccggctcttatggcaggccattgctaaccgagtgtgaaatagacaggtttttagaagtacttctgtaatgagaaaaatggatcgcttctggtccacaagtgtggaggcttatcagaaaagtttgtcttccttcctagggtggagaggttgccttgtggtctcgtgacctggccacctgatcttacccacaggtggagagagtcagtctgcctggcacctacctgcagagcactggtgcctagatttcctcccagctggtggagaggccatgtttaagtgcttggctggcagtgggtacttgaccttgtacccactcctcctcatgctatccatccctctgcctgcttggcagctgtgtactcagctgatctctgcccaagatgcttctagttgttgtgaatgtgtagtctgacacagagagacgccacctctggtgagcagctttgccttggagcttaacggctttcagctgcagtgactcctgagctctggctgtgagggtttggttgttgtgtgtgcttaaatcaaagttccctttgtgcagactgtaagtgtcaaatatcctctcaaaaatatgattcagaccttatttagatactgaagtaattagcagagatgtgaaaatcaacagtcatctagatgacaaaatggatcctggtgtgttcttttcatgaaagcatttctttctttctttctgtctgtctgtctgtctgtctgtctgtctatctatccatctataaactattaatctatctattctctaccttatatcacctatctatctatctatctctatcatccatctctctctaatgtgtatgagtatactgtcgatctcttcagacacaccagaagagggcatcagatcccattacagatggttgtgagccaccatgtggtttctgggaattgaactcaggacctctggaaaagcaatcagtgctcttaagtgctgagccatctctccagctcctgttttattcttaattatctctgtgactctgatggcattagaaaggaaggacctttagatgctttcgctttctcaatgccccgaggatgagtaccataaatacttcccatgtgtttggtttaggtgtgatcccatctgtgatgtaatttctttggatctgcccagccagagcttggactttgatgatgggtgtatctgttaaagaattagtgtaactgggctggggggggactagagagagtggttgattgtagacttacactgtctttagcacagcccccaactggaggaatgtactgaaattctgacgatttgttttactgtctttaaggtttgcatttgtgtgtgtgcaaatgtatgagtgtgtgtatatgtgtgtgtgcatgcagtgtatgtatgtgagtgcatgcatgtgtgtgtgcacgtgcatgtctgtatttctgtgttgtgcactcatacattactttgataagcgatgaaataaatgaaaagtcagatttgtacaagttgccacagtggatgacttactgtgagccaggttgaggctgtgtgtcatgtctaccccagtctccccagcatctgtttgtatccttacatttctttttaggtctggcagcccttgggcatcctgtacagtcgtcccactgaagagttgtttaaatgtcatctggtagacagcttcacaagtgtcttgccacctctccctgggagtgttggtcgggctatggagtgctgtttccttagatgagtggtcatcactatacctgtgcatctgggcaaagggtgaggaaaagtttgttgaccacactagctgtgactgctcagaacagcattgtggctgccctttgtgaaagacccaggcaggtgactcctaaactcaggctatgggtggaggctggaggtacggtttctgaagagcttttgcccttctgtgtctttccatgtagtcctcctccctggagactagtaacttgagctgagctggaggtgagcagcagagactttgttcaaggtcatgagcttgagttggctccatttgagcatctgagggagaatctgaaaccctgtctcctgaccctctggagggttgttgggctatgagtcacaccctggtcctctgtgtcctcagagctggtgacaccagagtgtgttgcatttgcatatgtttctttgtttgttgttgttgttttcaaaacagattctcactgtgcagctatggctggcctaaaacttgccatgtagaccaggctggctggcaactctcagaacttttatctgcctctacctcataattgctgggattaaaggtttgtgctatcacacctgacttctttaaacctgatattaacttatttcctgacatcagaaaatcataagaatacaaagaagtctctcctatgcttggcttcagctctctctgcttgggacattttttcccatgatgaaatattctttctctttcccttctcctgcatctgtctcttctcacacacatgtaaaggctgtgaggctcttttgggacctaccctctccaaaaaccacattttctttcagactctctatagcatttactaggtgagaggactactgttcacacagcaaagatcttatttgagtttcaccaggtcatatagcgtgtgacgtcaccataaaaagcctgctatcttggcttcattctggaattttcctgtgtgcctctgccttctgggaaggaggaactgcaggcttgtgcctgtgggccctacagcctggatagtggcatgatgggagcaccccactgagacgtagggtcaagaatgtttgctggccagctacctttttctatgatatgatagctgtgacccctcagtaattcagctgggcctaccccactaggctgtgtatcccccattgtctctcggctacaattcccaaggcagtttcttctagcctgtccactggtctgtacaccaaagtattgtagcaggtctccatggcttgggtgggcctcaggtgcctgtgtgtgtctgtgctccagtcagttgatgcttagatggatggtctcagaagtggtcatgggggactctccagatggtgccacttggcttttgacgtcactgacatttcctggttacatttagtcttagcatccatccccctgccttagctctgtagtcagtggttctcctgagataacctaagtagaaaatgagcttagcaagtcagttgtaggtgctgagaatacatttagttactagtgtgcccttcttcttcttcttttttttgtttttgtttttgttttttcgagacagggtttctctgtgtagccctgtagtcctggaactcactttgtagatcaagctggcctcaaactcagaaatccgcctgcctctgcctcccaaatgccaccaccacccgtctgtgtgccctgctttttgacctgttagctgacagaggtaggaagctacacacgcgtatgtatgtgggtaacatgtacacacaccctgaaaagcccagagtttcccatcattcttcaggtgtgtcagggctcatctggccatccctttcctggaggggtagaaattggcctccactgtccacagtatagttgggtgtttgttaaatttgtatcttttactagaagacctgggatgctgttctagaatgttttacccatactctggagaaggaactgaacaatgaggattctgtgtttggttatagtgttctgggtggttagcataatatttatataggttaaaggttatgaaaggaaaagtattggcccaggattcccaagaccccttctcagcatgaaggagatttatctgccccacagggacaaatggtagggagtaagaaacaaaggtaggagataaaggatgatgggagaggagcaagggagaggggagggtagagggttatttgtccttgaggacaaaggactgtcttgtaatagagaggagacagacatggccaattggtgacttctaaacgtaaaataggaagtcttgtgttaggatgaggtgtttaattttaattgggcatggtgaaccaaagggggcttttaatcaccgaacttcagtactttggtacctggacttttggtagtcaggctcaggaggaaggattgggaatagaccttgggggctagctctaggaatgtaatctcatgatttttagcaaggcagaaggactcagggagaagggcaaggccctccagagccatgctagagctggccagcgtcccttcagctcacacttctttccttggaaggtttgaaccgcactgttcggctctctcttggccagggctcttatatctgttaagtttctgtcttgctgtggtccacctctcctgtttctttccgtgtgacttcatctgtcctttgactgtcttatatctgccacatgtaagtaagatttgaagttggtgagatgaggagatctcacattagggacagttgatagtacagggtcttgcctccagatggaaggaagttctacaggatgctggcctggtgtctctgtgtaggggcaggtatgggtttgatgggtacccagggaggttgtgccttggcctgtaagccttcacttgtatgaaaggctctgcctgatttcccaagggtgagcatatatgcataggcagatcagcagacatactctgtttccagcttcctcaccatccagtaaaggaccagccagccatattttcagcatcagtccatggtgtggcttacaatcttgtcccctcctacttgctccaaggtcctgatgtatgagctctgggtgggattgagccttgctgtgtatattccactgtccttagagttcctgtcttatcaaaggcacaccgctgggaagcatagtgtggctatgttttcagcagtctgtgctgctccatgaattctctgcagaagactaccatcagttctgttcctaccttactgtagttccttggtgatctggggaaagctaagagccttgaattaggaggactgggacatgggtggagagggtatggggggagggggtggtttacagcatctgagtgcatactggtgagggaatttcttattagaccaaagccacttctgggctgtgggccctaacaaaggtttctccctctgctttggtttagcgtaagtaatcggatgccacattttaggggcctacttaaattcagggcagggcactttgtgttcttttgttccctgacccttgatgaccttgattattggagtttgttactaggacctgggtcgggtgtatcctgagacagaaaggatctagtgagcttcaggaacctgcgtcagcagctcctgtttgggtaccaatccaggattgatggtaaaccaccgtctgaactagctagtagggtaggaggtgtgtgtgggccttccccggaaggccagcataatcccaatgggatttaaggaatttgaaattcaaagctactgtcaaaacaaaacaaaacaaaacaaaaccaaccctggtgtgtgtgcctcctccctcaaagagggctttagtctttaatggggccaatctgtttgtgaggtacttggcttttaggatagtcatgtcagatgtatcacatgtctggttagtaggacttgaaaggggaataatgtaacttgctgtcacccaactggaggctgtttagaatctttacctggtttctccttccaagtagctaccttgaaaaagtccaagaatcattgccctgctcctaccctatgttccgacccatgatatgctcagcgatcaagaccgtggttccagacaccagcacaggggactcaagctgtcacatcaggactctgttcttggtcctcctgaagccctttgtttctgtcatctgaggttgtgagccttggtcttacttccagaaggtgacctgggctcggggagaggtctcgtatcagaagtctccttcgggttctttccttcttcaaggatgctccctttttgcagacctctgacggcagtacctcaggagccctacttaagcctcaacggatgtcaaactgtaaccttatatttttttgtgactgaacaaatgtctgcatcctggggcagctggaacatgaggtatcaagaccatgtgccccatgccttggtactccatgctcaggaatccaaacccccaaggtgtggtctcctgttatccagggcatcataaggttgcaatggttactggacctgcctgtcaagggccttgagtgtccaaaactccctgttgactgtggacatggagaggaagcagaggtgaggatcctacttgtagggtactagtgtagaacacactgaggatctaacctgtctccccttgctccatttgccaagactgttcttgatttttttttgaggtggggtggggtgggtgttcctttttactgccccttgttcctgagaggagtagggtcactccccctgcctcgggcctgcctttctctgcacacatagccctgtgtacccacccactcatgcctcaccagaggaggtcatatagctgtttcggagttaagcttcctttccccttataaggccgtgtccagcagcacctgaagtttctccccatgcaaatgagacatccccaggacctcagtcccaaccaaccctcaattgcctgcactcaccccctaaaaggtttaaatagcctttgttctccccgccaataaactgagccagttctccgaagctgttcctgggtgtgtgtgtattcttacttgagtactcaccagtccagtgtggtgtgcagtgagcctggctaccccgaggggagaagaagacatagaacagtaccatctcatatgtggaaactgaggcagagaggactgttctgggaacctggctgtatgagacctgtcctgggtaccaagggatacggagtccctcagaggcacatctctgccaagaccctgccggggaaggaattagaatacagggtcccggacctactgatttggccactccctggctcagagcctgcatggcctacgatcctgagactaacctgactgactatcttccacaggagatggaaaccccagggaaaacagccctttcatcaataatgtggaggtggaaagagagagctacttcgaggggaagaacatggcactttttgaggtaattttgtttcagtttctacacgaagaaggtacattagtgaagaacttgtgggaagaaggtaaaggagtggccatctcccgtgccccaggcaagggcagcctgggctgatgaggaaggagcaaggtgcttctcagcctgagatccactgagtttatctgtttctgataagtgagctgcaacctgggctggtgcattccttacagttcctaaaagccttgaggactctcagtgcccctgacttctgattccagacctgttggatagatgttctgggcacacagatgggggttgggggggtccattcacttgactgtgggctcttgagctctacacagccctgggacagatggatctcctgggccagggaccgctgccttgggatgttgacggacctggttcctacctatgtgatgctttgcacccacaggaagagatggacagcaaccccatggtgtcatcactgctgaacaagctggccaactataccaacctgagccagggtgtggtagagcatgaggaagatgaggacagccggaggcgagaggtcaaggtacacgcgctcccctcaggcagatagcagtcttggaggtttctagacagagaacacccttgccaggttttcagatcacgtgtgcctttcccttcatgaggcttgaccattttcatctatacggtaccgtgtctcagtggacaccaccagcttctgggaagggacaaggtcctagaagtcatgtgcaggctgccctggatactcttgagtgggcatccttgggatccatatagctccaaggagaaggagtggcactaaaccctgcctgaggcctgactttgtgtttcattttattatttggttgcagtgtttatttatttgtttttgagatagtctcaatctggccagaagcccactatgtcacccaaagttggctttgaactcacagtagttctcctgcttctgctttcagttactaggatggcaggtgtgtgtgtgccatcatgtctggcttaaagccttccctaaagcttttgagttttattcccctcagttctagctccctgaggtctctgctttctctggagggaagagttcaatgctggtgagcaaagatgaaggtgatttgtcacatctgtttgtcacatctatctgcttccaaggtgcttctcatgagccagtacccagcctgactgtggctctatgaaagtcaggccacagagtggcattggctgtcttctttcctcctgctgtaaagacagcagggtcaagtctacacagtgttcagcacttcccagacgattcagatctggggccatgtggtctctggggacagggctaaggttaacagaggcatgggctgtcttcttggcagtagagcagtggctcttagaaacactgtctcggccatgccttttcctgccctctcccagatactctgggcatccttagctgaccctgttgagatggcagagtcacagctgcccagatctgctgaatgatgggctgctataaaggagaatttaggggctgtaggtttgtcactcaaatgtgttggtggggtatgcttgtgctcccagcgctgccccatggcccaacaggttcttgggcctcagaagccccaggccttccctgtccccagcacacatgtccatttgtccatctgtctatctcttttgtctgctggaatatgtgtccaaggaaaacttggcttgtgccagggaacagacactagactgaatgcatcttggaactgaccctcagctgcaactctgcttagtcaaggccctgctcaggatgatcccgtagtttagtccttatttccttagagtggagcccagcagacttcgctgcctacaagggcagtgtggaaggaacccgtccttgtaagcagggcatccaggtttggggatattatacttagtacagccatagtatattttaccctaacacaaagtatgtcaattctctggctagtgtttccctgggtaacatgtttctggactggattttagttgattaacagctcacagcagagctgcttattgtggttgaaaatgtcctacttagggatccattgggttggcaggacagaagtagagcccgcctctggtgtctcctctgatggcacagaagcttgtccccagagacaggaatcactttcttttgagctgcttctgggttgtaaacaggtctggatcatctggacaaagctaagagttcagaggtggccatcccccttttgaaggcactgggaaccccaggcagtaggatattgggcagacagctcctgagcccgtgtctcagtgggatctgaagctaagctatgtggcctggcagcttcttgtgtatctcaggctaccacccatcaatggcctgcctagacaagttttttgtctgccatgtttctattagagctattggctgcctctaacgtccatctcacactgtgttcttgtacaccgaaaaattaacaagacaggttggagagatggctcaacaagtgagagtgattgctactcttccagaagatccatgctggacagctcacaaccacctaggactgcatttcaaagggagccaatgccctcctttgtcctctattggtatttacattcatgtgcactataccaacacatgtatatgtacatataacataataaagatgaaaataattctcactcatgtgcatataccaacacacatgtatgtatacacaacagaataaagataaaaataattctcaaaaagtcccaaaggcttttcttcatctgccagcttgtagaatccaaacccataaagactttatcttctgaccccagaatgcagtgtgcaggcctcgaagatagggagggcatgaggttaaggcttaggtctccctcttgatatatgtgtgtgtgtgtatatacacatacatacacacacatatatatacatacacacacatatacatatatatatatatagagagggatatatatgtttactgtgatgctcactggccttgggctcagggctaaggtctccaggctttcaaacccagagcttcctcccaccccctcttttcttttcctgtgaaatctttgatgtcgggttggtggaagttaagctgccctgccctggatggctcacagtggcaggggtcctatacaggcctgagctgccatcctgtcttctcaggtttaggtggtcagtttgttgttcttgcactctgccctctggccggctgcaaccatccagtaccgatccttagctgctgggctctccctgtgtggtctcaggttggatgacatcctcagccaggcttctgtgtgagcatcgctctgtaccagccttgtggtcatcatccacaggggatgtgctcatgctggtcctccatgctcattctgtgttctcctaaactgagatgagcctccttcgttggggtctgctggctcctcagctcttgtttccctaggtctctagtctgtttcctgtcatattacaatgagacttttaaactttataggtagccttactggtatctagcccttctctggcctcctttctttcatgtctcaagcttcctggcaccaaggtccgggcccttagctgtctcacatatataacaagggctccatcttactgtcccagaattcccactctgattcttctccccggtaggaaagcagagccaggtggatttcccccatgtctgcctagtatggttttctttccctccagcacaatgccctagatgcccggggttctgctctagaaccacagaacctcgtcttatttggaacataaatgtttgtcagtcatctttgctatccttgtagcttcattgtagatggccaccatgttcctcccagttcctatttcccctgacctccaaaccaaagcatggggtagggttccagactgagttactgggtacaggctttgagcctccctggacatatgatactctgttctaggccccacgcatgggcaccttcatcggagtctacctgccgtgcctgcagaacatcttgggtgttatccttttcctgcgtctgacctggattgtgggggcagctggtgttatggagtccttcctcattgtggccatgtgctgcacctgtgtgagtgtttacagctagtcctggggcaatttctcaggaactgatgctggggcccagagagactactgttgggaaatccaggtctgcttttaggtccctctctagggaccagctcctatcaaagacttgggaaagacgggccggcccatgcagcctggcaaaggccaggtttcctactagtctgaagaccttacctagctgtatctatgttgagggtggcatttctgcatctggggacttgaggaggctgagtcaggggcaggtaccttttactgggctatgatgagactccacctagtttggaaggatcatgattattttcagggtttctcttatagagaaagggatacagatctgtaacttgttcaagtccaggcctccagcatgtcttcttatttctagtgacattttgttatgctggtttatcttatactcacagcccatttgtttaccagccaactttcaaccataatatggtagaatgagagtctccttgactcctactgcaggctacctgaccacttgttccctgataagctcacacctgtgtgtctatcccaggctacccactgtcctttgactggtcattccttctggctacctgctcgcctgtcccatgagtggtcagtctatgttgtcattccaagcctctaacccatgcttcccgactggtcacttcatgtgtctgccccaccatgaccaccctggggcattcgcctctatttccagactggctattccatacggtcaccccaggctgtcttctgtttactttgtgtgggcacttgaggctacctacttcatttatcacccaaatgtcattctttgtggtattagcattcctggcacccacaaataaacttttcctgagcagagggtgcttgctggaggcaaggtggatacaaggtgaggtgccgtattccctgttggatgcacatctcgatgaagcgtccctcttgtgcatcgtgggttggtagaggcgtaattgggtcaggcacctagatgaggttcagcttacagggctatggcaagcagggtctgaagcccctgttttctgtgaccttcgggaatggatttgtgggttgggtagaaaagggttgacaggcaggaggcctgtctttcctggtcatttagtacctcctttgaggtcaaaagcctacaacctcaggctgggcatgttggagcatcttagggcacacgtttcctgaaagagctgcctctctttgcagacaatgctgacagccatctccatgagcgccatcgctaccaacggcgtggtcccaggtgagggtgccagcacctgtggcccttgaattagtttattgatcttgttcaggacaagagctgcgtgcgtatgggtgccattcctgccccaagctcatgcggtgacggtaacattttaacttgttttcaccggggtggcactggagtactgtgctgcccatggagtgaagagaggctctcttccccagagactctggtgtggacacaccctcactgcttgcctgtctgttattatgatgacgggaaccacatccttgagttggacacaaacctgagtagaatgcaggtccttctgaagtgatgagctagcagagatacactgccaagcactactgcctgtcctctgcataaaagagttggcaggcctgtgccagtgtctctcctttaaccatctgagggcatagcaggctttctgaagacagatgaggtactgtacctgcctgtatcaggcagttctcatcacgcttgagctagcctgtaccagtaggcaggctagacctgaattcatagcccaaggctttctggtggttctgttttgagggcatgctaaagctgcttgtcccttagtggggacagatctttctttgtgagtgctcagtgttcatagtgaatggcattccctgacccatattttatcttgggttatctttacagcgggaggctcgtactacatgatctcccgttcgctggggcctgagtttggaggtgctgttggcctctgcttctacttgggcacgacatttgcaggcgccatgtacatcctgggtaccatcgagatcttcctggtgagtccatctgtggaagtcttccttacccaggcactttgcccatgggctgattcgtatgttacctctgactgtcctctatcctgctgctctgcatgtcttggctctcaaagctcctgtctaggctgagggtctgggtccctgatgggtgagacctcatagtctgtgctatctcaggaggcatgtgtaactccttgagcaggattctagccttcaaaggcaaagcagttctgctcatcactgtttttttgtttttttaatttatgtatttattttattagatattttctttatttacatttcaaatgttatcccctttcttggttcccctccccccaacccccctatcccatcccccttcccctgacatcactggttcttatagtatgcaactcctattttattttattttattttattttattttattttattttattttttggctttttgagccagggtttctccgtgtatccctggctgtcctggaactcactctgtagaccaggctgcacaactcctactgtagaagggcttccctgcaacttgatgttgggcttgggctcaatgtttggtgggctctgtagcataagtttctgtttatcatgggtactgtttgtcataaccaggaaatcatggggacaggagcttgaagcagtatgtagtgtcagctgtcaggaagaagacagatgagtcatggtgctaggctttttcccccctctttatacagttcaaaaatcccaacccagggaaatggtgccacctaccctaaaagtggtgggtctttccatctttttttttttttttttttaaataatttctttattattgtacactgtagctgtcttcagacgcaccagaagagggcgtcagatctcattccaggtggttgtgagccaccatgtggttgctgggatttgaactcaggacctttggtagagcaatcagtgctcttacccactgagccatctcgccagcctgggcctttccttctttaatgaactcaaaataatccctcactcctgtgagctaatcccagaggaatctaatatgacacagatcttcccagaggttttctcctgagtgaatctagatcctgtcaattgataataaatattaaccatcactataaccatctcgatggagctggctttttttctctgctacccaagcatcccagagccagcagagaagccttcccatgctttctaagaaaggtttcacggggacaaatgcatattctaatttggggagtctaggctgggacctaggattccttgtcccactatgggtcccagacctgcagactctagattgtcatgctcatttctagggtctgttcggtctctgaggaagtcccattcctacagtagagcagcttggaggacacactagctacttggtagctctctggagattgcgctcagcagtcagctggtattagtaaagacggaggaaatgtgctggactctgctaaggctttggcaggagtccttggcccctcaccacaagggttctccctgcctgttagtaacctgaccaaggttacaatctggctttggcagctggagggaactggacaggaatgactgcaggccggatgccctgggtccatcttggatggcacacaagattctgtctcaatgtacccagtggcctcaagcctgacaggcctcctttgccagtatcaggaagggaggcagtgtgaggtcaaggctgggtgagttcctggacaggaccttctttgctgacctgacttattcttacagacctacatctctccaagtgcggccatcttccaggcagagacggcggatggcgaggcggccgcactgttgaacaacatgcgtgtgtatggcagctgtgccctggcactcatggcggtggtggtctttgttggtgtcaaatatgtcaacaagctggcactggtcttcttagcctgtgttgtgctttctatcctggccatctatgctggtgtcatcaagacagcctttgccccacctgacatcccgtgagtcccaggccatcctggtggtggtgtgggtgtgtgggtgtggcttggatctaatgctgggtcaccttgctgtgttgttccaggggctgggcctggcctcctggttctctcttctcctagcttctctggggaagaacatggaggtatccttgataatcattcttgggttccagtgtggttttaaggaactttggagtatggggtgggcacagtgcccatgcagtggattctgtgtgcatctgtgatgtcaggaggctggtgaaggttgtccttatttcagtgtggactgttggattaattacttttttgttgctgtgataaagcaccgtgattagaaacaggctatggaggaaaacgtttattttggcccgtggttctagaggggtgagagtctatcatggcagggagaaatagcagcagaaagcaggcatgttagcaggagtaggaagctgggggttgggggtggggtggggtgagaggggaagcgagtctggcaaagtccgtccccagaacataacttcctgaaacaaggccatatgtcctgaacctccccccaaagcaccatcagcaaggtatcaagtgttaaatgtctgagcctacggaaaactcaaaccaccacagtcagatggccaagcttgttagaccattcttatctcatgagacatggcttcctcatctttatagaaacccttcaaatgagctgcctcttgtccttctgtgggattgaggaggttaaccaaggtggccggtgtcgcagcaagttgagtgagcatggaccaaggtgcagtctggacatgttgggactgccaaagcccttggtagggaatgtgggagccaggaagggacgaaaccacagagctgtatgtagtttcaccatttttgtggagggtttggccaccttccagagtaagttgccctgggcaggaggaagacagccctcacccatggagggcttgtatgtgagatcagtcttcaagctgctggactgtgaccccatgcttgctcctgacatgtggcccctgcagtaacacgggttacgtttattagagttgctcaggaggtgttgagccccgcagtgagacagcttagcagcgtggtgaaaacgagctctgccctttctctgctctagggtctgccttctagggaaccgcacgctggcaaatcgcaactttgatacctgtgccaagatgcaggttgtcagcaacggtacagtgaccactgcactctggcgcctcttctgcaatggctccagcttgggtgccacctgtgatgagtactttgcacagaacaacgttactgagatacagggcatccctggtgtggccagtggtgtcttcctgggtgagtgttggtggagacggctagggccacctctctgggttgtttggggctactcttagggtcctggttcttcttgcttagccgtattcctagggtcccgtccagccaaaccctaggctagaatggccttcttcatctgctgcaaatcagctgcgtaaggccatgcattcagtgtttgagacaaacactcactttgcagcccagcatggcctggaaatggctaggtagccttgattggtccagaacttatccatgtcattaccttctacatactgggataacaagtagtggggggcaacttcatcttagagagaaggacccagtcctggggagcctgaacacttggtcctcatagtctactctgtgtgaggttgggattctgtatgccccccagtggtatcggtgtgatgtcagtgggcagccgagggctgtgtctgggtgatgggggaggagcagatggttcccatactcaggacctgctggagtctcagaggcaaggtatctggagaaagcagcccccaaagggtctcaagaaaggcagcaagggcatatggattgctggctggaggccacctatgaagaggtccctatgggggggtgggtgtcactgtcagggtaagactgcactatgccaggctagaatgcagtagagagtgaaggtggccatactccctggattattggaggaaccaatatggttacaggctctgtttctgcctcgtgcgtggatgcctagcagggaggaggccaccaagactgtgggcagctagctgttgaggagcacatgttgagttttggggagagtggcttcatgcatgtggtcctcacaaggttgagtgcccctgattggaatcagagccatggaagaacgacctgcggttgtgagtggtgatgctgggtgtggacagtccaatgggcagtcctggccgaaggctgagaaatcctgactgttcgtattacagataacctgtggagcacatattcagacaagggggcatttgtggaaaagaaaggtgtgtcctcagtgcctgtgtccgaggagagccggcctggtggattgccatacgtcctcacagacatcatgacctacttcaccatgctagttggcatctacttcccgtctgtaactggtgaggcccccagccttccctcctcttctgtctttgtgtctacttctctgtgtgttcctaccataactcactcactctctctctctctctctctctctctctctctctctctctctgactctttcttgtctttctatctctttgttactgtttctgtctcttggtctgtctctattttctggtctctgtgtgtttgtctatgtttcttctgtctttcagtcatcagagatcacctttccagcaagcagtggtcgtattggcctatcttctctgatgaatctttctataggcagcatcctctaggttttctgtcactgtcatccgtatctactctgcagggatcatggcaggatccaaccgctccggggacctcaaagacgcccagaagtctattccaacagggaccattctggccatcgtgactacatctttcatttgtatcctttccttaaaggggccctgtgccgaggtgttgaactctaacgctgctgcctttgcaccagtcccctcagtcacatcctcattgtgcccatctgtggtgcgctgtccagattcaggtcctgaccacagcctgccctccttgtacagccttaggtgatgtgccacattaaaacatggcacctgtattcctgtctcttatgattgtatttgacacagtgtcccttaaaaaatccaagagaggagcaggggttgtagttcagtggtaagagtgcttatctagcatgcacaaggccttggcttccaatctccagtaataccaaaggaaaaagaaatacaacacatcactggattggtgcacaccaagggtgcacagccttggttgggtgtggtgtgagatatggcatgtcttagttagggttttactgctgtgaacagacaccatgaccaaggcaagtcttataaaggatgacatttaattagctggcttacaggttcagaggttcagtccatcatcaaggtgggagcagggaagcatccaggcaggcatgattcaggcagaactaagagttctacatcttcatctgaaggctgctagtggaagactgatttccaggcagctaggagtagagtcttaaagcccatgtccacagtgacacatctactccaacaaggccacacctcctagtattgccacttcctgggccgagcacacacaaaccatcacatggctttagcacagaccacagttgcttttgtgaaactgatgttccaggagtcctgtcctcccagcagggaggttggtcaccaaccatacaccttttgagtaccctgtagctagcactctatagctggacagatctgaggacagtacccagaggactgtggaggtgttgggcacatctgtggggacaggatatggagatgtcttaccacatggtgaccctggctacagtgttgctccaggcccgtggaatgggacccactctccagcatgcatttacctggagcttgcatgctactctattgccccaggactgtctgttccttgatttcaactcagatctttcctgcatagtgctgtttggggcctgcattgaaggtgtagtcctgcgagataagtatgttggggttctactacatgaaatgactatagttggtattgtctttcctgagggagacttcggctttgaaattaaatgacctctgggcctcacagttgtatgtgagttaaatgctcttatcagagggtcacactatcttttgcctgactaaagcattgatgtgtcgccccttgggcctggagcctgaagactgctcagagcaaagttgaggcctgatgaagctgggaatggggaatgaatacaggtgtgagaatgggagagataggatctagggaccccagtccttctgctcagttagcagaatcttagtttggaccattgtggactcttcattcttagggtactgcttgtcagaatctcagggcttcaagggttcttatataccgcatggtgaagaagtatagtaccaccaggcctacagggatatgaccgctgcagaaatggcagtggccagcaccaccttggtatcagccaggacttcctgttcctgatgggattctaggggaacagtttcaagccacctaagccctttctgagggggctgtcaggctgactgggtcctagttgggttgggcctctgaaatgggctcttagtttgggggttcacactcaaatggggacagagttttttttttttttccctgccttcagatcactctttagaagctctactgaccaccttcccttactcacctgtaggtttggggaggccttgcaagggaacctggtcattggcatgctggcctggccatctccctgggtcattgtgattggctccttcttctccacctgtggtgctggcctgcagagcctgactggggcaccccgcctactgcaggccattgcgcgtgacggaatcatccccttcctacaggtgagtccttcactcaaggtgcagcagatgaagctggctgccctgggaagagatcatgcaatgtcaggtctgggtgtttaggggcccctaagagtctgtcctgcagagctggaccgatagaatgaagacagggggcctatgtcctgcttttggatactatactggttatctcactttaactgctggactgagggtgcaggcccagggcagaggttgcctggttgttactataaagtccttttccagtgggccatgtttatccattgacctattgaggccatgtgaaggatggccccactggtgtcaaccatggatttggtgtccctggacctggcctctaaggtacaggatgcaatgagagtcctggaatgatatcttcaaaatgtcatagcccaatggcttaaaccaaaggaagttgttttccaaaaattccgcagactggagactgcccacacaaaagtgatttgaagatagaaaaaaagaagaaaaaaaaggaggtttgggtgtggcaggactgtgccctgagtctatctatctgtgtggcttttgggttttcttttgcatacagcatggtgacatgtgactaaagctaggttttgcttgtaagttttgtaagttattccatggttaagatgttccgatgacactgccttgcagatggttcattctcacaggcagtttccaaccccagcccacctacctctccccatactgcaggtgtttggtcatggaaaggccaacggggagcccacatgggccctgctgctcacggctctcatctgtgagaccggtatcctcatcgcctccctggacagtgtggcccccatcctgtccatgtgagtagcctgcaaggacacagtttggagggtgtgaggacttggttactgttccttccgatctgaacatagggtaaggactaaagatacataaagggtaggcacagaaggccaggtggctatgctgtgggcacacagctgttgggccagctgaggtgagtgtggctggacagacagctgttacggtaggtgcaatggctgtacctgtggtaggtgacagggacagtaagcatgcgacttattcttagggtccctcagctgctgtgtagagacccctagaggagctctattgtgtaaacaggttgggtctccctaaagagtggtaagcagtagatgatagacagtggcaggatactactgtgccttcgtgggtggtcagcggcctcattggcccttctgctctaggttcttcctcatgtgctacatgttcgtcaatctggcctgtgccgtacagaccctgctacgcacacccaactggcgtccacgcttcaagttctaccactggtaaggccttctgtgtggacgccccgagggacccacaaacctgagcacatgcaatctgttctggaggctgcctgctgctaggcttaaaactgttttggtggaaggagacccagtgaagtctaggaggccacggtcctgtcctggcctctgacttatatttcctttcctgagtacacgtgtgattcttatgtcagcttggtcctctccagccagaaatgtttggcaatcccagagctgccagtgttcttcaggctcctttccagcacagtgctggctgggtggatggagcccattctgtgttctgcacgtagctgggtgtcttgtgcaccccaggagggaaacagacagttgcactgtctccaggctgcagctctgctgtgccacagcaggatctctgggagccatttcgtatttcagggatgactgagtggcagacctggttgccaggcgtcatgggctgatgctctgttcaaggaagagttgcataatagggaaagtgctgttggtgaagcaggctttcaggtgccatttgggggctgtacgggcctgttctgaacttcatgtccgccaggaccctctccttccttgggatgagtctctgcctcgcgctgatgttcatctgctcctggtactacgcccttttcgccatgctcattgccggctgcatctacaagtacatcgagtaccgcgggtgagtggcagcccctcagaaagctgtgacttcactaccctggggcatgagtctgggtgctgctgctgaggtctcatggaagttagacaccctgtgagtcctaggtgtcttgtgttgtcccctagtcccagccaggctgacgtactcgggtatatgctgaattcctgcccgggagttactgtgcagaagctgggaagggtttttgttttttgtttttgttaatttcatgtgtgttctaatttattaataggcacatctatggcttccactgttgacagtctgtttaaaggatttggcacctgtcaaccatagcactgtcatgtcccaggagctacgttaagagttccatttccaccaagttacctttgtccttccctgacatttctgtcttcactctggtccttgagaccaatctagttcagggcttccaagtcatgatttcagcctcattcttctctctgtccctggtgtccccagtgaatggtaccacaaggaagtcctgctgctcgaaccttttcattttatccagtagccctgcttgtcctgggaagccccttcctgttgggtttacacacattgtgactgtctcagctatgtaaacattcttcaaagtgctactgtgacaaggtgaccttcctctgtacccatacagggctgagaaggagtggggggatggcatcaggggcctgtcactgaatgctgcccgctacgccctgctgcgtgtggaacatgggcccccacataccaagaactggaggtgagtatgccccatagccacagtgccaaggtagcagagtggagtggagaccctgatcctgccaactggttagcgctgtcttggaagcttttactcttggccttctgaggagagatctgacagggcatcactgccaaagaatgggagaatagccagaggtgggtcctggatatccaacaagccaccagcagtatggattggaggcatgctcctctacgggagtttcctctgttctaaggccaaccttagctgggacacctgaagcctcagacacaaggtcctaccggtcccatctgccccacctgtccttcttattccacctggtcttcctaggatgtctgtctacttgctctcccatctctatcccatctggctccatgagcacgggagccctgtgtgtggccattgtaactcctgtccctgcctatcctaccacaggccccaggtgttggtgatgctgaacctggactcggagcagtgtgtaaagcacccccgcctgctgtccttcacctctcagctgaaggctggcaagggcctgaccatcgtgggatctgtgctagagggcacctacttagacaagcatgtggaggcccagagggctgaagaggtaggcaggcaggtggagtgcagagtgagtgaggtccgggttgcaaccacctaagaagagctgagccacggcctgcatctcgaggcttaggggcacgatttttacacgtgccgttcctggtttctgtcagggtggctactgagtctgaaaggatcagaagtaagatttgaagagatgagatgtgtgatctcctgagacagaggggcagtgacaactgccatgggactggatccctgagggcccctgtgtctagccttggcactttgttcctggtgtctgttatagctccctgtgcaccccagcaccttctagtaggtagagattgttgggtcatgagtctgtgtgcgctgggctgtggtggcgcacacctttaatcccagtacttgggagacagagacaggcggatttctgagttggaggccagcctggtctatagagtgagttccaggacagccagggctacacagagaaaccctgtctcgaaaaaaaccaaaaccaaacaaacaaacatgagtctgtgtgctgtcagatgttctgatcctttggataagaggtgagtaaccagaacctcctcctacagcatactggagccatctctgatgcctgctgcccacaatttgctggtcctgtaactcctgggcttcttctacacaggctttcttatttctctgtgatcagttgtgacaggaaacctccagcccaagcagaaacagaacaaatagtgtcaccagtttctcatgtccatctacagcctctgctgtcctcacaaggccaggcagggtcctgccacctccagtgttcagctacccagattgtcagaaaccttttttactcctctctctatatttgtggatcttacctaaggctccatcgtagctgccgtgtcttggtgtcacccttttctctggaggggttgatcagcgagcatttttcttatggctatccttatctggtcttgcttgtgcgttcaggcttcctgctgtctgtgtgtctctaagctgcatcccaatttctgagtccagtccattctgggtggactgtggagtggactctgtggagtgtattctgaggactgactgtgggcattggtggtaatgactattgataactctggtctggagtgacaatcttgtggctttttcagtgatgacattacttgcccggcctgcctgtcaggcagctttgagattcggcaagatcaaagaggacaagagaagagatggatcgttttcttgctcctccaaaagaaccagcagttgccccttagaatgtggagcctccgatccgaaccctggctgctgctgactgcaaacccacgaatttaaacatcatagctctagtccttacggatgggtggttttctgtcttgtcctttggtgtctgacctgtagctggtctgaggggcattttgttatgggagagagagtggctctgtcttggaggtgctcttgtttttatctgtgatatttcttgggtacaaaaaaggccagcatctgctttaagcaatggtatgctcatgtcctttcctggtgtctcctctacactttagaggggatctctggagttaaggccaccctttggacagattcgaagggtgtgcatggactcttgtttgttatctgatgtcactggcagaacatggggaaaggtatttgtgttgaagtgagtgcctgctggggaccctctgactctggtttcaatctccattctgataagaaatgagaagagtatctgtggccgggcgtggtggtacatgcctttaatcccagcacttgggaggcagaggtaggtgaatttctgagttcgaggccagcctggtctacaaagtgagttccaggacagccagggctacacagagaaaccctgtctcaaaaatcaatcaatcaatcaatcaatcaatcaatcaatcaaacaaacaaacaaaaaccaaagagttcctgtggctatctcatgtatgtctgttagattaatttatattctgtagtgctggggtgggacccaggaccccatatgtgctagacaagtgctcactcagccactgagccacactcaaaccctggttggatgattttaatctctatttgcttttaggcagaaggttctaaagaatctgaatcaggaacatgtgttgagaaacagaagccaagtattcgcctctcctggtacccataggaaaggtttagcattggaattagtcatttttattgatcagcaaaagccagaaggagctgcccaagggtccacctgcccctcctgcctgatggagctctgccctttagtcggactatcagtagtaatattaaacgaagacagtttgggaaagccattcattttaagtgatcagagcttgtgtaagaagcttgttctgggcatttccttactatgtcagggttaatatcactttccctctactgcagcatttgcatgaaagggcttgagggtttgagtcaccctatccttccctaactaagggtcctgtcttcctcttctgtgaggtttccctgcccacagtggctttggcagatgtgccaacttcttatctggaccagattcctgcctggtcagggctctgtcctctaaaaccttaggctgggcaggcgattctctagcagtaaggcaaaaactaagatccagctccagctctttgggtctagcctggggaaagcaatgttgcagcctttgtcagggacacaggcatcacaaagccagggcaggggtgtgtaggtaccgtgtacggtaggcatatccttctggtcagtcctccgcagtgttcctctgtgctgtgacctttagccagcttcagcccataggaggacagagtagccctgccacacacatgccatcgagctgagtcagcctctccagtacttctcctatgaaacccccatcatgggcactgtccttcctgcctgggagcagctgtgtccctgtgaccacgcctcccgcctgggctgcctctcaatcactggcatgttccccttttaggacagtgtgtttagattgtttctgaattacgcagaattctataagtggaacatgttcctcttgtgagcctggtctaccctagatggctggctggtggttggtggaggtgaacacaaagcaagggtagaggtgaaaggatggctgggaaccgtgtgtattgtcagtacagctttagttgtggaactgtagtgcagggcagtcattgtgggaccaatataggaggcagtcgaaatcaggcaaaggagggagaatagtgagtcttgtgaccagtggagcaaacctagactaggtgaagtctaaatttgaggtatgggcagagtgggctcaaatcactttctccctcttctggctttgctggggggggggggggctccaggcattcctaggcttagcctgtctccacatggctgccttccttctcagatctctctttcctccgtcttctctgagttacttgttactgagttcagggtcccattgaacagttaggatactttttccaaataaggccatgtttccccattttggctgtagcacggtcaaaacgaacccctcttgggaacaccattcaacccgtcactgtcctcgttccccaaacacatctccctcccacgcaactacattcgttgcactgcagtctccaaagttgtaagcatcaacaagtctggacctcgtcacaggccacaccgaaacggactcctctctgtgcttattaccaagagatgtggaaaaacgtttgcctgacggtgaccacatggtcttcctgatctaaaagggagagcgagcgcaaaggcatgagggtcaccgtccacataagtgtgaagtctagtagggctgttcctctaggtaccatcagataccctgcacccaacaggacctagtaggctgcctgctgtagaaggacagcatccctaggctgttgactcgtgaatggtgtgtcctgagtcgtagcgtacaatctctctctccattgtccctaagcagctctggggagggaagagctgtcctggtagatgcctgacatagtgatggaatgacgggagtggacaggtgtggagactgacatggtggcttgtctgatagcccttactggagcattccattccctcaaaggctgttaaagtcggtccatgaagcatggcccatgagtgttggatgcttattctttttaaaagatttattgatttttatttgtatgagtacactgtaggtgtcttcagacacaccagaagaatatgtgtggggctgcctcactgtagggacgaagggcatgttgtccctggcatgtgtcttagcatcctgtactaacacctgcctccacaactcccacagaatatccggtctctgatgagtgcagagaagacgaagggcttctgccagctggtggtgtcctccaacctgcgagatggtgcgtcccacctgatccagtcggctggcctcggtggcatgaaacacaacactgtcctcatggcctggccagaggcttggaaggaggcagataatcctttctcctggaagaactttgtaggtgggtgtggcaaccatgcccatcccaagtgttactgtcacactaagtgtatggccagaaaatatagacttggggccttggaatgtgctggccaagttgttagttacagaaaaagcaaatggcaggtttgcattcttgaatactctcctctcatgcccaagcccagtccccatgtggggattttcctagaatgtgacacactgtcctctggagatgatggaatagctctgatatggaaagttgttctttgatgcctccccgccaccccctggttagatgacttcatgggaccatgcctacttagcttgtgacagtcttcccactgtctggagggaagctagctccctgctcatcccctcatgagaccccatggtccagctggcccttggtaacttacccatggatacctttctccacagacacagtccgtgacactacagcagcacatcaggccttgttggtggccaagaacattgacttattcccacaaaaccaagagcgcttcagcgacgggaacattgatgtgtggtggatcgtgcatgacgggggcatgctcatgcttctgccctttctgctgcgccagcacaaggtgtctgtcgtaggaccataggccaacagctaggctacagggacaccactatgtggagggtgtggccttgcctgagttcctgcagaaatgtcccccctcttccccaggtgtggcgaaagtgccggatgcgcatcttcactgtggcccaggtggatgataacagcatccagatgaagaaggacctgcagatgttcctgtaccacctcaggatcagtgccgaggtggaggtggtggagatggtgcgtgcacagctgtgtgctggggacgggagggtgcagatgggcagacagacggatggacggacttggatgtcatgctacacttttggaataacagagatagtacatcccggcatgttccatagggtagcacttgtatagtcttactgttcccatcctacatctgagcttgtctcagctgacagcagctctggtggagaaggtctgtggggtgtactccctgggagtgaggtctgctcagaggtctggagcctggggttctagttttttgttttgttttattactcactccattcgtttacatctcaaatgatatcccatttccctgctaccccatcccacaacctccctcccctttgcctgtatgatggtgctccccgacccacccaccctctcccaccccaccccactcctccagcatccccctacgctgggtcatcagacctccacaggaccaagggtctcccctcccattgatgtcagacaaaggccatcttgtgctacctatgtatctggagccatggattcctccctgtacactccttggttggtgggttagtccctgggagcactgggtggtccagccagctgatgttgtttttcctgtggggttgcaatccttctgccagctcccccaccagggtccctgagttcagttaagaggcacttgctgacaggagcttgatgtggctgctccttgggaggtttggccagcaactgaccaaatcagatgtggatgcttggggctctgtttttgtccatgacttcatagttcctcaactagaaattatttgcctatctgtggatatatcgggccatgagtgaagtcatgctggggctaacagatagaataaagtgaccctgggtcacagtagatgcggtttactgtgtctgaatgactaaggagtgaggttcattctgagatacccactccagctgcccctgaggacccaagattgttcctactgaccgagcagccccttgtggattgactgtgtatcctttgctccttcctgccttctgctttctctgaatgctatgttctcacttgtgtggtctctatggcttactcctctgtcacctgatcatggatgacacccagtacacggtctctgcatggctatgtagctcagtttctggagtagaactggcagagagtcacattggatagaaatagtcccatagaggcctgcttctctacagtctcacagagggattatgttagaggggtgtcccagaagggcccatttcttttccatggccatgtggagtgcctcattgggtaaagggacctcccactacccttcatggtcacatggaggagtcccagctccagggctgcagcggtgcttctttgctggagcttgcaaactgcctttctctgcctgtgtctctttaatcatggatgaggtctggcatctctctgcattattgacgacctcttgcatcttcttgtcagctcccagggaaccttgtggtatgggtttatgttttctcattcgataggagactatgtataagactttgagacctctatgagagttttgggtatgtgcaggttggggcatcactgggttttgttgctctgggtgtgctgttcagaaatgcatatccacatttggacatttctcagccatctggagttgcagacccgctctctgtggcttctgtttgtaaccttctctgtaggtggcactctaggtctgtctgcattattagtagtcagaaactacccttttgactaagtaacagaagctgcccagacggggtcttgtgaggtagtccaggctagacatggagaccagcagtccactggcctggaccagtgtctgtaatgtacaatgcatgagctgcctaagctctcagcctcgggcttggcttctagagctaatctccctatgagttcccactagaatacagacctctgtccctaccctggggacatggtcaactgacaaggggctacccagagtgtaaggttttaggtgtttgggtgtaactggcagggatagtctgaatgccaacattcaggatcattagatcactagtgcttaaatgctgctgtccttggtttggtatcttttccctgtgaatttaataactctgtgaagagtgagcttgtctgagacaggaaatgacaccagttatttaggaatatgtgttccttgagaccacagctcttacagacaagccaggaatgccctgtccagaaccctgaacagctctgtgcttagtcagtgtgaactgcagcatcatcattgacagtgtggtgatgtcacagagtccccagcaggaacttaggtaggctgttgtatttgtccacctgttattgcaaaccacacatttgcatcaatagtcacacattctcatgccttcccaggctctgggatagagagctctgatactccagggacagaaatctaggcctggcgtacacggccactgcttgcttaggtccacttgacaatggggattgggtaggttttggttggcggcgacaccatgttttgtatgcattgtttacttctgtgacttgacgctttttaggttgaaaatgatatttccgcattcacctatgagaagacgctaatgatggagcagaggtcacagatgctgaaacagatgcagttgtcaaagaatgagcgggagagagaggtgtgtgcactggggagaaggtaggtagggtcagtgccatctggtcccaaacatgggctctgtgttgaggggagcagagcaacctagccggggaaaaaaaaatggcactggattcacacagttcctatggcatttggctttggttgttaatgaagagcaggcatggccatctgtgccctttgatacagtgtgactctgagggctggcacctttgtagtcacttcagatctttaaacattcacttcactccgtcaatgcctcagccactgagggggctgtgtaggtagacactccccttgttcacccttccagggctatcaggcaccacccatctatgaccctttaaaacccctgtgagcctggcagccagaggggttgttgaagcaggcccctccctgagatggaagctgccacagaggtgtaccatggtgcgtcctcgtcagggttgagtgactgagaggccaggggctacaccacgtaaggagactctggtaccagtgttctgatagttcagcagaggtctgggtccatttatttttttctttcaaggtgggaaagtgaggtaggaagaggcaggggagggaaccaagagtctatctggtagtacaagaaacgggagatccttttgggatggggacagtgccagagccctttgtggaattattgtctactagttgaggagtcttattagccagttacacatgaatccttttgggtcattctgcagcctgcctgcctcattgggcacgttctttcgagggtggctttcaagagcgagccactgtctgttctgacctgctcttccctcaccaggcccagctgattcatgacaggaacactgcatcccataccacagcaactgctagaacccaagccccaccaacacccgacaaagtgcagatgacatggacgaaagagaaactcattgcagagaaacacaggaacaaggacactggcccatcaggcttcaaagacctcttcagcctaaagccgtgagtgtctgtgtggcctgggccgatgcacattgaggacagatttccagccccaccttctgaggagtgttagagggcagcgcactggcccacagacctgcagagaactgggaccagccagcccaaggctatgctatcagtgccagtgggccaggtcatgagggggttgggctatgagtcttcctcgcttgaggataatgacttcccagggcccattcccacccccatagtctaggctgctgtcatagacctctggggtcctgtcatcttggttgatttgagaatcccaagactgtgaggtccttgtggctgtcacagagatatgggaatgccatcatggctgattcagttaagtcttcttgacacagcctccaagcccagtagtgggccagagcctcctctgactgggtctttatggtgggattattctgaaactccaagttccagggagagggagggtttaagggttctatggaatgggaatctattgaagggccaaggccagccatttcattacttagcatggccaccaccagtacttgaattggttgaatcgtgtgtggagtcctctgctggagtaacctgctctttgtgttctcttccatgtagagagtggggaaacctgtaagtgtactttcattttctagactgccttagaccgagttgccttgcatgcctgcgtgtgtacagtcctgtgtgtgtagaacatcctgctgacctcactgcctcccctcagagtggctcagggcacacacccagatgtcattctcttaagtgacaccaaaggcagtgtggaagagctggttctgagctgctctgagatggggcagacgtgtgtgcttcctgcatcaatgaacagattcacccacatccctccaggtctactcagtcaatatataattgcttccttggctctccatccatccaggaggctgccatcctttcctctctagtgagaagggttgtggatcaattctgtatagtcagactacctgtgtgtgagctctggggctggatgcagggccaggagtcctaggcaggggtgcagggtctgagggtctgcctgcaagcctataggtggaaacattctgggaggacatatgctgaggtcgcctggagatgctactgtggtcctttcatctgtgctgtccctgtcctgtctccctccagtcattctgtgccattgtcccttacagacaggtaatgtgcaagatgctggttaggtggttaatgactttagctgaattactcagacactgaggaaaacttgaggagcttggataactggggagctaagagcatcccaggcttccttcaacacataatcaggaaggcatagtaacagggtttgaccctacgctacttgtgcacatgtacctatatacacacgtgcctgtacataacagacagattcctggacacacacatgggcactatcggtgggatacttgcttgtcaggacccaagcttagccagggtcaggaagaagctccagggttcaggcctctttcttggttagtctagcaagagatgtgtttccttgcacaatttccttggagcatttatggcttcggatgtgtgctgggttagagtgcatgtatgtaccagttagaaaacatgtaaacatgtgtgcaccaggtaaagctcatgcatgtgttgtcagatgagcatgtgtgctggtttgagtatatttgtgttgtgtacacactagtgtacctacctgcatgtgtgtgtgggtatgcacctgttagcatttgtagatatttatgtgcatgtattttctactttggatcgtcataggcagttcttaggcagttctgccaatagccagctaaggatttatgacttcacttcctgcttccaagactgctgtgtagacttacactcccaggtgtagacactgtgtagaaagttcatcttgtacaagacattttactgatcaactctgctggattactaggaaaggaggtgggattgagttagctttcagaactcaaggacttttcctggaccctctggtggttttctagcttcaacagggcattccacaatggcataaaaaccaggcaaaacccagacctcaggttccgtgtgactgctgtactctcccatccccaggctcttgcatttcatgccgtttgagaaccgctgttggaccaaacacacagtaattgtgccctttccatggagtgaattcagagttcctgtaatgaaaggcctgactggtgccacagagactcacctataattttatcaaattaaactgaagagagaagataaagggcccatgactgttttcttcctggagaatggcagttacaggctgttatatttggcttagagttgagttgatcagtggatgtgattatgggacatctcgggacctctctatgaccctgaaatggcagcttcatctgcctgtccctctctctctgacgcacagatgcctctactcagaagggctgccatcaagactgtacaggcagattaacaggctaaaaattctgccctgtgtcctaagcccaaggacactccagatgtcccagtaccgatagaagtgcaatttcccgaggtagttttctaaacatcggttcagttctctagagcagggatgtttgctaccaaagagaaggctgacctctgtcctacaggcacctgagtgcttatgtgtgctagtgagtatgaacctgtgaaatcctcaaactatgtgggtgtggtccctgctacctgggaaactgaagagtacagggtcccatacaacaatagagcacttggaactcagtaatgttctgctcatctcagagaaacatgaatctgaaccatgcggtgccagaggctcttgtctctttgtcacaacttgatagtgtcatctggactggctaagggtaggaaagagggttgcctaaacccagacccagttctctgctgaatcccagcttccatacagcatctgacagaaccaggacggcagggtcattgactggtgagaggacactctagagctctcctcttgagcacctagtcctgactacacctaagtactatgtactcagttcaacagatatgctacttggcagcaccaagcatgccagtaggatgccagggattcagcagttgtaccagtgccctaagacacaggccagttcccacgcctgcccagatggctgctgtgccttccctcatatcctgtttctgcctgtaccaatggttgcttcgcaaatgcagcttattgagtgtgttgtagtttacctgcattactttatggtccctagaagcttagcggtttagtgatgctctgttctaaagtgtctagagccaaatgctttctgctgctaagtcaccccacaccccatcctaatatgctaagccttgcccttcccatgaacaagctgggaaggacaagcagactgcaggcctcaagcccactgtgcccactctaccatccttctcccagggaccagtccaacgtcaggaggatgcatactgctgtgaagctcaacggcgtagttctcaacaagtcccaggatgcccaactggtcctgctgaatatgccaggccccccaaaaagtcggcagggggacgagaactgtatccttttccaatgtttcccagtggtggtggtggtgagctgtattacaactgtggcactgtcaggcctgactcctcttgtttacagagcctcaactcctgtgagttggggacgatgggtcaggggagggtggggcaaggcaggcagtgatgtgtggtacaatgaggggtccacctaggcctgtccatgccaaaacatgcttttctatgtgtggtgtatcatgcattaccccggggaccttggacctagggacataggtaggcaagtgccatggcgtctgaccagactggggagggctagggggtgtcaggtccttcctagcattcgagttcctgaggatcggtgatggcccttccttacaatgctgggaccaagtgtagcacctagagtaagcgctctataaccccatcccagtatgtacctttgatttgcttgatacctgactaagccagagcaaatccacatggtgtgtctctgggtgacaagccttgatgcagagcagtatacactaggacacagactggggtcatctgaatgcccagcaagtgcagtgtgatcctaagcctgcctgagaagaacaacccctcacaggaagaactgagcccttgttctcgtgcatgtacctgcccatggtctcagtggttccgtgccccacagagctggcactggagcaatgctgaatctccctgcctggatgcagtatgctctgagcttagcctccctcggcggcagatcaagcaggacagatggccgcctgctcttccatttcacagttcaggctgttggccatagctttgacacgtgctttgctaagtgtcaggatatctctggggccttgttggacagccacttgggaccacggaatggcaaatgagggagatgtttctgtttcctggtcagaaaccactgaaccaccagggttccagtgacccagggttccaagtggatgggattaataactgaggctccagaaatctctctgccttctggaggtggcagctttgtccctgttctttcgtggtaccacatcatcatttcctctgtttggaggtccctagcttcttgggatgttccaatctgccacgggccttggtttctcagactgagtctgtaactggggtccctgatatgactagttgagattggtatggccttaactatcaacccagacatggagttcctcgaggtcctgacggaagggctgaacagggtcctcctggtcaggggtggtggccgagaagtcatcaccatctactcctaacacctgcaacctggacacacctggatggggtcaggactgtgcaagctgcctgtggccaggctgggactcgccagcatgccactgtgatagccactgctctggcactcattgcctggcctaccaacatgttgcagtgattctggtcaccctgacacacacggcttcccacagacataacagctcctaggcttcctccaaacagaagatgctatatggcggggagtatctagagctgttctggtaggaacggctccttacattgttgtcggcaatggtaggtatacccaggagatctggggcagctcttcctattactggcagggcctcgcctcctgacactaggatcacctttctgcagatggctgtccagcattttgtggcagttatattttacttccaccagagaacagtacaaaggcgcctctgtacttttcatgaacctgacagataaaccagaactcgtgaacaagcacacagttccttgggtctagaatgtcactgagttgttccccattggcttctttgttcctttgagtatccttgctgtgctttctgtacagtaagcacactgaggactgtccaccctcacctcctcattctctcccccaccctcctcagacatggctcagggtaccactggaaagtgagatagtgtttacagggtaggagtgggtcaccattggaaccagtggtacctgacagctgtgttcccatctgagtcgatgccctaggagctcctgcagagagaacctttgttctgcagggctatctgcagctagcctgctttctcttctcatgggaactcagccactttatttcatacgcaccgagctgggaacttcaagcaggtgactacggagagccacagtgtaacaagcaaacggcaggaactctgagaattctgcacatagtccaccacagcaggcagcatccagagtgtgaaccatgatgtgtctcagcatacagctttgcacatgaaatgccgtcccatccctcaccctcctggagagaaaagccaggcccagcccaacaccctcagcctcagcagccacagccctgggtgtgtgtctttctggctgagtgtctcctgccatagatccttactcagccgggggccataggcgcctctgcacttttcaagaacctgacagatgatttgcactttacccttgggcattctgctctgtaggtcatggtttgttcacaggctgtaggcaacagcactgatccgttcctcacgttctgtatggcgtatttatttatttaaccctccccggggaagcttgatagaggtggcttctatgtggatggcccgtggtgccaggctctgggcatctccgacttcctccaagagaatcagccctgtccacattcacgacgttccagttagggtagaggccacgtttgcacctgcacaggttcttcaggctttgttaggcacccaggtaagctcgccagagtgactgctgcccagtgtgtgtccctgtcagcatagtgatttccacacctgcttttgcctcaattctgaacttggctcagactcctgagccctggatgtctagagcagagcaggtggctcgcctcgcctctcccagctgttaggaatgccctgggcagctggcctttgcaggttctgggtcgctgcttacaagagatgcctgtcaagagcgtccagcctcctttctgttgcaatctccatgttcctggtaactgtggccgttcagatcagtttcatgttttttcctttttatagacttttgtctttgtatgactttgttagtagcagagtaaagttctataaaatataaatgtttaaggaacttcgtgtgcctcatttccatagaattcagtggtggcagaagcagtacttacctattccttcccagagctgctcagaggcccacttcaagactgaccacccaagaggctagaccacccagggctctcagggtcaggggtgaccctcctgcattggagaagctctacaaaaatacaaggggaactctcgtgccaacttagatttgtcaactcagtactgccattgtagggaatcaactcagaattttctaaggatgggagccccagaatcaccacagtgcaagtgaggctataatctagaaaatgggggacaggtaggaggtgttgagtcactgggatacagaactgtgcagccatgggactggtgttggcacctccgcagttgttaagtaggtttatctctatggcccaggacatatccccacaaaccttctccctggcattcatcatggtgtcttccatacccaggcattctgcagcagagcagtgtttggttatagaaacggggctcttgacccgtggcatcacgcacaagcctgggagacttactcagaagctgccccatagtatgggagtcctctcaggttgggtcccaaaagaagcaaatccaagaaaaccgtttgtaattcaaggaaggggggtagttcaggaaagactgccaaggaagcacagagctgcctttgggaggatgttctgatgtagaagcttgacatgctaatgactgatgagtgatgtagtcaccctgtctgtggtgagccttgaatatagtgggcacagtgttggctatgggaatgaactgggagagtagctgtcctttggccctactggggaccagagttctcatgcatgcatggcttagagcacataggcctggcattcatggtaatgattacaagttcaggcataggggtgtcattgggaacagacagacacagagaacagctcaggcatatatccagagtcctaacaacaggttctatggcaagtatgaagcttaggcaggcggtgtagtctttgtagcctgttacaccttgcagatgggactttgtgaatatcgtttgcctttgggggaaacaccatgctgcagtttccagatgtctgtcagtaactgatcccttctgcttaggacactaggaacaggaagggcagcaccccagaatacccctgaggaggggcttggctcactgacaaatcacatccatgatgatatcactgtagtgaggaaccccagggctggggatcagcacacaggccacttcatcaaaggtcacaaaaacatgcagctgtgaacaggcccaagggaatagcagagtggacttgcaggcggaaggtacaaagagtatgctctgtcacctagagtagaacaagggacaggcagcaggtcctcttgagctgcccagcaaaggcctgggctgtgttagttcacatggggatggtccaatggatgatgtcaaagacacagactccttattggttctaaagccagctgagaatggcagagactgccttctgctctcagaactggccttgatagcaggcaggagcagtctgcgtgtttatgagccctgaagagacagggttaccctgaaggtttagaagaacaaggaccttacacttgtctgaatttgctaggagacctcctatgtgtgaaaaaaggacacgaccaactcggggcagcaggattccagatcatacttgagaaattaaatagaaactggagtcaaaagattcaccctgaaagtgatggggtacctgctaagaaagggtcatcttggcgacacttcactcctgcgacagtttatttgggaatgtacatagatcgggttgttgagttctaagaatacacagtagccacaacctccacatacacagccaaggttggttattttcctcaccacagccactgtcgtctgttgccaggtactaccaactgccacagagacaccatcctggcacccagcacagggtggactaagcatcaccacctctatctttcttacctctgtctccattttcaacattgcagttttactactaggtagtcctggagttatcccaagccaagttcctgcatctcagtagatccactgttctcagacactagtgaccacgtccagagtggctacgtgctggagaacatgagcagtttggggacaggggaggcggtgtcactagatagtccagtctggtcttggattgtagctcttgatgtagcctcccacaagctctcactgccacacccaactaaatggtctgggtgtttctcatttacttcacaagtgctttcccatctctttaggtcttatcatggtacggagggagaactctcagctgtctggggtggtgtacccccctccacttaacactcacacagtggcaggtgctcggcccctgccatgagcttgtcagggcttccacctgccctgcatttttaaaacgtgaagccagggctcaggcttggctgaatctccccacttcccatgctgctgcagctggaccatggccctaggtgtcattggggatatcctgtaggacatctctcagggcctgaaaggacttttttttttttttttttgaaaaaagcttatgttcattggtgttttatctacatgtatgtctgtgtgagggtgttggaagccctagaattggagttacagacagttgtgaactgccatgtgggggtgctgggaattgagcccaggacctctggaagagcagcctcttaactgctgagccatctcttcagcctcctgaaaggacctcttagcacaagcccaatataagagtgctgcatactgagagagaaactgggtggccatgctgattcaatccctctgctgtggtgtgggtggtggaacctcacatacatgccatctctacatccatgacgtgggtactttagtcatgttgtaaggaaagggtgacacactctagtcattttcgttttggggagcatgtctagctaacagtgaacagcctacagaggactgatggtccccaggtcagagacatcacattcaggtcttcgggaattccttagaataggcacggggttgaggggaaaggagataaacataaggttgtgtcgcttctcaacagtctgcataagctggagcccacggagtccatctggagcttggtgtttcttgttaacatgagctgaactctgggtttagagttctggtttttcttagtctagaaatcccttattaagaagcattgctatggagttgtgtgcgtcaagcagtataagccaggacggttctacagcattcaccctccacaagtacctgtcatcttcacctgcagctacggtgtgtcagtacactacccaccgctctcagaaaagtgttttaatacaagggtatgtgtgccttgttacagaatgcacaattctttattatgccaagaaggcatcatgcccaactttcataaactcacaagaggttaaaaagttcctcttgttctgtcctgctggtggaaccatgaaaattgtggcttcttgaggaccccatacctttgcagcctttatggagggacatctaagtatcacttggctatgcacagcctgaatgaggacctccagcattgtacctgatccttctcatcccaacccgtctgggtcttatccatatctacctaggatgctggaagctcgacaccaagcctcatgctgcccacggaacgtcactctgtccctctgctcaacagtgccccctccacatttgctgataatctggcctctttgttttgctttgtttaacatggtacactgaagaagaaccactttccaagccagtccactgactttacaacatagaaacttcacaaaaagcattgccttttctattcaggtacccgaaggtcaaagaaccatgaggatacaaaggatgccttcaaatatcccatggtcacactgcagcaaaagcaggaacagatgcttttgtgccctcatgtatgggctttctggatgacacaggagcacgtgtccctggtaaccatcagctgcatcaaatgtactggtatccaaatggcatggagaaaggtagctttgtccatgaatatccaagcctggtgccatctccctggtgtgcccccttgacatctgcagctggtgttgagccaggggatgctgtattctctactgggcacatgccagcccctgctctgttcccaagggcatttgggcagagtgcttgtttgggtgctaggatgggtggaagtggtggtggtggtgatggtggtggtgctcatggtgatggtggtgttcatgcctctggaccacaggcatcacatagccctcaggccccagcatgggaggcaggtcccgtactacttcatgctccaccatggtaggctggccatgccccttaagtggtgagtggccttctctggctttctgccggtaccgcttgtgaccatagggctgcggtggaggctgtggtgggggctgaggaaggtggtggccatcctgagcactctggggcaatggcacggcctgcaggcaatagctgagagctttccctggcttgccactgcctggtgtcccaagaggttttcctggacccttaggagacctgaggaactgcttctcctgccccttgatccggggctgtgcagccagggcccgggtggcaggctcattagctggtatgacatgctcagccaggacttgagacctgcggtggtgtatagcgtgggcatccgactcttgtgatcgggacctgcttggaatgtgtgtggccctgccatgatgttcttgcctggcctgctcaggtggtgaccctagggacaagacaaaggtggtccagagtaaggcttgagatatgtcataactgtactatgggtttgcaatagagctggctttctgtctgggtcacgtctcagatggccacatgccccaagctgggcagggagaagtaaaagctcagccccccacatattttatactccatctgggtgtcagacacctcattaaagagcctgaatgtcactccttaaaggggtttggccactctgggattttactgcttgggtcagctggccttttgtccctattgtgggtcctattaaggagattctctactgggatagacagaacccttctaggatatgaggagggggtgacagaaagttatgtcactctagggggcactccactgagatgagatcaagcccacttccaggatagtctggttgcagcttcatgaaatgcttaaacccttaaggtcagccctatgcagtggccttagtacatggggccaattgaggtcacacttcccactaaaccctttagagtccctctccagatgccacccctccttccacccagcgtcagaggatcaaagctctagtacaaagcacatggagccagccattcccaagtgtgggtcaacttcagccagggacttctagctgatcagagatattatcacaatggacagattgcctgcatggactctcagggatgcctagtgtggatggggggatagtagaggacttggcctccagctttcagagtgccagccaggctgtagttcatgagtctctaaaggttacaagaggcacaaaaccagaaaggaacctcgtgtctacaatgctggctgtccacttgtcctcaagctggtaattctgccctaactgccagctccccctgctggaaggctcatgaacatacatctagtagttttatatcttccctaagccagagtatgtctcatacatacacctggatgttgaaccaccttgctttccaggccccttgccaatgacagaagggtaagctgtgagttcacatctaggcagaggataatggggcacccaagtggggtggggacacctggaacccaacatccagagccccttgcctacttgcaccttcagggagacatctatacccagagggtagatacagggtgggagtcctccagtacctaccaggaccaaacttagatgtgtagttctcgatgccagcaaggtctaggtagtggtttctgcgctctgtgttctcatccacacagtagggcactcgcacagagcagggctggggatcagcattgggcttcctgtatggagcagaggataggcctgacaatttgctcaaggccagactttaagtcatataacagggctgcttgcagaagtggatggtgttcgaggatgtctaaggagggacgttgactagtatccagtacccagagaaggcggaagtgacacagttggacaatgttgtatgttgtccagagaattaaggtccacaacccatgatggcagcctatcagcacccaggatactaccacatgtctcacagggcttgagtgaccctaaatttagggtgttctctgtttacctacctgggaccacaatgccccctgctcccttctgttggatagacatggtgctcagccccacaaggtaccctcactcttcatagcacacagtgtctacctgtctcagcaccccgcctgacaggacactggggaggctagcaggaagccaaccactgaactcacatctcacctgctgtaggcggatagccttctgtcagccactcggggctcatctgtgagctcaatctctgttctgccacgagtgggctcccggtctgaaagaaaggcatcccattcattcattcattcattcatttcattcatcctttgcagttcagttattcactcacccctgacccacctgcttatccacgcatgcatttcttctgcctattcatgttacaaatctgaacatccatccacactcatcacaggcatgctataaccagtgctgtccttgaactccaccccccatgttaaggcagagggtttattccacatcatacatcattatacaagacattgcctcttatacacggacaggggtgcagggatttgatagtttaggctgtcttagaagcacagtatgtgtggagttaatggtttaaaataaattaatggttagatacaaagaaaaatgactggatttgcagagcacatgtaacagaggcgaaggccaaattttatcagtgcatgggataaagtgctggggggagacgctccatgctgattatgaacagttaaaaaacaagttaaggctggccttgaacttttaaccctgttgcttccctagcgcttagattccaggcctatgccaccatgccctttgttaatgaattactttccttgctcgttctatccattcattaagcaaacagtttcgtcttctgccaggtgccaggttctgcttgggacattgtggaagcaagaagtttttgactggaagtagttagggaacctgaacaacactgatacccagggccagtggtggggagataacggtggggaagggcaagtgtaaaaagcattaagttaggtggctgagggtgtggcctgcccccgcaggcctgtcttaggggtggtgctgtccctgcaggcctggtttagggagatgctcatggagatgatattgtttgtacaggaaggctcctggcatagacccctcaccttggccagtgagaggacattccttcttgctggagggttcagggctgacagttagcttcactcgaagggtcttgctgctgccggaggagtgattgacagaggcatcgacaacctcgtagatggtgtgcatcaggctggacatgtcctggggccaacatgacagacttcaagggacagttttcctttccttaccaagcatgtattcaccccctgtccacagcaggcaccttgggtccatttactccccatcagacactgacttatacccagattagacccaggatgttgtacatggcttaaaggtagccctgctgtctgtccttgaggccagggttagcctaacctttgatttttatattctagaacattagacgagcaagcagataagctttctctctagatacactttttttcagcaccattgtcatggccaatgaagatgcttcctctgcctcttttagacacagttcaatggagcaaggacactccacaggcccaggctgcctggcctagggatgtcagagctatagaaaaagaccgtgctggaattggtgataagacttgtgcagactgccagagtaaggagacgctgatactagctaggtcaggatgttaaaatgggctctgcctccccttctgtcttaggaaagttctagtctcttctttctccccagtcagggctcactctgtctctctatctaaggattcagacattatctatccatctgtctactgaaccagattggttccagatctcaagaggtcttacccccgactcctcatcctatgggtggactgacagaggtgggcgtattacctctctggtgactttcccactgttgtcaaagtcatacaatgtgaatgtccattcttggcggttgtcttcttccactgagacgtcacactgcagtgcctgtaggcagcatgcaggggtaggaggcaaggaagaatcaactggcgcctgagacccgagtgccccaactgaggctcttcctggttgtcagccaggaagaggtagctcaggagaagttggcttgcatccctcaaccctgcttcttgcccacccccgccccctagtgaggagccgattccatgcttcatgactcagtttcccccctgtggcatctgtctctgctcatgcaaatactcagggtcacttcgagttggaggaattaggactgtgtgttcctgctgctcccctctgtcgttccctgaccagtagtgctagatacctattacatctgcctagcaacgtcaaggtcacagcaataccaggcaaacccccagagcatcacattttagtcctgtggtaaggcctcagagaggctaaggaaaccacagagctgggatgaccatggttcccatttagggccaccactaatcatgctggggcccagggagacacttacgcagatgtacacaggagaggacttacgtcaatgttcaagtgcttcttgctaagtctcagtggaccctcacggcttgctgccttctccccatcatctgtgctgaagagctggccctggccctcatggccctcagacttctcagggggcagcacaactgaaagggcaagaggaggtgagacaagggcctgtcccatgtgggtagcgtgactatcttgctctattctgttctacatgagctctgagctagagcctgctcctgtagaataggaaagtagtgagaagagagaggcctcacttgggttagttcaactatgtataccctggctgtactttgcagtctgtagtgactttcagtgagcaatctgtctcctctaggctgacattgtacagatgaggtgggagaaggaccttcaagatcaaaacagagtagtcaccactcctgagtcctccaggagagtgagtccctgtatccccaggttttctcctcattttctaatgccttcatccaaaacccactggcaaggccacatgtgggctagctgttggccaagcagtcttgtctcccctgacttccagtgtgaatggataagaagccctgtttctggggctcacatattctcagggtctcaagctgtgtcttgacaggggcccaggttgttggtcaggtgtctgtccaggtatgagctgagaggatgcccagtacctgagttgcagtaggcagtgctaggagtccctctgggcttcagcagatgtctgaagggggatctataggctagtgcacctactaactagaagccggtaagaactcatcacttctctgtgtggggctaactccaccaaagatacacacatatgatagtgactcaagcagggttcaagtcacagatttaggaccactccaccactccacaactggtgcagcaagtggccatgacattagctcaaaattcaagagcaccagtccatgcaacccaacctccccactcagtcccagaactacatacacaaaccactgtacagggaccctgtggctcaatattttgcttctcctgtggacatatccgagctgcctgctt

SEQ ID NO: 1191 - DNA, 5121 bp, Mus musculus
ctacgccggagtccggcggctgctctggagcagcgtgtggctgcgagggacagcagagtctaacggagccatgcccacgaactttacggtggtgccggtggaggcgcgcgccgacggcgccggggacgaagctgctgagcgcacggaagaacccgagtctcccgagagcgtggatcaaacctcccctacgccgggagatggaaaccccagggaaaacagccctttcatcaataatgtggaggtggaaagagagagctacttcgaggggaagaacatggcactttttgaggaagagatggacagcaaccccatggtgtcatcactgctgaacaagctggccaactataccaacctgagccagggtgtggtagagcatgaggaagatgaggacagccggaggcgagaggtcaaggccccacgcatgggcaccttcatcggagtctacctgccgtgcctgcagaacatcttgggtgttatccttttcctgcgtctgacctggattgtgggggcagctggtgttatggagtccttcctcattgtggccatgtgctgcacctgtacaatgctgacagccatctccatgagcgccatcgctaccaacggcgtggtcccagcgggaggctcgtactacatgatctcccgttcgctggggcctgagtttggaggtgctgttggcctctgcttctacttgggcacgacatttgcaggcgccatgtacatcctgggtaccatcgagatcttcctgacctacatctctccaagtgcggccatcttccaggcagagacggcggatggcgaggcggccgcactgttgaacaacatgcgtgtgtatggcagctgtgccctggcactcatggcggtggtggtctttgttggtgtcaaatatgtcaacaagctggcactggtcttcttagcctgtgttgtgctttctatcctggccatctatgctggtgtcatcaagacagcctttgccccacctgacatcccggtctgccttctagggaaccgcacgctggcaaatcgcaactttgatacctgtgccaagatgcaggttgtcagcaacggtacagtgaccactgcactctggcgcctcttctgcaatggctccagcttgggtgccacctgtgatgagtactttgcacagaacaacgttactgagatacagggcatccctggtgtggccagtggtgtcttcctggataacctgtggagcacatattcagacaagggggcatttgtggaaaagaaaggtgtgtcctcagtgcctgtgtccgaggagagccggcctggtggattgccatacgtcctcacagacatcatgacctacttcaccatgctagttggcatctacttcccgtctgtaactgggatcatggcaggatccaaccgctccggggacctcaaagacgcccagaagtctattccaacagggaccattctggccatcgtgactacatctttcatttatctttcctgcatagtgctgtttggggcctgcattgaaggtgtagtcctgcgagataagtttggggaggccttgcaagggaacctggtcattggcatgctggcctggccatctccctgggtcattgtgattggctccttcttctccacctgtggtgctggcctgcagagcctgactggggcaccccgcctactgcaggccattgcgcgtgacggaatcatccccttcctacaggtgtttggtcatggaaaggccaacggggagcccacatgggccctgctgctcacggctctcatctgtgagaccggtatcctcatcgcctccctggacagtgtggcccccatcctgtccatgttcttcctcatgtgctacatgttcgtcaatctggcctgtgccgtacagaccctgctacgcacacccaactggcgtccacgcttcaagttctaccactggaccctctccttccttgggatgagtctctgcctcgcgctgatgttcatctgctcctggtactacgcccttttcgccatgctcattgccggctgcatctacaagtacatcgagtaccgcggggctgagaaggagtggggggatggcatcaggggcctgtcactgaatgctgcccgctacgccctgctgcgtgtggaacatgggcccccacataccaagaactggaggccccaggtgttggtgatgctgaacctggactcggagcagtgtgtaaagcacccccgcctgctgtccttcacctctcagctgaaggctggcaagggcctgaccatcgtgggatctgtgctagagggcacctacttagacaagcatgtggaggcccagagggctgaagagaatatccggtctctgatgagtgcagagaagacgaagggcttctgccagctggtggtgtcctccaacctgcgagatggtgcgtcccacctgatccagtcggctggcctcggtggcatgaaacacaacactgtcctcatggcctggccagaggcttggaaggaggcagataatcctttctcctggaagaactttgtagacacagtccgtgacactacagcagcacatcaggccttgttggtggccaagaacattgacttattcccacaaaaccaagagcgcttcagcgacgggaacattgatgtgtggtggatcgtgcatgacgggggcatgctcatgcttctgccctttctgctgcgccagcacaaggtgtggcgaaagtgccggatgcgcatcttcactgtggcccaggtggatgataacagcatccagatgaagaaggacctgcagatgttcctgtaccacctcaggatcagtgccgaggtggaggtggtggagatggttgaaaatgatatttccgcattcacctatgagaagacgctaatgatggagcagaggtcacagatgctgaaacagatgcagttgtcaaagaatgagcgggagagagaggcccagctgattcatgacaggaacactgcatcccataccacagcaactgctagaacccaagccccaccaacacccgacaaagtgcagatgacatggacgaaagagaaactcattgcagagaaacacaggaacaaggacactggcccatcaggcttcaaagacctcttcagcctaaagccggaccagtccaacgtcaggaggatgcatactgctgtgaagctcaacggcgtagttctcaacaagtcccaggatgcccaactggtcctgctgaatatgccaggccccccaaaaagtcggcagggggacgagaactacatggagttcctcgaggtcctgacggaagggctgaacagggtcctcctggtcaggggtggtggccgagaagtcatcaccatctactcctaacacctgcaacctggacacacctggatggggtcaggactgtgcaagctgcctgtggccaggctgggactcgccagcatgccactgtgatagccactgctctggcactcattgcctggcctaccaacatgttgcagtgattctggtcaccctgacacacacggcttcccacagacataacagctcctaggcttcctccaaacagaagatgctatatggcggggagtatctagagctgttctggtaggaacggctccttacattgttgtcggcaatggtaggtatacccaggagatctggggcagctcttcctattactggcagggcctcgcctcctgacactaggatcacctttctgcagatggctgtccagcattttgtggcagttatattttacttccaccagagaacagtacaaaggcgcctctgtacttttcatgaacctgacagataaaccagaactcgtgaacaagcacacagttccttgggtctagaatgtcactgagttgttccccattggcttctttgttcctttgagtatccttgctgtgctttctgtacagtaagcacactgaggactgtccaccctcacctcctcattctctcccccaccctcctcagacatggctcagggtaccactggaaagtgagatagtgtttacagggtaggagtgggtcaccattggaaccagtggtacctgacagctgtgttcccatctgagtcgatgccctaggagctcctgcagagagaacctttgttctgcagggctatctgcagctagcctgctttctcttctcatgggaactcagccactttatttcatacgcaccgagctgggaacttcaagcaggtgactacggagagccacagtgtaacaagcaaacggcaggaactctgagaattctgcacatagtccaccacagcaggcagcatccagagtgtgaaccatgatgtgtctcagcatacagctttgcacatgaaatgccgtcccatccctcaccctcctggagagaaaagccaggcccagcccaacaccctcagcctcagcagccacagccctgggtgtgtgtctttctggctgagtgtctcctgccatagatccttactcagccgggggccataggcgcctctgcacttttcaagaacctgacagatgatttgcactttacccttgggcattctgctctgtaggtcatggtttgttcacaggctgtaggcaacagcactgatccgttcctcacgttctgtatggcgtatttatttatttaaccctccccggggaagcttgatagaggtggcttctatgtggatggcccgtggtgccaggctctgggcatctccgacttcctccaagagaatcagccctgtccacattcacgacgttccagttagggtagaggccacgtttgcacctgcacaggttcttcaggctttgttaggcacccaggtaagctcgccagagtgactgctgcccagtgtgtgtccctgtcagcatagtgatttccacacctgcttttgcctcaattctgaacttggctcagactcctgagccctggatgtctagagcagagcaggtggctcgcctcgcctctcccagctgttaggaatgccctgggcagctggcctttgcaggttctgggtcgctgcttacaagagatgcctgtcaagagcgtccagcctcctttctgttgcaatctccatgttcctggtaactgtggccgttcagatcagtttcatgttttttcctttttatagacttttgtctttgtatgactttgttagtagcagagtaaagttctat

SEQ ID NO: 1192 - protein, 1079 aa, Mus musculus
MPTNFTVVPVEARADGAGDEAAERTEEPESPESVDQTSPTPGDGNPRENSPFINNVEVERESYFEGKNMALFEEEMDSNPMVSSLLNKLANYTNLSQGVVEHEEDEDSRRREVKAPRMGTFIGVYLPCLQNILGVILFLRLTWIVGAAGVMESFLIVAMCCTCTMLTAISMSAIATNGVVPAGGSYYMISRSLGPEFGGAVGLCFYLGTTFAGAMYILGTIEIFLTYISPSAAIFQAETADGEAAALLNNMRVYGSCALMAVVVFVGVKYVNKLALVFLACVVLSILAIYAGVIKTAFAPPDIPVCLLGNRTLANRNFDTCAKMQVVSNGTVTTALWRLFCNGSSLGATCDEYFAQNNVTEIQGIPGVASGVFLDNLWSTYSDKGAFVEKKGVSSVPVSEESRPGGLPYVLTDIMTYFTMLVGIYFPSVTGIMAGSNRSGDLKDAQKSIPTGTILAIVTTSFIYLSCIVLFGACIEGVVLRDKFGEALQGNLVIGMLAWPSPWVIVIGSFFSTCGAGLQSLTGAPRLLQAIARDGIIPFLQVFGHGKANGEPTWALLLTALICETGILIASLDSVAPILSMFFLMCYMFVNLACAVQTLLRTPNWRPRFKFYHWTLSFLGMSLCLALMFICSWYYALFAMLIAGCIYKYIEYRGAEKEWGDGIRGLSLNAARYALLRVEHGPPHTKNWRPQVLVMLNLDSEQCVKHPRLLSFTSQLKAGKGLTIVGSVLEGTYLDKHVEAQRAEENIRSLMSAEKTKGFCQLVVSSNLRDGASHLIQSAGLGGMKHNTVLMAWPEAWKEADNPFSWKNFVDTVRDTTAAHQALLVAKNIDLFPQNQERFSDGNIDVWWIVHDGGMLMLLPFLLRQHKVWRKCRMRIFTVAQVDDNSIQMKKDLQMFLYHLRISAEVEVVEMVENDISAFTYEKTLMMEQRSQMLKQMQLSKNEREREAQLIHDRNTASHTTATARTQAPPTPDKVQMTWTKEKLIAEKHRNKDTGPSGFKDLFSLKPDQSNVRRMHTAVKLNGVVLNKSQDAQLVLLNMPGPPKSRQGDENYMEFLEVLTEQRVLLVRGGGREVITIYS

SEQ ID NO: 1193 - DNA, 63810 bp, Homo sapiens
  misc_feature (1)...(63810): n = A,T,C or G
atgcccgtgtgcttggttggcatgcctggtttgtgtgtctgccatggcctggagctgtcctcatggtggggtagccccgctggccctcccagcgttcctgtccatttaagtcccgtgcacaggggatgtccaccttgcagacgtgcagccgggaggaggttgttaaagtgatccttgaacatttgctctgtgcctcagtttcccttggcaggagccagcctgtcacgagggtggcggtggctgtgacctctcatctccttggctctgtctgcagacctctggcgccagcgggtcgggcctgggctttcagggaggctcagagacgccctgggcagtcactggggagggattgagtggagtggaaatcggaggagggaagtgcgccaggccaggcccctcctgggtcccctccatgccgccaagggtccccgaccgcagcccagaggcagcctgtaacaggagccgccctgggagggcctggcaggtgcgctgggggccctgcctctcccgccttccttcatctctgctcctgcaggctgcctgggccccgagtctctggaactaggggaccccacggcccctccatggctcagacgtcactctggctgctgagggaggaggctggaccaggaccagcaaacagccacgtgacagagggttcgggaagtgagttcacccgaggccaccttcccgcgagcaggcgtgtcctttagatggaagggctgtagtcccagtgcatgcctgtgtcctgggcaccccgccccgtgggtcgtgcagtctgggggctgtagcccctgggactttgtgcagatgtgtgtgctgcaggtatgtgtgtgtgtacacgtgtatgtgcgggtgttggtgtgtgtatgtgactgcgggtatgggtatgcacatgtgaggacaggtgcgtgtgcaggtttgcgaggtgagtgttgtgtgtatgaatgaggggggaagcgtgtgagtatgggtatggagagtgtcttccgtgtgagcaagtttgcgtgtgcacgtggaagtgcctgtctgtgcatgtgtacacatgcatgtctctgtgcatgtgagtgtatattttctgtggcgtgtgttcatgtgtgtctggccatagcttgccaggaccttccagccaggcttccttgcttccagtgcctctgacggtgagctgggatctcccggcgctctcctggtttacaggatactggcggtggtgtctgcacagactgttgggatgaggtcacttcgggaatgggtgatgaagggcctgtttttccctcagaaggcagcgctgctttagccagaaacttgtgctggaagcctgagagcttgcctgaagccccccgtgtcccagcctgaacactgggccgttctcatcctgtgccccttgagagcctcagtttctagattttaggggcccacacagcacaaactgtgaggggcagagggagggcaagggccaggggtcgtcagctggcgttcggatcctggaacctaaacacactttatttcagtgcccggcaccttcacagggagcccagcctccaggcagtggggttgggagtgttcctgggtcctcgcgccttcacagggaactcagcctccaggcagtggggttgggcggggggtgctcctgggtccattcagtctcgggctgtccccagaggccacgtgagctgatgccactgggtcaccaggtgggactcattctgctgtgagtcccctgtggctccaggggagggtggcctgctggacccaggggacacacagagccaggcctgagaacctcctcgagtgcagggagccgggaagcctggacttgcttgtcccctgccccaggcccggcgcctctctgtgtgcacaggtccggtgccacccgccactgctctgcagggctgggtagctggacggaccacccacgctggagggcaggaaggggcggaggctgtcggacctggcttcagcttcacagcccctcctgcctgtcagctgcttccggctgaggctgagtctaagaggacgttcctagagccctttgcggagaatggctgtaaaatcccaaaacgcgggaggaagagggggagggatgagccactgagaaagggaggaggttgtgcctggagatagggaggctgatggaggcattgtgatctcagaggggattagggccgattagggaggtgagccagcttctccctgcagaaactacccatgaacgcacttcccaggcctggatcgggatgggtcagggatctgacacacacactctcactgcctctctggctggaggggctgcccctcctctggccgggacactcgtgtgtctggtctttgcccttccacctgcagccgcctccttccctctcggggtggggacacagcctggttggacaagcccaggaggctgttccccaagggcccagcccatcaggatctgcttactgaccacagggtctgcattcactttgttgataaggtgtctggaaaactaacctagagtgaaaaacagaccggaggttgcctctgtggctggggggcttggcagggagggagctggggaagtggtgggaggctcttggtaggtccggtgagcaggggcaggcctttgttaatgctcagcagatagacgttctcttgcccaggcggctgcagccagagaaaactcagcaaagcggctccggagggccacaaggctgcttagtgtcggggggtggaggggggtcggggcagtggtggccactgtgtgccatgacatgcatcagaccagggctgtgtggggcggatctgtgcgtggacagctagcacccatagggctgcacagggtgtctgcccacttgcttacctggggtcgtttttataataaaatgaagaggtagaaaaaataagacgagaaaaaactgacttgtggccagttcttcaggccagggcttgacctcgccgccttcatggctgaggaggagggcagcattggtcagcctggtgttgctggttctccaccagcggctgtcggcctttgctggctattgggagggctcctccaaggtctcagggacccaccagaggctgtggttctggggcctggacccaggtcgggcctgctggccagacgctgtcagtcccgggcacgtctgcttggggcaggttctgttgagaccctggcccctggggataggtcagcctggtgcatggggttcatgaaggcaccagacaagctgtgagcagagctgctgctggaactgctttaaacctggagggacgggcaccggtgacagtgaccaaggccctgtcccagtgcaggtgggcagggcagtccacccagtgccagctgcttagggccgctcggggcaggtgagcgaggaggggcctctggggagagggcgctgaaacaggctgttcccaggtacgaggcgggccgaggccggggctgttcccagagctgggaagatgttgggatggacggagcaggagggcagcgcacacagctgtgggggagctggccatgggtgcggggctcagctcgtcgagggctcctggtgggtggtcaccatgcagagccacatccctgcaggctcatgtttcactgcctcttcccgggtgtgcttttctgtcccaggacacatccgggatccaacgtgacagacaccaagttcccacgctgcctcgggctcctcttggctgtgacggtttctcggactttctttttttgacgactgtggcagttttggggagtcctggtcctttttagagaatgcccctcagttgggaggtgtctggtgttttctctcgtggttagcctgcagctgagtgtttcggggaggaagaccccagaggacaggcgccctccctgcatgcggcgtctgggcacacgcgtcaacagcacttggcgcggtctccccgagggcgccgtcttcctcctctgttacccacgagcgcagctcaccttcctttcccgccccagccaggcttctggagcctcgtttggttttggttcccactgtcggatccgcagatgggcttgcctttggggcctgctgtgctgtggagtaacccagggcacctgggggctgctgcgagaccatcgagcctttgaaaggctgtggaaagatagatgacaggcggctgcgggtggcccaggggccaggcggcctttacatgggcttctttcccagtgactctggccgggtcctgtggatttttaattccgacggcgtgtctgcagaatggagcaccgtacaagcctcatcaggcggcgcggagggtaccagcccctgccgtcccggtgccgcccgagggtgagggacattcgtggatgattcacgggcttcgtgagctatttgcagacacccgcctgagtctcctttaaggggaaattcctgagcggctgcctcgctcttctcttccgaggcgtgtgggagcccagcccggccgggtaggaggagagggttgaaatgccatgccttcttcttctcgccctggatgctactggctgaagtagcctccttttaaagccttatgagtcgcttttttcagtgataacagtaacggtcatgcgccctcaggttgcgaagtggggcgggccaggcctgggggaccccggaattcccctgcgcactcctgccccgtacacccgccggaggggaccgtggtggttgtgaaggggccgttcctatcgctggttttaaggtgtcccgagttttgctgcacttggttttggggagaccatgagcttggcgcaaactgagattcccgagtcagcctttctaagctgtggtgggcaggccacggctgtgatgtacaatgtgaaaggagccggcctttacagggcttctgtgaggtgagttcagcatttcagcccttaaatgtggagataagtcagaaacgggttcgtcttcgggaggagggaggggaggcgagttttgtggaggtcggtaccatggctcattctgtgtcctggccggaactgggatcaatcctctgacccgctgaggatgcctgccttcccccagaggaggtggactgggtcgggccctgccgtcccccggaggaggtggactgggtcggggctgggttgatgtccgtgccccagaggaggtggaccgggtcgggccctgctgtcccccggaggaggtggactgggtcggggctgggttgatgtctgtgccccagaggaggtggaccgggttgggttctgccgtccaccggaggaggtggaccgggtccgggttaggttgatgtctgtaccctgctcctgcctcagggcacgtggtatctgggtgctgctctttggcccatggggtggggtttggctggggagacctgatctgggttgttgggccatccctcgcccccgcttcaccctgcttggcagaggccactggtgcatggcgcctgggcaggggcaccaccgggacctgccctgagggttagacactgtgggccacctggcaaggaccctgcccatctcaccttcctgcaccgcacgcccaggctttcccctgtgtccgtttgtcctctcagccttccggtcatcatgaatgtgcagaatgacaagggaggaggtgctatcccaggcgagtggctctatccccaaaacacaggcagggctcggccagaggaaaactcactgcccttcacagcagccaggactgccgatgtccaagtccaggccagggagcgcaagggacgcggctgggtgtgcagagggttagaggggggctgggtgagcagagggttagaggggggctgggtgtgcagagggttagaggggggctgggcgtgcagagggttagaggggggctgggtgagcagagggttagaggggggctgggcgtgcagagggttagaggggggctgggcgtgcagagggttagaggggggctgggcatgcagagggttagaggggggctgggtgagcagagggttagaggggggctgggtgtgcagagggttagaggggggctgggcgtgcagagggttagaggggggcctgggtgtgcagagggttagaggggggctgggtgtgcagagggttaaagggggcctgggcatgcagagggttagaagggggctgggtgagcagagggttagaggggggctgggtgtgcagagggttagaagggggcttggtgagcagagggttagaggggggctgggtgtgcagagggttagaggggggcctgggtgtgcagagggttagaggggggctgggtgtgcagagggttagaggggggctgggcgtgcagagggttagaggggggctgggcttgcagagggttgtgggggctgggcttgcagagggttagaggggggctgggtgtgcagagggttggagggggcggctgggtgtgcagaaggttagagagggcattggatttttaacgaagggtctcttgactgggatggcattgagcccatgacgtccccgggacgcactcttggttcaggtctgacctggctgttttaaccagatagaaacgtttgtgggcactcccaagtgggcacttccatcctgctgagagcacgcttgctgtggcctccgtagagaccaagcgacactcttctcaagaaagtgaggggagatgcgttctctttaaaggcttgaaggttgtaatcatgctctgaggctgcttttggtgacaacatgctggtggctgaacacacgctcacatgttcagtgcagtccccacctgggaggaccagccacaccctgcttttctgtattccgtcccccttttctgtgcgtcctcgcgttctggactcatcgtctgtgttactttaataagcagcagaaggacagagtcgtgcctcgctggccccacacgcagggctttgtcgtgaggccgctggcgcacagccctgcacagtcagacgcagggatctcgggtgtgaccctgtggtggttacatcgttatgttttctaagtttaatgaatttctcgatattaatccaacttgagcaagttgtttctagtgcttttttccaactgcataggttgcctgtggggagcttgtgtgtgtgtttttcggggtgttcttggggcctgataggcgttgccatcttcccaagtgggctgcgcagaggagacgctgcggtgagcaggggttgcttctgctgggagtgttggaggcgacgggaaggatgttggtccccttggtttgagcgaatgtgcttgctgtgtacacgtttttcctacttgtacagttcgtaggagttcagataaacagtggttgcttgctgaacgcagacatagttacatgctaagacctcaaccaccagtaaacctgtgctttccagaagggatgtaggccgggcagcggagccccaagctgcactcctggtggagaagggcaggcagggctgagcctccggagccacgcacccttcctgcggggaagagaaacttgagcccaagcagctgtgactttgtccaaggttgtctgtggggttggctgcgtggggagggagaacccgaaaccctcgggtctnnnnnnnnnnnnnnnnnnnntcccccctccctcctttccttcctccctccttccttccctcccttcccccctccctcctttcttccttccctccctccctctaagaatagctgcaccaggctcctggtccttcatcttccattgactccagaaagtgtcgccagtcaccactgatctctctgtaaacagttggccgttatgtccagaaaaagggcctgagcaggaatccactgaaaccattgaagaggagtggggaagggccctggatgggactcatcttggaaagacacctataattgatgggaaagacatttagacatattttcttagttgaaagtatgtgtaatttttcttttaacctgatttccatgtaattttagatttcagaaaggttgcaagaccagtgtggagaacgcccatctgcccttggcctccgttgcccaaatgccaacctcctgccatgttggctgtgtccctcctgcctcctgccctgccccaggtctccgtctttcactcccacgtttgtttctgaactgttgggagtaagcagctgacgtggtgcctctcacaggcgtatttcctaaaagcaagcacgtttctttcagaatctctgcagtgcagtcaccagaatcagggagttaatgatcacacacgagagatctttttcagatctcaccaactggcccaatcacggtctctagaaaaagaagtctgaggttgtgcgtgcatttgaccgtctctgtcacctggagcttcctctgagttgtctccctgacgtttttgaggggtggggccgctgctccgtggcactggcctctctgtggtgtgccccatggtctaggcatctgcagtcactcatggtcacaccaaggacctgcacaccctgaaggctgtgctttccgccccaggcaccctactgggagcacgtgctgcccgcctgcccccagacggcgatgccctctttgctggcacggctggaacccaccactcctgcggctggtgcctgtcagccagccagggtggccgccagtgggctctggcacatctgaaatgtcccatagagaatgcccaccctcccagctggggttgtttggtgcagtgatgaggtcttggcctgccctcctccggccacctcgcatcctgccttgaccgtttcttctgcaccctcagggtcccacaccattctgtgcagggctagggtggactgggcaaggatgggccgagcacccctaggaagggtcccggcttggtcgttcccagtctggggagctggtgtgcagcacatggggcagagggccctgagggccctggggtgcgtgggtggctatggtttgatgcccttcagctcctcaccgtgcctggctggggcatgtgcatttgcagaccctgttctgaccatgggctgctcaggggtcccgggcaggctgtggtctctgcagtggcctgtgccgagttccttgtgttgctgtgacagtcccccaggtcaggtgattcatgaacacagaaacttctcagagttcttgaggctgaaagtcttagaccaaggcctgggcaggtttggggtctggcgagggccctaggttccctgccgtgtcctcccatggagggtgggagggcgacagctctgctgctgaggcctgggggtagggactttcatccccttccacacctcaccacctcctaccggccccccgcctcctaccggccccgcctcctaccgcccccgcctcctaccgcccccccgcctcctaccggccccccgcctcctaccgaccctatcttctaacaccgtcacatgggccatcgggcctcaacccgccagggagcctcaagtcctcctccccaccaattcccttgctcatgctctcgggcagctgctaggattaccccctggttcgaagcctgggctcagccccatggaggggtcgccggcccagccttcctgaaagactcaggaggggctcatttacctagagagcctgtgggcggcgtcctcaacagggaacagtgggaagtcctctgtgtccctccgaaatggcggattaagcagcaaggctaggaggtgccaccccgacttttaagagtgagaattttgcccacatttggctgaatgagagattttcaacgccagagggaggtacccttgccctgggctgaacagctcacttgccgaggctttcaggggctttgtcttcaatgatgatgtgtgtgggggatagcgtgtgccctggagctagcgtgtgttctggggatagcttgtgtcctagggatagcttgtgttctggggatagcttgcgcattggggctagcatgtgtcctgggactagcgtgcaccctgggaaatgcccctttctttggaacacagatgtgtggaaggaaggagagtgtgtgagaagtatcacccttagccatggtttagaggtgacagctggtggggaccagagccctccgtgcaagatctgtagttggccttctgtgcttgcttttagttccttctaagctgtctctgaattgtttttccctcactaggagatggaaatccaagagaaaacagcccattcctcaacaatgtcgaggtggaacaagagagcttctttgaagggaagaacatggcacttttcgaggtaactttactttttagaagaagaaggtgccagggccgttgctttgatgtggaaaagtaaaggagcccctgggggcccccaggccggggcctcccacaggactggacaccacgtggaaggaactggggcctccctgtcctgaaggctgtggcgggggcccagtcccgcacttgagctgggacgtgctcctcggctggtgccttctgggctccttcctggatctagggtgctccggccccacgggaacccctctgagctgctgagtgctggacaccctggggtccctgccatgggtgggtggccccactcagtgaggcctggagccctggcctcggactcagacctgccacacaggtgtccaggcctctctggcttgcttcagacccaggggctgaggacccggggagggcctgagctccacaccctgaacacggggagggaggtcggggggcccacggcgaggtgcgggccgcctgtgaccatgtccacgccgcgcaggaggagatggacagtaaccccatggtgtcctcgctgctcaacaagctggccaactacaccaacctgagccagggcgtggtggagcacgaggaggacgaggagagccggcggcgggaggccaaggtactgccaccctgcccgtgcccgcccagtccccgccccgtgtgtcccggcagggttagatcacgccggcaaggcagttgcttgtcagaagagctgccctgagctctggtatcatggccacgtccagccctttcttcctgggagggctcgatggtgcctgccctgcagctcctgtccaggtctcttccctctccaccgtccggggaagcgtgacacccccatgcatctgggtggccgggttccctgtcgagaaatgaacttggggtgttttgttcgttctgcgggagcggccccatcccctgctgtggagaggagtctgaatggtgccgagaggccgggacgtggccccttccagagggtgctgtggcctcggtgctcccaggggccaccctccttttcatttcctgtccaggacacttagcctggtagcattttccctgcagttttattccctgaggatttgtttccaggaatccgtcctaggaaacgaggggggtgcagtggggaaaggtttcccttgagtggtttctgtgggtgacgaggtgtggaaaccccttgagcatcctcgggagggttctgccgtcctgtacagacgggttgcctgagagccaccctgaggcctgaggccctgaggtgacgctcacaggcgagaaagaccctggacccgtgttgggggagatcttaggtcctcgctgtgggggtgcggcgggtggctcagtttcttctcaactccctctgctttttaaatcttctttcaaatatgtctgtgttgctctagaataagatacaaaaaacaaaaaaaaataatccaccggaagaaaccaagcagcgcaggccctgctctgaagccgggcgacggcctcccccagtcttgacacaaaattgtcatttcccgagtcagccccgagcctgtgcccccctccttcggcagacagctaagggcatacgttggctttttagggtgatttttaaattcccctattattttccttaactttctaactctaaaaataccatcaggagatccctatcttctcagaagggagggttttgtagtgccaggtagaggccagtgagcaggaaggaaggaggtgctgagccaggcgcccccaggtccagggagggtgggcccccctgctgcgtgtgacctccaccaagtggggcgtccgtcggccggctccttgccctcccctgcatcctcccagcctgggctctgcgctttgcgtcgacgccacccctgagtgcctcctgccagcgtccagtgttctgctgacctgggtcccacacagcagtcgggaagtcaggccgctcaagatgtctctttccttccttttactgtaaacacagcggaattaatactgcatttccaaaatacttgaagacatttggttttgtttttgagaagcctcaatctggggttgaagtaaccggagacgagggacgtgaccgtgagaccaccttggggtggggcctggcctgatgagggccctcagccctggctgttgtcccaggacagggtagtggcctcttcagaagctgcatctctggacctctttctggttcccctgctgggtccttcccggctcggggagcttgtggccgccccccctgtctgtagctcggccagcccttggggtgggaccatcactgctgcacgtggacgctgcggaattgggtgttgccaggctcagcactcagcacctttctgcacgtggatggtgtggaactgggcattgccgggctcagcactcagcacctttctgcacgtggacgctgcggaactgggtattgccgtgccgcacgtggacgccgcggaattgggtggtggtgtgccgggctcagcactcagtacctttccgcacgtggacgctgtggaactgggtattgccgggctcagcactcagcacctttctggggtttcacgcatgctgggcactaccttgaggcctcatgggctcaggctggtactctggcaccaaaactcaggagccacaggccttccctgtctgtccgcctgtgtgctggagtttgtgtcctagggagatgttggctttctccagggagcaggtgtcttcccacgggcctggtccgagtgctccgggaacaggctttagctccagctcggctgggctcaggcaccactggcctggacatccagctccaacccctctgcctgatggagcccagcctgccatgaggtgcccatagagagcacaccccagcttctctcaccctacttggtactgagacatgactgaaacgtccaggcaggtgcgtttgttcatggcacactgtgggccagggcccaggaggttcccacctggaaggctctccctggccctccctggcaaccctacccccaggctggtggctctcaggcctctgtccctcagggacaatatgcaggtaccccaggctgatgctgcctgcgtttcagtcgtggagggaccagggcccgtgaccccagcaggcctgttgtttgacggtggcgggtttcagttggcagtgactccttcggctcccttaggggaccgtggctcggcccctggggtggaagggcaggggccgcccctggtcctctttgccaggctcagaggctcatccccagcagacctgctcccattgaggagccttttcaagggcccaggcatctccagcctcccgcgcctgaaattgggtcaggttgagccttaaaagttgcctttaggcgcgaaccaagaggccaaggccggccatgcccttccgtgaggagtcaggatcccccgcctttggccgagaaccagcttctgactcgcctgtcacggggctgcgggatttgaggctgagcctggagggcaggggcccctgtgtggaccgcgtctctgcctggagctctgcctgtcggctcctgcattagctgaagcctcgctgggaagtcacagcaacaattgtccctggagccttgctgtcacctctgccctgggctctcagttttatccaatgagaatgtcccaaagccggttctccaccatccgccaccgcttctctcgtttgcaccaagaacaaagcatacccagatttggagggcccagcagcggcccccagccccgtcaccctctcctctccagggcccctgtcagaagcaagtcgctcccctgttgcttcccacctagggctcagggaaccaagtgaatcccccaggctctcagatccagggcttcccacgctccgagctgctcttacattatttttcccagggtcctaaagttggtggagccctagagccctgccctggccccagcctcggccagtctgtgggaggcgttccggcacggtgaccccagaagccaccctgtttgcttttgtgatgtggtgttcagcgtgctctccctgggagctgcccctcacctggtcccctgttcccatcctccccaggcctgggctgtgtgaaccccaggatcgaagccccgcacggggcctgttctgatccacattgtggccactgttcacaggaagtgtcttcaaataaaaccttcccccttttccgtattgaccttgagacgttttcctgttaaaacgtcaccttgtgctggcaccagccgtcctccaggtctgagccacgtgcctctgctcatggcgggagtggggctgagcaggcagtggggatggagctgaaacttctaccccagcctggcccgtcccgagtggagctggggagctgcctggcaggcgctggcctgctcctggctgtgctgctgacccttgcccatgtgggttttctcagggcacagggtgtgtccccctctctggcacaggtgtctgaagcaggctgcctgctccgtgctggggcaggcggggtggcccccacgtggatatctgaacctttgctgttatctcgtggtgacctccgtgcccggttaagatgtgtcagtttctgcccagggccgacgctgagctgtggattttttttttttttttttttagctttatgggcagcagccgtctcatccctccgctggctctgcttccattcctgaagtctcaggctctcccagggtgtcagatctcaggccctgagccatccagggaacggagccgggggccctctcgttctccctcttgttttttccataacttttccagtgtaacaggtttccctccgtcggggaggcacagcggagcagctgcatcttggttctctgccaaccatgtggttctgctcccctcccctaagccctcattccgggatggtcaggggtcctgtcctgggcctctctctgaacctccatctgttctgggaaggactcctgccccctcctgcccccacggccgctttgcctgcccagggcctgagtgcagcctggggagggggctccctctgggtgtggggtacgagcccctgggacacgctatgctctgtcgcaggctccgcgcatgggcaccttcatcggcgtctacctgccgtgcctgcagaacatcctgggcgtcatcctcttcctgcgcctgacgtggatcgtgggggtggctggtgtcctggagtccttcctcatcgtggccatgtgctgcacatgtgtgagtctcccccggccaggtgtggctgtgccttcgggcggtggcagctggacagtagggctctccccagatgccgtctcccctggccgctgtggttgtgccttcgggcggtggcagccggacagtagggccctccccagacgcccgtgtagacgtcgttcagcgccgtctcctccacgagagccgggcagctgcggggatgagatgccacactgtccggggtttgtgctggcgtgttgactggcgtgctggcacctcatttacccgtgtctgcggacaggcatctcagccagtggtgggtgtcatggggcggcacccgggggctgaggcttccaagggaagggacaccctgtgttttgatgacatcacctccagtttggaaggaccttgggcactttcaggggtcgctgtcataggggaaggggtgggaaccaggacacgcatgcctggtgcccgggagcctccaggtcctgtttcctagccactccattgagatggagagccctggagttgggggctggcattcggcgggagccgggtcatagaccctgacttgggagtgttgcgatgccggcaggctgttggaaaactctcctcagatggctgcctgtctttttgcagacaatgctgaccgccatttccatgagtgcgatcgctaccaacggtgtggtcccaggtaaggggtgcccgccagccgcggccctgagtcctgttagaggagtctgtgttttgccgcacggcaaccgcgaggaggccgcttggcgaggccgggccgggggctgcctgggggtctcagccgggccttctgcgtgttctccactggctcctctggcgtttgagccgtgaggtcacggctgtttggttttcttccccattttgctgcgtggtgaccgtctcttgccagggtaggcagtgcccaccaggcagcgggctggggagggggaggcacgggcgattccagtggctcctgtagcccagcgtgtgccataggctgagttcttggaacctgtatctcacgagggaaggtgaagacaaaacactgccctgaccttgttaattagtaataagttaattacaatacataataactaaataactagtgaaccgagatgatattaattagtaataagttaattacaatacgtaataactagtaaactgagatgatactgttaattagtaataaacgaattacgatacgaaataactagtgaacggagacgctgccacgtctgcttctgagtgcatgtgtgctgcgcgtgttaacggctgggcttgctcagcaccaggtcctcacgcagctggtccccatccccacgggggcatcgcttggtgctcagcggacttccccggcctcaggagagcacgagggccttcaccaggggtctccctccgcagccaagggaccagtctctgcttcacgatggccgcgtccattaggaccccttccacatgccacacgcactgctcagagcagggagagctgcgttctccaggcagccctggggttgcgcccggctttcccgccagtgatagcgtgcgtggttcacagtacacgagacgactcctgaacatcctagtttctcttttgcctttttcataagcaaaacttagtggaagtgggggctggggctgccactgatgtacgcgggactttttctgggacctgctggggcctcctgctccccagagagccttatccctgacctcacctggtcctcatgtccatgagagcgcgtgctctcggtgtggaacgtgtgccgagcctcgggaggggagagttcaccgtggaagcgtctccatgtgctgctttgcgggtggacgagggtctacacgctgccttcgcagagacaggccctcctttgcccgtgaatggcagcgcagaccgcacctcgggtccgagtccaagtgcgcccctgacccgcggctgccgcctttgtctccgcagctggcgggtcctactacatgatatcgcgctcgctgggacccgagtttggaggcgctgtcggcctctgcttctacctgggcacgacgtttgcaggggccatgtatattttggggaccatcgagatttttctggtaagtgtgctgctttggaagggttcccaccccacagtctgtggcaggatgccaaggggccctgcctgacccactctgtggcacacacagcacactgagccatcctgaccccactgccctggctgcccctgggctctcctgggctctggccatggcggaagccactgggcagcgtccactcagcagcgacctgtgtcccccttgagcaccattgctgccctccgtgaggcgtgcctggcatgagctgggtagacatctggactgtagatctgagccccgcgtaggtgcagtcctgcagtcggagctgttttaggagcagggctggaactcggcttagaagaaccttttgccaggatcccagcctcttctctgcctgatctgggcacttggccgagggtcccagagcccagcaatgtacaaccaggtgatgtcatcaccttctcaaaacaggcatgctcaaagcatgtcccacatcacctgagcacagctgagagctgtggcctgagttccttggtcctcgtggggacgggaaccgcccttctctggccgacgggtgctgtccttcctgctgaggttctgaaacccgctgtccctgcagggcttcagagacgctcacctgagcccctgtccccagtctttctgcccctccctctgctgccagacctggttcctggcctcctgggttcctgaagagagccacatggccaagaaggttctgaaacctttcagtggggtcgcacccacacccgtcccaacccgagtcccctggccatgtccctccatctttccacctgccccaggtgccgtggctgccgcactcccaggatcccctttggtgggggtgggtgccatgccctccatgcctgctgcaccccagtcctgtcctggtcttgagggagctgagcagcactgtctcacgtctccgtcccttcccttgaatctgggcagaacagaggttgccccccgccggcgtggtcagaccctgtgtgtgtccaggacgtccagccggggtgggccgagctctctgggcagcagtcacattcctcttagcagaaggtgtttcttttgagtgcggacatgcggatgccccgggtcctgaagttgctttactctaaggctcccgggtggttcctgggaaacgttcaggcccctggctgtccatggcctgtgcgctgacccccgcgggctccgtccctcgcctgtgcgctgacccccgcgggctccgtccctcgcctgtgcgctgacccccgcgggctccgtcccttgcctgtgcgctgacccccgcgggctccgtccagcacggatgcgtcccgatggccccggcacctgttgggaggaggcccctgtgtggcgctgggggcttgcgggagggacgggcactggggagttgtgtccggggacggcctcccgacctgccttgttcccacagacgtacatctccccgggtgcggccatcttccaggcggaggctgcaggtggcgaggcggccgccatgctgcacaacatgcgtgtgtacggcacgtgcacgctcgtgctcatggccctggtggtcttcgtgggcgtcaagtatgtcaacaagctggcgctggtcttcctggcctgcgtcgtgctgtccatcctggccatctatgccggcgtcatcaagtctgccttcgaccccccggacatcccgtgagtctcggggcctctgagccgtgggtgggtgtggggctggggccaggtcccatgggctctgcccgcctctcgtccatcatccttgacgccgagctccccgcaaggggtgggctgggtgtgaccgtggcgggaacccccgtgggctcgttctggggattacgggaaacccaacggtgaggtgggccgaggtaccctcgtggccgggtctgagcatgaagaccctcctcagtggcaggagggctggtgaggggtctggcaggtttcaggggtggccggtggccctgagcacggtcaggtgcagtgagcgtcgtgggtgtggccctggctgctgctggggcctgggtgtcttctccctcccagaggtgcttggaggggctcttttcttgtccttttggaggagcagctgggaggcggcccagggtcctggaacatgggagtggccaccagagcccgcagggagcaggtccagaaagggccagcagccaagccccttgaggctcccgcggttttgccgtctctgcgtggagggagcccctgaaggaacagcctcatagaggcctcaaaacagagggaggcagaacagctgcaaccccacaagcccgttttagggaagcacagctgccctccccctcggggacccgtcctgagaccccctgccgatgcctgacgctacggccctgtgtagactgttttccacgtacaggcctggcttatacgtcgggggcggcactcctgtgctcttggccgttggcacgtggcacgagggtggcttgaactcagacactgagattgtgacagctgacccggccaggacgccgccgagggcctcggggagggagcggctgcagcgtggctgtgctggcgcggggggaggttgctgggttccacctcactactcggcaccgcgcggtggaaaacgtgtgaattgtttacgtctagaacgcttcatttagcacgtttggaccatgggtggccgaaccatggatgaggggacggctgtacagtacagcgttcctgctgcagcctggcctggtccccggtccctggtccccagtccccggtccccagtgtgatccctggcccttgcgttcctgctgcagcctggcctgggcccggtccctggcgtgatctgtggccttcctgtcttgggaggtgcagggtgccaggagccactcgcgggcgacaccatgggtgcccgttgggggagctgggtggggcagtaaaagccacttcggtggcagcacacgtgccgtgcctccctgtcccgcccagggtctgcctcctggggaaccgcacgctgtcacggcgcagcttcgatgcctgcgtcaaggcctacggcatccacaacaactcagccacctccgcgctctggggcctcttctgcaacggctcccagcccagcgccgcctgtgacgagtacttcatccagaacaacgtcaccgaaatccagggcatcccgggcgcggccagtggtgtcttcctgggtgaggctcacagggctgcagctggagctggggggtggcgggggcagcaggcgctggccctggtggctgctctcgccttagagtcactctcagggccccaattcctcctgcctggccgagccccttcccagctgctgctgatgagcctgggggtccctgtacacacccctggcagagccatagaagccaaacacggtgtggcagggagacagcctccgtcatggtcagcaagctggtcttaatgctatggatttattttcatgacctcctggcagcatgtatggggaacttgctgtgttaagaagggagtggtagctgggcggtagcttccccctctgtgtatccttctctgatgagaggctgcctcggacctgccccagggggttgagggaaaaggacccctggcagggtacacgagacctgctccagaacccgagacgggaagcccggactttccagaacccgagacgggaagcccaggctttccagaacccaagacaggaagcccaggctttccagagccctagagaggaagcccaggctttccagaaccctagagaggaagcccggactttccagaacccgagatggggaagcccggactttccagaaccctagagaggaagcccaggctttccagaacccaagacgggaagcctggactttccagaacctgagacgggaagcccaggctttccagaacctgagatgggaagcctggactttccagaaccctagagaggaagcccaggctttccagaacccgagacgggaagcccaggctttccagaacccgagacgggaagcccaggctttccagaacccgagacgggaagcctggactttccagaacccgagacgggaagcccaggctttccagaacccaagacgggaagcctggactttccagaacctgagacgggaagcccaggctttccagaacccaagacgggaagcctggactttccagaacctgagatgggaagcccaggctttccagaacccgagatgggaagcccggactttccagaaccctagagaggaagcccaggctttccagaacccgagacggggaagcccggactttccagaaccctagagaggaagcccaggctttccagaaccctagagaggaagcccggactttccagaacccgagacaggaagcccggactttccagaacctgagacgggaagcccggacttccccagaacccgagacggggaagcccggactttccagaaccctagagaggaagcccaggctttccagaacccgagacgggaagcctggactttccagaacccgagacgggaagcccaggctttccaggagtatgttgttccccacatgaggcttctctttagtgctgaccttccctccgtagaggcagacaggcagctttcccagaggtaccatctcgaaagcgtgtttgaattggagcctgcttgcggcgcacaagctgtgacccttcccctccggccaccagtggcacctgccggggagtgggcggccccatggcgggggcactgcacagaaggtgccagaaacccatgggatcttccttgcccggcagagaacctgtggagtacgtacgcgcacgcgggggcgtttgtggagaagaaaggtgtgccctcggtgcccgtggcagaggagagccgtgccagcgcactgccctacgtgctcaccgacatcgcggcctccttcaccctgctggttggcatctacttcccctccgtgaccggtgagcccgctgctccaggcttccccttctctttctttctctccctctcttttttgaggcaaggtcttgctctgtcacccaggctggagggcagtggtgtgatcacggctcactgcagcctcaactcctagacacaaatattcctcccacctgagtctcccaagcagctgggaccccaggcacccagtaccacgcccggctaatatctgtattttttgtagaggggggcagccgggaccccaggcacacggtaccacgcccggttaatgtctgtattttttgtagacgggggtctccccacgttgctcaggctggtctcaaactcctgagctcaagccatcctcagcctcccaaagtgctgggattacagacgtcttgagccaccacgcctggcttccttctttctcttcctttgtctttgtccatttctctgtctctgtcattctctcctccggcactctctctctccccctacccttttccctctctctctgtctccctcttcttccctccctccctctctctctctctgtcgtctctctctctgtagtgtgttccttcctgcccctgcttatcttgcctgtttggctcaggggaagtggctgaggtctctgccctgcgtcctgatggatttgtgagaagcctgtctgctgctctcccaggcagccctgtgtcaggagaagctgttgtagggttgctgggaacacctggcaggctgttaggagacacctaggagtggcctcagtgtgagctcagaggccggggacctcggccctctgtgtcctcctcaaacagtgggccttgttccggcggtgggtggggcccttggttgttccccagggggtggggccaggccccgtgctcttcgagtcgcacacacacgcccccggctgtctccactcggccttcttgtcgggacgcccctgacaggcgctggctgcttgtgcagcctgcagctgccnnnnnnnnnnnnnnnnnnnnnnnnnnnnnnnnnnnnnnnnnnnnnnnnnnnnnnnnnnnnnnnnnnnnnnnnnnnnnnnnnnnnnnnnnnnnnnnnnnnnnnnnnnnnnnnnnnnnnnnnnnnnnnnnnnnnnnnnnnnnnnnnnnnnnnnnnnnnnnnnnnnnnnnnnnnnnnnnnnnnnnnnnnnnnnnnnnnnnnnnnnnnnnnnnnnnnnnnnnnnnnnnnnnnnnnnnnnnnnnnnnnnnnnnnnnnnnnnnnnnnnnnnnnnnnnnnnnnnnnnnnnnnnnnnnnnnnnnnnnnnnnnnnnnnnnnnnnnnnnnnnnnnnnnnnnnnnnnnnnnnnnnnnnnnnnnnnnnnnnnnnnnnnnnnnnnnnnnnnnnnnnnnnnnnnnnnnnnnnnnnnnnnnnnnnnnnnnnnnnnnnnnnnnnnnnnnnnnnnnnnnnnnnnnnnnnnnnnnnnnnnnnnnnnnnnnnnnnnnnnnnnnnnnnnnnnnnnnnnnnnnnnnnnnnnnnnnnnnnnnnnnnnnnnnnnnnnnnnnnnnnnnnnnnnnnnnnnnnnnnnnnnnnnnnnnnnnnnnnnnnnnnnnnnnnnnnnnnnnnnnnnnnnnnnnnnnnnnnnnnnnnnnnnnnnnnnnnnnnnnnnnnnnnnnnnnnnnnnnnnnnnnnnnnnnnnnnnnnnnnnnnnnnnnnnnnnnnnnnnnnnnnnnnnnnnnnnnnnnnnnnnnnnnnnnnnnnnnnnnnnnnnnnnnnnnnnnnnnnnnnnnnnnnnnnnnnnnnnnnnnnnnnnnnnnnnnnnnnnnnnnnnnnnnnnnnnnnnnnnnnnnnnnnnnnnnnnnnnnnnnnnnnnnnnnnnnnnnnnnnnnnnnnnnnnnnnnnnnnnnnnnnnnnnnnnnnnnnnnnnnnnnnnnnnnnnnnnnnnnnnnnctgtcctccgctccagcctcccccgtccgtctgcgtgcactccgcgccgcgggtggagggcgtgggggcagagcctctgcgtggctccgggtgtctctgagccgcgggtggagggcgtgggggcagagcctctgcgtggctccgggtgtctccgcggcactggattgtgggctctgctgcctcccaggccaccccgagcaatgggtgcttcaggctgcgccttggatgggaccgagccaggcgtcaagtggcccccaccgacccggcttcccagagctttgtaggagccgattgtgtggaaacatccccggccgtggctccctagagcaaggtggtgccacagcgggaggggtcgcagcgtctgctggcctggctggctgggctgagtcgttctaggatctcattcccaaagtccttaggtcctgggggcctgtgagccattgctcagcaccgtctctgggctgacccttggccatgggattaacacaggctccagagaagccctgggtgtggggggcgtgggggtcagtgacggggtcggttctcgtcctcggatccaggggagcagtagacgtgggtgctcatccgcgtgcctgggcccgcatcccctcagccgcagtattgcagcgtgggctggcggagcttggactgcagcctcggctgcagctcacgctcggggtctccccagagaccgcctttccagctttctgggcaggggctgccatcacatggcactgactcctcagatgggtctttgcagcattttccatgttcacaggtatcatggcgggttcaaaccggtccggggacctcaaggatgcacagaagtccatccccacggggaccatcctggccatagtgacgacgtctttcatctgtatccttggaggggtgcaggcgagggttccagcctctgcctggggggaggcccccatgccctccccggctcagcatcataccctcggccaccagcatgtgacttcccaggttaggctgtgctctcaccacgtcatcctccctgggagacggggcaagggctgctgtcaggaccctggcttcttcaccactgtgtgatgcgatcgtagagaaaacagaagcagtcaccctgccgcgtgtggacagtgatgcgcagcggtgtgtggggtgtgccgccggcaggctgggcccgcggggcctctggcttctcaatcccaaggctgcctctttccagccgagcattgtcccctcagcatggtcccctgccaatccctggcggtcaagcaccaggccaggtgtgtgtccaccaccccagggccccgttctgtggcgctggacagagcaccaggagggtgcgctgaggacacgggggacaggacgtgcccgggatgggatgggatgcagaacggtccccacccacctggatcctgnnnnnnnnnnnnnnnnnnnnnnnnnnnnnnnnnnnnnnnnnnnnnnnnnnnnnnnnnnnnnnnnnnnnnnnnnnnnnnnnnnnnnnnnnnctgaggaccctgcacccacggacccgcctttccttgacgagggctgtggatctctcctgcattgtgctgtttggggcctgcattgaaggcgtggtcttacgagataagtacgtttccacctgcagttttcgtgcaaagcctgtagtcttcaagggttttcctgaggatgaattcggctttgaaattacatcgccctaggacttcatgtccgcgtgcagagctgaaggcgtcctggtcccagggttgggatcccttggtctgatgtgtcgtctcttccgctggagcctagggcctggggaaccgttcagagccaactccaagccctgatgcggctgggggcgcaggcccttcctggggaggccacaggggtgtggacgggtgaggcttggccctgggagatccctcagccctgctgccaagtggagaagtagtggggtcccaggcaggtcatcactgaccctgcatcctcatggggtgtgcgtgtctggcagccccaaggccccgggggtcctgggtggtccctgactgaagctgatgccaggctgggtcttccctgctcccaagagcgaccctgaggtgagcaggaccccctcccccgctgaagaccctccagagcattctggccatgctgggcagagcctggtggaggtttcagccaacggggactggaggccgggcctcagctttccaaggagtcgcccccactgcactgggcccctcgctctgggtgggagaagacattttgtctgactcaggctcacttctgaaagccgcccgcccgcctgcccgcctgcctgcaggttcggggaggccctgcaggggaacctggtcatcggcatgctggcctggccctccccctgggtcatcgtcatcggctccttcttctccacctgcggtgccggcctgcagagcctcacgggggcaccgcgcctactgcaggccattgcccgtgacggcatcgtccccttcctgcaggtgagtcccgcaccctcgtcggggggaccctggaaggtcagggtcgggggctctcctcccctgcgggatcctcacagtgccgtgtgtgggacgcatgcccgcggcttggaccccatggtggtcattctgcccctggccactgcacagagcatgggagtggtgggaggtgggtggtgggcagaggcaattctagccctcctgcctgcaggtccctccgagctcggccccgggtgtgtcaggagcggctgtgagggcccacagccacgtatccagaggtgcctgnnnnnnnnnnnnnnnnnnnnnnnnnnnnnnnnnnnnnnnnnnnnnnnnnnnnnnnnnnnnnnnnnnnnnnnnnnnnnnnnnnnnnnnnnnnnnnnnnnnnnnnnnnnnnnnnnntggcgtcaccagccacctgcagccagtgtgtgtggctgctctgaggattgcacggacgcccgcatgggtcctgtccgtgtgctgtgcccagagctgccggattgtggctcctcctgctacctgggcccaggggcagctgtggaaaggtcgtggatggcagagccatccttgcccgtcgctggtccctcggcagggtgccgacccgcagggcctttgtgtggttgcatcttcagtcccagccgggcctagggcatggtgtccaggaaggggacaggcacacaggccccgtgggcctcagcttctgggaggtgagggtggcctgatgagaaaggtcaccacagggtctggggaaccgcgagtgccctggagacgctggtcctgtgttgtgtggtcggggaaactgaggcgggggggggcaggctggggccacacaggttgcaggcaagccgggcgtaggcacagctctgaagcctcctgggctgcagccctttgtcagggcttcttcccaggccagccgcgtgatgtcccggggacctactgtgaaaggcgtttctgctggtctgtgtctttaagattcatctgggctagacctgaccagcctgcagcttctctcctaaaagggtggtgtcatctgccccatcttcctgcccttctccctgcaggtgtttggccacgggaaggccaacggggagcccacgtgggcgctgctgctgacagtcctcatctgcgagactggcatcctcatcgcctctctggacagcgtggccccgatcctctccatgtgagcccccacaggacggggacctggggatgggtgtatgggcctggagcgtggggcagtgtggatgggaggtcctgctcaggacaagcagtagacaggcatggccagctgtgggcagtcaggatcctgccgggaagggagttgcgccggggaagacaagtacacaggcctccaggcagccgcccgctggggtcagccagggacagtgtggctggacagacggctgctggggaagggacgatggcccatctcttgatggaccaggtggtcacaggatggctggaacctgagggggcctgattcggaatcagtctgagtcagctcacgtgcagagacagacatggggagaaaaggcgcaggtgggagggacagtgacaagggtggtctcccaggtggcagtgactgggggctcaggggggcccagtgggcccgtatcagtggccggccgtccctgcaggttcttcctcatgtgctacctgttcgtgaacctggcctgcgccgtgcagaccctgctacgtacccccaactggcgtccacgcttcaagttctaccactggtgaggctactcagcacgggcgtgaggagccccacaggctgggacactgggtgcctctgccactggtgaggccgctcagcacaggcgtcaggagccccacaggctgggacannnnnnnnnnnnnnnnnnnnnnnnnnnnnnnnnnnnnnnnnnnnnnnnnnnnnnnnnnnnnnnnnnnnnnnnnnnnnnnnnnnnnnnnnnnnnnnnnnnnnnnnnnnnnncgtccttgactgttcctttgcggagtaagcccctgcgcagctgatgagactgcacctgaggaaggcctctggttacgaggatgcccaggtgtctgcatgtgccttgtacctcccgtggtcagcccagccttcccaggcttggggcgtagcccatcagggctgtgggtcttcttaactcccctccccaggaatcaggcgctgggtggacgcttcagccccttgttgcatgcacagccgaggtgctgtgtgcacgctgggagctggagctatgtactgggttttggagtgacagctcccacaggggcccagggagccacgtcacccctcagaggtggttgagtacagccatggtcgtcaggcgtcagtgactgttttcctagtgttaacagagagttttactgagggaggggcagtgtccgtgtggtggtggctgaggtgtgggggctgcatggcgttgggccgccccgagccacttgccccgcccccaggaccctgtcctttctgggtatgagcctgtgcctggcgctgatgttcatctgctcctggtactacgcgctgtccgccatgctcatcgctggctgcatctacaagtacatcgagtaccgcgggtaagcgctgtcagccccccttacagacccggcgcacgggagggcgggcccctctcatgctatgcctggggcagctccctggaggggcctccctggggcttgagcgtcgtgtgccctcacaggggcagctgggagcacgtccaggtgggctgtgttgtgaaagctggggtttccctcccacttccagccaggccgaggtgcctgcacttgtggacagggtctccagcctggagctctgtctcgtgccgtcctcagcaggcggtgagcccacggctgactattcctgctacgtgtctcgcgaggtgtccccaggttgtgtctgtactcactcggcagccacaggcgtccttccccgtgccccagcacccaccctccctccacctgcacccgcctcgtgcccggggtccagccacttccctgtcatgggcctcctgccccccgtcctgtgaggaaggcacctcacgcatgctggacgtagacctcgttccctccacagccacagcaccctctgacccggtggctcctaggacgggctcccttcagggcaagggtgggcatggaggcctccctcctcatccagggacttttcctgggggtcctgtttgccccaactcacctgcccccagaagtcccctttcccaggtgggagaggagcctccaggtacgcggctggacaaaccccgacttcctttcccacagggccgagaaggagtggggcgatggcatccgtggcctatccctgaacgccgcccgctacgccctgctgcgcgtggagcacggtcccccccacaccaagaactggaggtgagcaccgcccatgccccgtggtcctcagacgcacagaagagctgtttctgaggtcggcctttgagtggggacctttgagtctcaggggcctctcaccttcagccgctcaggcaaggtcgggggtgtgaacactgcctggtgcagagcggatggcgcagctgggggccgggggtgtccctgctgcagggtgggggtgtggggagccggcccctctgccagcacagccctgggcttggggtgggagagggtggctcctgctgaagcaaaggccatctttgggaagcctctgcccctcagggcctcggcgggggcctcaggcgtgtgccccgggccattgtcccctcaggggcctcggcgggggcctcgggtgtgccccgggccattgtcccctcagggcctcggtgggggcttcaggtgtgtgtcctgggccattgtctcacctgtctagcatgtcacctgtcccacctgtctaacctacctgttctcctgtcctgcctggctagtgcccacctgtccatcggccctgcctgtcccacctggcttctgtggcctgtctcacctgtcacctgttcaacttaccccacgtgtgtcacgtttccccatcccatctgtcacctgccccttttgtcccctgtcccgcctgtcatgtatctcccgtcccacctgtgtcgtgtgccccgcccgtcccatctgccctgcctgttgatgggccgtgccctggtaagcgttgccgtggtaacagccgccccaccctggctgcaggccccaggtgctggtgatgctgaacctggacgcggagcaggccgtgaagcacccccgcctgctgtccttcacgtcgcagctgaaggccggcaagggcctgaccatcgtgggctcggtgctggaggggacgtacctggacaagcacatggaggctcagcgggccgaggaggtgggccgggcggggtctgggggccaggcctctttcccaccccagctgcacaggaaacatgccctggcatgtcctcatcgcagcgtgtcaacacggtgctgtgcgtggcgctgctgtgttttagccgtggcggtggctttgagctcagagcagcgcgctaaggcctgggagcaccagccgcaccccgggaagcttgggaggtgtgagggccattagctttccaagggcgaaccctgggaccgcctcctcccgccatgggtgagccccgtccagagccgtaatcatggttctgctgcaagctcagtctcccgctgttcaggctcactgggggctgcataagtgtgatgcccgtgtgctgggggctcactgggggctgcataagtgtgatgcccgtgtgctgggggctcactgggggctgcataagtgtgatgcccgtnnnnnnnnnnnnnnnnnnnnnnnnnnnnnnnnnnnnnnnnnnnnnnnnnnnnnnnnnnnnnnnnnnnnnnnnnnnnnnnnnnnnnnnnnnnnnnnnnnnnnnnnnnnnnnnnnnnnnnnnnnnnnnnnnnnnnnnnnnnnnnnnnnnnnnnnnnnnnnnnnnnnnnnnnnnnnnnnnnnnnnnnnnnnnnnnnnnnnnnnnnnnnnnnnnnnnnnnnnnnnnnnnnnnnnnnnnnnnnnnnnnnnnnnnnnnnnnnnnnnnnnnnnnnnnnnnnnnnnnnnnnnnnnnnnnnnnnnnnnnnnnnnnnnnnnnnnnnnnnnnnnnnnnnnnnnnnnnnnnnnnnnnnnnnnnnnnnnnnnnnnnnnnnnnnnnnnnnnnnnnnnnnnnnnnnnnnnnnnnnnnnnnnnnnnnnnnnnnnnnnnnnnnnnnnnnnnnnnnnnnnnnnnnnnnnnnnnnnnnnnnnnnnnnnnnnnnnnnnnnnnnnnnnnnnnnnnnnnnnnnnnnnnnnnnnnnnnnnnnnnnnnnnnnnnnnnnnnnnnnnnnnnnnnnnnnnnnnnnnnnnnnnnnnnnnnnnnnnnnnnnnnnnnnnnnnnnnnnnnnnnnnnnnnnnnnnnnnnnnnnnnnnnnnnnnnnnnnnnnnnnnnnnnnnnnnnnnnnnnnnnnnnnnnnnnnnnnnnnnnnnnnnnnnnnnnnnnnnnnnnnnnnnnnnnnnnnnnnnnnnnnnnnnnnnnnnnnnnnnnnnnnnnnnnnnnnnnnnnnnnnnnnnnnnnnnnnnnnnnnnnnnnnnnnnnnnnnnnnnnnnnnnnnnnnnnnnnnnnnnnnnnnnnnnnnnnnnnnnnnnnnnnnnnnnnnnnnnnnnnnnnnnnnnnnnnnnnnnnnnnnnnnnnnnnnnnnnnnnnnnnnnnnnnnnnnnnnnnnnnnnnnnnnnnnnnnnnnnnnnnnnnnnnnnnnnnnnnnnnnnnnnnnnnnnnnnnnnnnnnnnnnnnnnnnnnnnnnnnnnnnnnnnnnnnnnnnnnnnnnnnnnnnnnnnnnnnnnnnnnnnnnnnnnnnnnnnnnnnnnnnnnnnnnnnnnnnnnnnnnnnnnnnnnnnnnnnnnnnnnnnnnnnnnnnnnnnnnnnnnnnnnnnnnnnnnnnnnnnnnnnnnnnnnnnnnnnnnnnnnnnnnnnnnnnnnnnnnnnnnnnnnnnnnnnnnnnnnnnnnnnnnnnnnnnnnnnnnnnnnnnnnnnnnnnnnnnnnnnnnnnnnnnnnnnnnnnnnnnnnnnnnnnnnnnnnnnnnnnnnnnnnnnnnnnnnnnnnnnnnnnnnnnnnnnnnnnnnnnnnnnnnnnnnnnnnnnnnnnnnnnnnnnnnnnnnnnnnnnnnnnnnnnnnnnnnnnnnnnnnnnnnnnnnnnnnnnnnnnnnnnnnnnnnnnnnnnnnnnnnnnnnnnnnnnnnnnnnnnnnnnnnnnnnnnnnnnnnnnnnnnnnnnnnnnnnnnnnnnnnnnnnnnnnnnnnnnnnnnnnnnnnnnnnnnnnnnnnnnnnnnnnnnnnnnnnnnnnnnnnnnnnnnnnnnnnnnnnnnnnnnnnnnnnnnnnnnnnnnnnnnnnnnnnnnnnnnnnnnnnnnnnnnnnnnnnnnnnnnnnnnnnnnnnnnnnnnnnnnnnnnnnnnnnnnnnnnnnnnnnnnnnnnnnnnnnnnnnnnnnnnnnnnnnnnnnnnnnnnnnnnnnnnnnnnnnnnnnnnnnnnnnnnnnnnnnnnnnnnnnnnnnnnnnnnnnnnnnnnnnnnnnnnnnnnnnnnnnnnnnnnnnnnnnnnnnnnnnnnnnnnnnnnnnnnnnnnnnnnnnnnnnnnnnnnnnnnnnnnnnnnnnnnnnnnnnnnnnnnnnnnnnnnnnnnnnnnnnnnnnnnnnnnnnnnnnnnnnnnnnnnnnnnnnnnnnnnnnnnnnnnnnnnnnnnnnnnnnnnnnnnnnnnnnnnnnnnnnnnnnnnnnnnnnnnnnnnnnnnnnnnnnnnnnnnnnnnnnnnnnnnnnnnnnnnnnnnnnnnnnnnnnnnnnnnnnnnnnnnnnnnnnnnnnnnnnnnnnnnnnnnnnnnnnnnnnnnnnnnnnnnnnnnnnnnnnnnnnnnnnnnnnnnnnnnnnnnnnnnnnnnnnnnnnnnnnnnnnnnnnnnnnnnnnnnnnnnnnnnnnnnnnnnnnnnnnnnnnnnnnnnnnnnnnnnnnnnnnnnnnnnnnnnnnnnnnnnnnnnnnnnnnnnnnnnnnnnnnnnnnnnnnnnnnnnnnnnnnnnnnnnnnnnnnnnnnnnnnnnnnnnnnnnnnnnnnnnnnnnnnnnnnnnnnnnnnnnnnnnnnnnnnnnnnnnnnnnnnnnnnnnnnnnnnnnnnnnnnnnnnnnnnnnnnnnnnnnnnnnnnnnnnnnnnnnnnnnnnnnnnnnnnnnnnnnnnnnnnnnnnnnnnnnnnnnnnnnnnnnnnnnnnnnnnnnnnnnnnnnnnnnnnnnnnnnnnnnnnnnnnnnnnnnnnnnnnnnnnnnnnnnnnnnnnnnnnnnnnnnnnnnnnnnnnnnnnnnnnnnnnnnnnnnnnnnctgggggctcactgggggctgcataagtgtgatgcccgtgtgctgggggctcactgggggctcactggggctgcataagtgtgatgccgtgtgctgggggctcactgggggctcactgggggctgcataagtgtgatgcccgtgtgctgggggctcactggggctgcataagtgtgatgcccgtgtgctgggggctcactgggggctcactgggggctgcataagtgtgatgcccgtgtgctgggggctcactgggggctgcataagtgtgatgcccgtgtgctgggggctcactgggggctcactgggggctgcataagtgtgatgcccgtgtgctgggggctcactgggggctcactgggggctcactgggggctgcataagtgtgatgcccgtgtgctgggggctcactgggggctgcataagtgtgatgcccgtgtgctgggggctcactgggggctcactgggggctgcataagtgtgatgcccgtgtgctgggggctcactgggggctcactgggggctgcataagtgtgatgcccgtgtgctgggggctcactgggggctgcataagtgtgatgcccgtgtgctgggggctcactgggggctgcataagtgtgatgcccgtgtgctgggggctcactgggggctgcataagtgtgatgcccgtgtgctgggggctcactgggggctgcataagtgtgatgcccgtgtgctgggggctcactgggggctgcataagtgtgatgccgtgtgctgggggctcactgggggctgcgttaagtgtgatgccgtgtgctgctgaatttctgcccactcagagctttgtggggagggacgggtgagtgccccgggcgtgtagcatgctggtgccagctctgagccctgctgctgcagtcggctgccccaggacatcggggtctgagactttgtgtcttcatttctctgattttcaaacttcttatgggaagcttcacactatccagaaacggaatgatgacacgatgaaagcctgtggggtcccatcacgtcacgtcacgtcacgtcacctggagttacttctgtatttcttgctaaagcagggagcttttgagtgcccacctgcgtgattttcatgccaagggcacctcattcccaggcagggctggctgccgtgggcgcctcgagcctcctccttccccctcatgtgtgtgggagtctgtggggcctataccacgtgcctgttgcagtggtgtgtgtccgaggtccctcccatgcgggtgccccctctgtccttgctgtgggttgggagccagctccctgctgccaggcccccactgggaccttgtgggtgtgtccaggcatctgcagccgccccccaccgcctccccggtccgtttctctgcacaaccacagccgcactgaggcccgtccaggtctgggccggtcagcctaggggtgggaaccctgctcaagagggctgtgggcacgtggatggtagcagcctcaggtggtgtggcctagggccaggatcccatggaggtaaaaaatggcccccgccgctcccgccacgttggccacgtggatggccaccttctcaggctgttgcacaggttcgccttcccagggaagacaggagatgctctgggccttccctttccctgacggcggcgtcatggctcaccacgggttcaggcgttagctgctattgactgtgaacccgtggatttaggtatcgtggttttcggggggatgttcacggtcctggtccccatatgtccctttccgtgttccttatcccatgctggaatgctcttaggaggaatcccggagttggaactgccctgctggcgtggattctaagaatcctggcactgcctggcctccctggaggtgtgtgagggcgcgtctgtgcgcacgagggacagggcagggattgcagtgactgggggatgacgggaccccctgccacgctctgccacagtcttcacggccatgggaagagctgcgctcacttatactctcacgttaacggagctcacaggcagatcctctccgtccgacagcccttcggctggggggtctggggcagcctcagacaggagcccgctcttgcggacgggaggacgagcgcaccctgcccccgctgctctcagcgagcctttggctgtgacttagctgcattggttgcgagggctggagccagccgcaggccccgccttcccttggctgcctttggggctgcactgccctggggagccgtattctcctccatcgtggctatgttagtgtgaaattagagaaatctgggcaaatcttttttatttatttgttttttaatttttatttattttttgagacagagtctccctctgttgcccaggctgcagtgcagtggcgccgtctcagctcactgcaacctccacctcccgagttgaagcagttctcctgcctcagcctcccagtagctgggattacaggtgcccaccaccacgcccggctcatttttgtatttttagtagagacggggtttcgccacattggccagtctggtctcaaactcctgagctcaagtgattcgtctgcttcggcctcccaaagtgctgggattacaggtgtgagccacggcagccggtctgggcaaggctgtaaagcatggacatttctctaagaagcgtgcagcttcgtgactcatgcagtcgccagggaggctcatgcgcgcccttgtgctctgttctgtgtggcactgattggcataaaaggggtcctaaggccctggtgttcttgctccccgctcgtaaagttgtcctccgggttgaggtctgtctgcacggaggcctctgcgactgctgcgccgggcaggtgcggggacttgtgataacagggtccccgacacggtgctgacttgtgataacagggtccccgacacggtgctgacttgtgataacagggtccccgacacggtgctgacttgtgataacagggtctccccacacagtgttgagttcctgccaggccagggcagtgccgcgtcctcctgaaaccctgcagtcctgcaaggtggttttcccaacagtgaggccagaagagagttgagatccccagctccgactcctcggagccagcacgtgggggtgagcacagcagccagtcatgtaggaagtggccccgtgacgtggctccagcacttggaggccctcagggcccctccagtggctgcatccaaacttggctgatcctgaacagccgtttccctgggctccgttctccggccagatcggggcacaagaacagagaacctgaattgccctgcagaggggtctcgtggggatgagaagcagccgcataaaggggctgctgtgtggcctttgctgaaatagccacacttcctgccttcttcccacatgacgcccgatgcgggggcttccctgtgccttcctgcccagagacggctgtgtccaccccgcagcgtccgcctccagccggtctctgcctctctggggcccctgcctccgcttgctggctggtgccccttgggggtaacgtgttcaggcctttcctgacctaaacaaaagtctcaaagaggagcatatctgctggccctgcaccctgtcccgtcttgcgcccgggcagctgggcagaaggtggaggtgtctggagagcagggtaaggacgaggggtgcctgaggaggagtggggccgtgggagaacattggatgttgttttgtgtgtgaagggctggtggagctctaggtgtgagccagggtagggggtgaggataccagtcaggctgacgtaggggctgctggaatctcggcaaaggaggcaggtggtggctctgatccctgagtggcccggggctgctgtgatgggacacagaccacacggctcacagcaaagggcgtctgttctctcctagttctggagcccaggagtctgagatgaaggagaccgcaggccacgctgcctccagagtctcccgggaggatcctcctgcctcctccagctcctgggcccccgggcgaccctgggcgcctgtgcctccacgcagtctcttcctcccagtctgagagctcttcctgccttcatcctgtaaggtcacttgtcagtggcttcagggcccacctctgacccaggatgctctctcaacatcataacctaattacagggttcttcaatacatccataaagacaggttttccaaataaggttgcattctcaggttcctggggctgggatgcgggtatcctcttttttggggccactattcaacccactgcaattgagctttcggccctaaaattcatatctgccacacatgtacagtatgttcaccccatctcagtgtctcctgaagtctcaggcctgcacagaccagctctgagtcccaactctcatgtaaatctcattgctcggagctcccaaatctcatcctctaagcatccaaaccagaagccagtgaaatgtggggtctggtccatcctggacaaaactgctgtgtctgtagatgtgcaagtgaggaggtggttatcccagaacgcagcaggggacaagccaggagaggcatgtttgctccaaaagggagaatcaggtgggaaggggccactggtaccacacaaggctgagacccagcagggcaggccctggggttccagggcctgaaggtcagagggtgggaggcctgcgtccacacatgcatggctttagtgcgtggcaggtcctcggccacgcacgtgcaaaccccatggagtcaagccgttccgtggcgcagcctcatcagacacccctgggaagagactgcacacagcagtgaccccctccaaccccgggaggagaccacacggcagtcccccacccccgccccccgccgttgctgttagggtgctgcatcctggaccccacggcctccctttgaagagctgctaatttggcccattttcgggtgtttctgatgcaccaggtggatgaacctggcccagagcgtccgagtgaactgggggtgggtctgggatgttgtggatcgcctcagagaactgcctggcgttgtgtccccagagcagccctccacatcccctgcacgtggcatcagtcacacctgctctgtgtctctctccccagtgtgtgagcacgcacatacacacatacacacacagcggccgggagcaccgcagcacaccgttgagccttcgggccttccctcctgctgggtccacagaggaggtggtgcgggtgccctggccaccgtgggtggtgggcgtgggtctgtgcaccccattcctgctgtagcaccaacctgtcctgtctcccgcagaacatacggtccctaatgagcacagagaagaccaagggcttctgccagctggtggtctcgtccagcctgcgggatggcatgtcccacctgatccagtcggccggcctgggcggcctgaagcacaacacggtgctcatggcctggcccgcatcctggaagcaggaggacaaccccttctcctggaagaactttgtgggtaggcatggctggcggcccttcggcatcccctcaccgtcccctctgtgtcctctcagtgtcccctcgctgtcccctcgctgtcctctcactgtcccctcactgtccccttttcgtccccactgtccccttggtgtcccctctgcatcccctcgccgtcccctcactgtcccctgtgtgtctcctcagtgtccccttgctgtcccctcactgtccccctctgcctcccctcgctgtcccctcactgtcccgtgtcccctcagtctcctctgcatccctttgccatcccctcgctgtcccctaaccgtcccctcaccatctcctcgccgtcccctcactgtcccctcaccatctcctcgccgtcccctcgctgtcccctcaccatctcctcgccgtcccctcgcggtcccctcaccatctcctcgccgtcccctcgctgtcccctcgccatctcctcgccgtcgcttcgccgtcccctcgccgttccctcactgtcccctcgccgtctcctcgctgtcccctcaccgtccccttgctgtcccttcaccgtctcctcgccgtccccttgctgtcccttcaccgtctcctcgctgtcccctcaccgtcccctcactgtcccttcaccgtctcctcgctatcccttcactgtctcctcgccgtcccctctgtctcctcgctgtcccctcaacgtccccaggcctgtgcgctgtcaggtcccgatgggccttgaggccaccgacccgagggtgtgtgctctgaggctgtcgaaggccctggccctgggagcggccatctgaaagtgtccaggcactccctccccttctcccagagccccgcaggggctgggggattccctggacacatgaccagcagctgaactctgctgtgagtctctggctggtccttggaggagctgacggagtgagggtgggggctttgtggggacccccctcgcctcgccgtgcccgcccctgcactggctgtgagtccccggggaggccccttccgcaccctggcctcagatgacctgcggacggccgcctctctccgcagacaccgtccgcgacaccaccgccgcgcaccaggctctgctggtggccaagaacgtcgactcgtttccgcaaaaccaggagcgcttcggcgggggccacatcgacgtgtggtggatcgtgcacgacggcggcatgctcatgctgctgcccttcctgctgcgccagcacaaggtggggcgtgcgacggggacacgccagccggagcacggccaccccacgtgctgcgggccgggacgggctcctctgaggccccacagccatgccctccctgtctgcaggtgtggaggaagtgccggatgcgtatcttcaccgtggcccaggtggacgacaacagcatccagatgaagaaggacctgcagatgttcttgtatcacttgcgcatcagcgccgaggtggaggtggtggagatggtgagtcccgagggcttgaggggaggaggccggggggaggtggggaggaggtggggggcggcccgggagggctgtgggcctcgtgaggtgggggtggagggggaagtggagatcgggagggctgtggcctcgtgaggtgggggtggagggggagatcaggaggtggaggtggaggtggggaggagaaggtggtggcgattgtggcgggggctgccaggccttgcggggtggtcaaggaggcttggttttggaatcgccaggacatcacagaaagcacagagccccgtgtgttgcttgtggacacctcgtgtaacacgggtgtgggtgttgccctagagccggcatcagcatctccgtgtcctccatggtcccgtgtcctcctcggcccgggaccccgtccaggacctcacacctcagtggtgttgccatggtgggtgcacctctgagcacctcccgttttgggtgctctccccagatgggctcaccttcccacggctggaaaccacacatcagcagtcgggacccggggagaggggcactggtcagtgaggccaggctgcagctgtcacgtgggacagacaggccctcggtcagctataggcagggcctggacagagactcgtcccgtccttcacgcctggagaggacggggttgatgggcggaggcctggcattggagcgcttgctcccggcccccaagcatggagctctggatcctgggggtctggtgggccccttgtgctggatggaaccatgcctgctcgctaccagcccacccggatccacggctgtgccttcccctccggtcctgctggcggtcccgggactttgtgggttctgaccccacttggatcacgccgacaacactggtcttgaagtcagaacccgcaaagtcctggtttcttccggctcccgtgaccccagcgcatggttttgcaggtcctcaggggcctggactcctggaggtgggtgctgggaagacataaagctggatagagactgtcacgctctcccccaggaagccacctgtgcccctgcagcagcctgggaggtgcggtctctccagccccgcagccccccagtcccccagccccccagccctgggtatggcagaggccccgagcacctgctcctggtttgtgtcgggctgtgagtgaggccaggcacggcttcgtgcctcaccgacaaccttctgtgtttctgtgtcagttcccgtggaactcagttgtcctgtggggttgttcttcctcttgccctgcaggacctttcctaggccgagggctgcaggcctgcgtgacgctggatggttttctgcccagttttgtacactgggcttagtttccatgtggctgtgtcttcggggacgatggctggagtttgtcttgtttggacgaggctttgcgggttcaaggttgtaggggttattattggtgctaatagtcgtatgaataacgttatttccaagtcataaaaccgcttagtaaaatagtaacaaaatgctgcctgggagaaccagccctgccagggggccaggtggggcagccactggggcccagaggaaacaggcaaagtgagcccatggccccagccgcacccccagcccctccgtggtgccagaagcagctccccagctcctgagcaggggttgttagctctgaagtccgggaacctggagctcccagcaccccccatgctcccagccatgtctctggcagggctggggctgcccacccctccgtagccctggccgcagggacaagtgccacctggctggagaggggcgtctgggtcgctgccattcagtctggcatgctgtttatttttttaaaaaaagttttgagacagagtctcgctctgtccccaaggctggaacctccacctcctgggttcaggcaattctcctgcctcagcctcctgagtagctgggactacaggtacacgtcaccatacctggctaatttttttttttttctttgtatttttagtagcaatggggtttcaccatgatggccaggctggtctcgaacttctgacctcaggtgatccacccgcctcggcctcccaaagtgttgggatgacaggtgtgagccaccgcacctgatctggtgtgctgttttaaatactggtgcttaacaggcacagctgctcccaactcccatgagccgggtgcggcgggtgagacacagggatcccgcacggcgggtgcggtgggtgagacgcaggggtcccgcatggcggatgcggcaggtacggcgggtgcggcgggtgagactcagggatcccgcacggcgggtgcggtgggtgagacgcaggggtcccgcacggcgggtgcggcgggtgagactcagggatcctgcacggcaggtgcagtgggtgagacgcagcagtcccacactgtggatgttccgggtgaggcgcaggggtcccgcacggtgggtgcaatgggtgagacccagggtcctgcatggcgggcgctgaggttgtgctgtggcttctccatgtgttctgggtgggtttcccatggtgccaagcccccctgagcatagacaatgacacctgtgagcgtggatcatgcagccccatggggcagtgcctcgccctgagccgtgtgtgccaggttggtttgtggctgtggccttgtcctcacagctgcccttgtgcccggtcagagggtcctggggagggacatgagcagagcgtgtgtgcggcgtgactgcccatcgtgcgctcacaccttcctggccactgggcggggggcctgagagccagagggggcctgtggggcctgggacgcgtggcctttcccaccgctcagggtggctcggtctctgggtaccaggctggtgttggagccatccgtggttctgtgcacaccgggcttactacgtgcttgggaactttctaggttgaaaacgacatatctgctttcacctacgagaggacactaatgatggagcagaggtcgcagatgctgaagcagatgcagctgtccaagaacgagcaggagcgagaggtacgtgggggccgtggccacagacaccaggctttctgagaagtatagccgacttcgctgagtcttttctgggaccctcctgcagcccacgacggtcctccagagagcatgcctcaggtactgcgtcgcaggctcagcccccagcctgcgtggaggtggcagaggccctgcaggagcacaggagtggcgtcaaagccagagctcatcggagcctgggcgtgcgggtgcctggttagaggaacggcagcctgccagatgcatgctcatgtgcaggaagggacgagggccgagacctttgaacttagcttttctaaccgagcagcgtgcaggcaggagacatggggaccctccccaagggcagtgccctctgacagggtcagcggcttctgagccggatgagtgcccacagctgcttacgatggctgctttgtctcacagcctgaaaccctggagcccctcagtgcccttccccgcagcatgcacagatttctgtcctgtctaagaccaagtgggaggggagagtgagtgtgcagggagggagggaagcgagctggaggggagttgccaacccccccaccccccaccccccgacacagacctgtgcagcctccgtgcgtggaagctggccgcctggctgcagcggctttggctccgtgggtaactgtaggctgctgaggacgtctgggtgtatccatctgagttatactggcctgggccccatggccactgtgagaccccaagggcaggcgtctttgtggtcacttcgcactggaggacagcacgggggtcacctggtagcgggatgctcagctctgtgaggtcacggcctcatggggtcttcgtgggtcccacctggctggtatcacacacgtgtgtgtgcagaccaggtgcaggtgttggttttctgagactgcagtgacggcggaggcaggggcagaggatttgcctgccctggggccttggcctcagcaggaacctgcagtacacgggtctgcgtgtggggccatatgtgctgacagccggaatcactaagcagcgactgctgctctcccccaacagagaaaggcgtgtggagctgcggtcctgtccactcccagaccccgggcaggtcagggtgggcacagatgcaggacacggggggccgcccagcttgtccgtggacagagaccccttccacgggggtccgggcagccgggagtgtctgggaggacccacatcctctgttttctgtccaggccaggtccctgagatccggcagggtcgccctggcgtcacaagggttcagcccgggtccagctaggaacaagaatccacccatggcttcatgggaagttcagtgtggagagtcagcaaatgctgaccgaggagggaccgggagcgggaacagcaagctcgagctcgaagggcccctcctgggccaggtgggggttggaggtgtcaccgctctgcagaagccggggtttggatgagctgctgtgcagacgctgggtggacaccctctagtgacttacacggtggccctcgggccaggtgggcggcgctggctctgccgagagcgggcagcccttgggctctggtttcacgttcaaggccatgggaaatttaggctgggccgggcgccacaatgagtagaggcctggggcccactgtctgtgtccagagagggaggcagccccaggccctcccccatctgtgccaatctcttccctttcgggaaggaccgacatccaagttaaacagttttatccggggaagaagaacctggtccagtgaaatcactctggacctttggctttttaaaatcaccccggggctcacaaactcctgatgcccctgggacgagtggctccccgggctgcgtcacaaactcaggcggggctccagccacagtgggagaggtggccattccggtgtgtgcataaataccacttccaaggtggcacccgtgtctgggagctcccattggcctacctgtcaggctggccacgacagcacggagggcgtgaagggtgcagggaggaatgagaacccagtggagggtgtttaaccaccaggggctgcgccattggtgcgatctcgcggtgagggcgccacttccccttcggcgcctacagctaggggcgtggacggtgttttcattttcctcggattgtcagaagtgacgcacagggggccggccctgtcattggccccagcggtgccccacagggcccctgccagcctggccggcccccaaacgtcccctggctggtcagacacagcctgcttccccggggacagggcctggatgctggtacggccccacctgccccaagcctccctgagacggggatgcctgtgggcgagcaggtggtctggggtgaacacgtgtgtggagccccgtcaggtgagggggagactctgccagcacgtgtcacctcctgtcagtacggggtcatggggcctttccagttcagggccagggcgggaaggtgagggggtgagcgtttggtcaggaagcctgggaggagggaggcagtcacgggggcggcgcaggaccagtgtgggacgccaggctgggtcctgggtcaggcacacagggcccttcaggttctgtgagctgccctcacctccggcctggcatcccgggtcgctctcgcccagaggagttttgagaccggctggtctcaccgagtcccgggcccgccaggcccagctgatccacgacaggaacaccgcgtcccacaccgcggcggcagccaggacccaagcgccgcctacgccagacaaggtgcagatgacctggaccagggagaagctgatcgctgagaagtacaggagcagagacaccagcctatctggtttcaaagacctcttcagcatgaagccgtgagtgtccgtgcgtgtggcctggggggaacagatcctggcagtgctggcccggcagtgaggacagagtcccttccctgaccactgaagagcttcggggcaaccctgcaggccagtgggcccgttagagaacagggagccgcctgagtgggcactgaggggtccttttggtgccaaggccgggccctgagttcagccctgtggccgggcgctgagggatccttctagtgccaaggccgggagtccttgtaagacctgggtgccaagtgctgaggggtccttctagtgccaagcgctgaggggtccttctagtgccaagcgctgaggggtccttgtaggacctagggtgggtcctgatgttaaccccacagctgggtgacgagcagtcctcctggtacctgggccagccctgaagtcagccctgcggccaggcctgctttgctcaggcaagcctcactgcagcaggcagatgggtctgttccatggaggcgaggaggcttgtgccgctgggcacagaattcctggccttcaccctgtgggtagttcaggctgctgtcgggccctagggcctgccctacgccaaggctcccacctgtggccttgggctgcgaacaccagggctgtacagggtccttgcgggtgtgggtttggttctgcagacgcagcctctgagttccagatgagagcgcaagagacacctctcacccggggtcagagccagaccctaaagccaggttctcaggaagggctgggggctcctgggccctgtggggtgggatgaggcggcgtcctcctgggcagccatgcgatctggaacagcctggtgctctctcctgaagtcagtaacacactcttgtttttttctcctgcatagagaatggggaaacctgtaagtccactcgctacaaccaggtcgccttccgggcccggttgccctgcatgcctgtgtgtgtgtggcctgcgtgtgtctgtgcgcgtgttctaggcctgtgcctgccccgtgcacggtggcttgtgtgcgtccgcgtacagccagagctcacccagagctgctgcggctcccacgtcagtttcctgttgccttcgctcccctctgttcacggtggctccagcacacgcctgaagcctcttcctaagtgaggcccaggaactgagacctgggaggtgtccgagccgctccggagtggaggggaggcgtgcgcctcgcagggcccgtcagtgagtccatccacgtccttctgggtcaggcgctagctgagtcgcgttcccacctggaatgccttccatgttaaagctgtccagcctccaggcggagaggggtgcagatcagttctctgtgtggtcggaccctcggcaggagctacctgcgtctgagctccggggcaggtgggagggtgtaccctggacggacccccagggtgctccctgggagtcctcgatgccgtctctgtcccctgcctgcccccgccagtaaccgcctgggccatgttttccttgtgggcaggcagtgcctggtgcctgagtgaggaacgccttggctgagtggccacacttcccttccctttttatctttaaccccgaaacctgaattaatcagactcaagaaactgtgcagctatgtgcgaggcgtgcagggaatccctgtacttcctgctccgttctgtaaatctgaaagtgccttcagaatagcgtgttaattaaagccgcagaacgacgtagacccaggagtagggtttgacacacacatgcacaggcacacacactcggggaccctcagtggcacctgtgcctcctcccagcgccggggcttgcctccccttggtcggggcgggggcaggtccccacaggcctgtagggtcaggagaaggtgggccagaatggacaacgcgtgggctttgtattcatgtgtggcgtgcgtctgggatggcattgactctcttggcccagcagtttctcggggttgggctgggagaagccctccgaagatctggaggtcggccctgacctcttctgggcagtgcaggcgtgagatgtgcgtggcttactgtgacgtccccgggagcacacttaacggatgtctgtttgtgtgcgtgctcgcatgtacctgtcagcgcacctgccggtggacgtgtacctgcctgtgtgcacgtccacgtacgttagtgtgcatgtctgtgtgcacatactatgcatgtcttacatgttagtgtgtctgcacgcatttgcacattgtgactgcatgcctgtttgtacatgatagtgtatgcacttgtgtattagtgtgactatgcctgtgtgtgtacacatcagtgtgtctgcatgtatgtgtgtgtgcgtatacacattagtgtgcgtgtctgtgcctgtgtctgcactggtcctccttgctgtggcggccggcatactccaccagtagccaagggccaggtctccgcctcaccccagcactcactggctgtggacacgctgcccactccgacccccctgtgctcctggcctgctttcacttcctggagctgctctttgtccccaaacacactggtaattgtggtctatccagaagtcgaattcaaagttccaagttcctggcacgaaagccccttgactgtgctgtggacagagaccccatctgtaattagaccaggctggagagaagatagaaggtctctccctgtgttcctcctggaaattggtggttatgatcacgtttatgtggcttaagcgtcaagcggatcaaagggcgtgagcctggatggcgtccgtggggcctctccgtgaccctgcgtgggcggcctctgtctgtccgccgccgcccctctgcgtccagggcgctggtgacctcccccagggggccacagtcacgaccgcacggctgcagctggcctgagacccgctccgactttcaagtccacacacgggccgggtttttccaacacagaaacgcaagtgctcccctccgcccagcgtttccccaggtggcctcctggaacgccagttctgctgcagtttaggggcctgcctaggaggggaccgtggggtagaggagggagataagctctgtcccgcaagggcctgagcacctcacagcatgattctgcagtgtccccaaacctacttggttggggagcctcctgtggggctgtggccgggcccaggccgccagggacgctttgagacatggaccggccacagcagcttcagagagcagacagggagggtcgtggagcagagctgcgttgtgaggacggaaggcgggggctggacggccacacggtggaagtgcttgtcctttagcccttggccagacaggggcagggtgggccgtaggaggggacccagtagtggccactgagggcctgtgcctccagctgagtcctcggcataccctgtccttgtcaggcctgggagcttcagcagcaacggctgcacaggccggtgtgggggactctgggcctttccttcctgagcttccggccccttggacccagttgtatcaggaccctcggagaggaggccatgtgtgcccagcctgacgggtctgtgtttggcagtgtctgacgtggggtttaggggcgatgatgtagatgtcaagagaagcgtgtcagccttgaaggcgtcaggcacatgggccacccagacggcttccactgttctgcctgctttgcagatgtagatgtagttaggaaagcgcttgcggtttgtgttgtgtgactgtagcccttagaagcttggcagccttagtgggctgagttctaggtccctggaggccaaagcatcccgctgctgaacgcccgccctggctgcagtcagcgcctttcgctcggagccgccacttctgcatccttcagggtcagagaatccgcctgatcctgactcacacagccctttccaacacgtgtgaatgcagctcatcagggctcagctcagcctcgtgtccggagcgtggggtgcacccgccgcccgctgaccgtgcccacctcccctgcagggaccagtccaacgtcaggcggatgcacacggctgtgaagctcaatggcgtcgtcctcaacaagtcccaggatgcgcagctggtcctgctcaacatgccaggtcctcccaaaaaccggcagggagacgagaactgtatcctttcttgcagtgtgcctgctgagcgtgcgggcaccccctggtggcttctcgctaagacctgggtttgtgggtgctgggagtgaggctggcttcccgcctctccttcagccccaggctctgggagctacgaccgggatgcagtggggctctgagcccagtggtgaccgggccagagttggggccagccctggcattggtgtgggggagggagggcccgcctacagtaccagccccactgtccgcaggtgctcagggctgccctggggctgggaggctccctgtcatgcatccccacagcagctgtgcattctgggacctccgctggggctcagccccaccctgcgccgacaacggtgggaggtgaggagcccagctctcggctttaaggccacaattggtcgcagctttgggaatttgtgctttggaaggagaactccgcagtgcatctgggcgtattggcacagacagggtgacgcctggcacatccctgccaggttggcaccaagaactggggccagtgagggcatgtcctccatgcgtcctgatcggaatccgtggcccaggtcccctgtaggctggtgaggacccagtcccgtggctggggttccctgtcgggtggggtcagcaccgtgggctgtgtcgctgtctctgctcgtcctccctgtggccacggtgctccctctctttcccgagcactggcccctctctcccctgcccctccccgcctggggggtctctctaatccccacctctcttttcaccttggctctgggtttctcaaaccaaatcttagctaaccaggagaggataaacctcactcctatcacgatttcagctacacacgctcaggtaagatcagctgtggccttaactctgttgaccacagacatggagtttcttgaagtcctgaccgaggggctgaacagagtcctcctggtcaggggtggcggccgggaggtgatcaccatctactcctaatgcccaacagcatcacggcactctgggacaggcacggaggacggcgtgggcagcctgggcctgggcttggcccagggaaacagacggcagacacacctgtcccccagtgatgccacccaagctgcccatggggcttcctacggaagtttctaggcccgtcacctagggctctcctgttcagccttaacaggctcagcaaatcagggcgtggctggacgatttccttgcatctgagggcagacgctgctaccggagtgacctggacgtggccagatcttctcgcaggtcacaagaagccagtgagcccttgccttggtttctggaagttcttttccttggctggatttacccagtggttaggttgcatttctaccccatccagaacattcttggaagagcacccggagctgaagctgtccctgatgatgaaggtgaaacgtcagccctggccatggctccgctcagggccccggtcacctccgagtcactctgttccttgactgtctttgtgtttctgtacctcaaggcactgaagctggaggactctgtccatgcccgtgtcaccctcgtgtgggagcctctgggctcggcaggtccacatttcatgagctgaggcgtgggccagggccatctggaaagggaactcggcttttccagaacgtggtggatcatctgtcgggtgtgtggtgaacacgttcagttcatcagggcctacgctccgggaaggggcccccagctgtggctctgccatgccgggctgtgtttgcagctgtccgagtctccatccacctttagaaaaccagccacttcttttcataagcactgacagggcccagcccacagccacaggtgcgatcagtgcctcacgcaggcaaatgcactgaaacccaggggcacacgcgcgcagagtgaacagtgagttcccccgacagcccacgacagccaggactgccctccccaccccaccccaccccaggagcacggcacacagttcagcctctgagctggctcacacgtgccatccccaccccggtgctccagggaaggaggacacggacccgacgtgggaggtcctcaggcagcagtggcgcctggtgtcaggtctgtctggctgagtcccgggcgtcccctgccatggcctgtgccttgcatggaggcggcggtggcactgaagagatagctttcaagggcccaacactttgcacttcggctggctgtgagtttctgctttgtaggttgtggtcacatttgcaggctgcgggcagtggcaccgacttgggcctccctttctatgtggcatatttatttatttaaacaccccagggagttacgtggtaacaaggttgtccataaagaggttgcttctatatactagaggccccagatggccaggccttgggctacgtctggcttgcatggtctcccaagggaatcagccccatcaacaaagttcaaatcggggcagaggctgcacttgtgcccccagatgtttctgaggagccagactagggctggcattgctgtagagtgacggctgctgcccagagcgtgtcccagacatcacagcggggctcagcagttcccacagcctctgcctgccttggctaagcatgagttaagcagcaaaacgctcctccatgtctggatggggccggcaggtcctgtgtcccctgcacctggaggagagcaggctagaggcacagcggccacatggtgctggctctgaacgttggttggtggctggaaaacagccctgcttctgagggccgctcagttctgcacacgaaaccacctcctgagggctcagctctgcccccgccctgggctgcagcctctgcacgcaagcaccaggcatcctttgtgttgtcaactccgtgtaaccagtaactacagccatttacaattgactccgtttccttttgtaggtttccctgtctgtctgtgttagtagaaaaataaaatcctatgaaatctgagtacgttgaagaatctcttgagtctcattcagcatgaaagacagctggagaaaatgtactggccgccccttttctagcaggagcgtcagggctgaccagccacagccaactcaggtggctgaagagtgaccatatgaattggacgagggcttccaaatcatgtcatcggcttggaaatgaccttaccccaaacttcctagtgctgtgtgttgaagtgacccaatctctgtatttctgagacagtctctgttgcctaggctggaatgcagtggcgtcacctcagctcactgcaacctccgcctcccaggttcaagctattttcctgcctcagcctcccgaatagctgggatcacaggcgtgtaccaccacgcccagctaatttttgtattttagtagagatggggtttcaccatgttggccaggctggtctcgaactgacctcaagtgatctgcctgcctcagcctcctaaagtgctgggattacaggtatgagccaccatgcccggccattcgatttataatttaatttatataaggatggaggcaccagagagtccgccatgagtggggacagcgtgttctaactcgtgagatgccaactcacacctgtgatggtcacagccaaaaccagagaatcgcggggaggacgtgcggaatcggacccctcttgcagggttgtagctgcacgggaagggcctgtggttcctgaaagtgtgagagacagagccgccccttccccggcaggtccactcctggtgtgtggcacagcctcaggaacgggtgcacgcaagttcacagcagccagaatggatgcagcccgagaacatgctgagtccatgtgggccgtgcctgctgcaggcctctcagctagaatcaggagccaagcttggaagcctcacgctcgggaggaagctagacacaaagggtctcacgctgtgggactgcacttaacacgaaatgccagagtgggccaggcacagaggcagggggtgcactggcgggtgctgggggtgggtcaaggggaatggggggagatgggggatggggggaggctgcttacagggtatggatttctttttgggtgaaaatgttccgaaatggctgtggtgaagcttatgtgactgaacatgctggaacactgcctcgtacacgacgaagggcgaattgtgtgtgtgaagctgccgggcaccgtgtccagtgggcctgacacatggtggacaggaagggacacggcacaggagggtggcgggtcctgctctggctctcgggtcacaggagagtgaccgtgagagcagcgtcgtcctcggacccctgaggggtgagtgctggctgcacccaggcatccacacccgggactcagagcacgggagcggccggctggggtgggcctactgtcctgagggccaggtgctcacaaattccagcagggaggtttggagacccactgatgcctacacatctgggaccagggcccagtcagaaacccctaggtgtccccttccctgggaccccaaaaaccaggctgcttcctagccttggccggtgcttcccaaggagcaagaactcggctagagcagtcacccactcattcacacacttaactcgcccattcacacgctaactcgcccactcattcacacactaacttgcccactcgttcacacactaacccactcattcacaaacccacccactcattcacacactaatccactcacacactaacccactcattcacacactaacccacttgttcacacacccactcaactcacccactcgttcacacacccattcacatactaacttgcccactcatacactcacccactcattcacacacttacccactcattcgcacactcattcactaacccacccactcgttcacacaccctcattcacacactaacgcccactcgttcacacattcaccaactcattcacacattaacccactgacacacactagcccattcactaacccattcacacactaacccactcgttcacacacccattcacaaactcgcccactcgttcacacacccactcattcacacactaacccacccactcattcacgcactaacccactcattcacacaccaactcacccactcattcacacacacccgctcattcacaaacccactcgttcacacacccactcacactaaatccctcattcacacactaacccactcattcacacactcacccactcgttcacacacccattcacacaactcatccactcattcacacacccattcacaaactcgcccattcgttcacacactaaccccctcattcacacaccctcattcacacactaacacactcacactaacccattcacacactaacccactcgttcacacacccattcacacactcatccacacaataacccacccattcatgcactaacccattcacacaccaactcacccagtcacacactaacccactcattcacatactaacccactcgttcacacacccactcacacactaactccctcacacactaacccactcattcacacaataacccacccactcattcacacactaacccactcattcacacaccaactcacccattcacacactaacacacactaacccactcgttcacacacccacaaactccattcacacactaacccactcattcacacacctattcacaaactcacccactcgttcacacatccactcacacactgacccattcacacactaacccactcattcacacactaactcgcctactcgttcacacactaacccacttattcacactaactcattcacacattgacccacccactcattcacacattcacacactaacccgacacacacccacattcacacacgaactcacccattcacacagtaacccactggttcacacaaccattcacacacacactcgttcgaccattcacacactaacccattcacacactaacttgcccattcacacactcacccattcacacattcatacactaacccacccattcacacactaacccaccgactcattcacacactaacccactcattcacacactaactcatccattcacacactaactcacccactcattcacacactaacccattcattcacacactaactcaccgactcattcacacactaactcacccactcgttcacgcactaacttacctactcattcacacactcattcacacactaaaccaccgactcattcatacactaacccattcacaaactcacccattcatttgcacactaacccactcattcacacactaacccactcattcacacactaacccactcattcacacacccactcatttacacactaacccacttgttcacacacccgctcattcacacactaactcacccattcacacactaactctcccattcattcacacaaacacccactcattcacacacccactcatttacacactaacccactcgttcacatacccgctcattcacacactaacccactcattcacacactaactcgcccattcattcacacactaactcacccattcacacacgaactcattcacacactaacccaccgactcattcacacactaaccaactcacacactaactcacccattcattcaaaactaacccacccattcacacgctaactcacccattcattcacatagtaactcacccactccttcacacacccactcattcacacactaacccattcacacactaactcgcccactcggtcacaaagtaactcacccactcattcacacattaactcattcacacactaacccacccactcattcacacactaactcattcacacactaacccaccggctcattcacaaacccactcattcacacactaacccactcattcacacactcacccactcattcacacactcacccagttgttcacacacactcattcacaaactcacccactcattgacacactaactcacccactcattcacacactaacccacccactcacattcatacactaacccactgactcattcacacactaacccattcattcacacactaacccactcgttcacacacccatacacacactaacccactcacacacccattcacacactaacccactcattcacacactaactcgcccactcgttcacacacccacacacactaaatccctcattcacacgctaactcacccactcattcacacactaacccactcgttcacacacccactcattcacacaataacatccactcattcacacacccactcattcacacactaactcgcccactcattcacaaactcgcccactcgttcacactaaccccctcattcacacaccctcacacactaacacactcacacactaacccactcattcacacactaacccactcgttgacacacccattcacactcatccacacaataaccnnnnnnnnnnnnnnnnnnnnnnnnnnnnnnnnnnnnnnnnnnnnnnnnnnnnnnnnnnnnnnnnnnnnnnnnnnnnnnnnnnnnnnnnnnnnnnnnnnnnnnnnnnnnnnnnnnnnnnnnnnnnnnnnnnnnnnnnnnnnnnnnnnnnnnnnnnnnnnnnnnnnnnnnnnnnnnnnnnnnnnnnnnnnnnnnnnnnnnnnnnnnnnnnnnnnnnnnnnnnnnnnnnnnnnnnnnnnnnnnnnnnnnnnnnnnnnnnnnnnnnnnnnnnnnnnnnnnnnnnnnnnnnnnnnnnnnnnnnnnnnnnnnnnnnnnnnnnnnnnnnnnnnnnnnnnnnnnnnnnnnnnnnnnnnnnnnnnnnnnnnnnnnnnnnnnnnnnnnnnnnnnnnnnnnnnnnnnnnnnnnnnnnnnnnnnnnnnnnnnnnnnnnnnnnnnnnnnnnnnnnnnnnnnnnnnnnnnnnnnnnnnnnnnnnnnnnnnnnnnnnnnnnnnnnnnnnnnnnnnnnnnnnnnnnnnnnnnnnnnnnnnnnnnnnnnnnnnnnnnnnnnnnnnnnnnnnnnnnnnnnnnnnnnnnnnnnnnnnnnnnnnnnnnnnnnnnnnnnnnnnnnnnnnnnnnnnnnnnnnnnnnnnnnnnnnnnnnnnnnnnnnnnnnnnnnnnnnnnnnnnnnnnnnnnnnnnnnnnnnnnnnnnnnnnnnnnnnnnnnnnnnnnnnnnnnnnnnnnnnnnnnnnnnnnnnnnnnnnnnnnnnnnnnnnnnnnnnnnnnnnnnnnnnnnnnnnnnnnnnnnnnnnnnnnnnnnnnnnnnnnnnnnnnnnnnnnnnnnnnnnnnnnnnnnnnnnnnnnnnnnnnnnnnnnnnnnnnnnnncacactaacccactcattcacacactaactcacccactcgttcacacaccaaaacactgacccattcacacactaactcgcccactcattcacacaaactcacccactcgttcacacactaactcacccactcattcacactaactcattcacacattgacccacccactcattcatacattcacacactaacccgactcattcacacacttacccactcattcacacacgaactcacccattcattcacacactaacccactcgttcacacacccattcacacagtcgttcagccactcattcacacactaactcacccattcacacactaactcgcccacacaactgactcattcacacactaacccactcacacactaacacccattcatttacacactaacccacccattcatggggggggactcacccactcgttcacacacccactcattcacacactaacccactcattcacacactaactcacccacttgttcacacacaaactcgcccactcattgacacactaactcgcccactctttcacactaacccactcattcacacactaacccacccactcattcattcatacactaacccactgactcactcacactaacccattcacacactaacccattcattcacacactaactcacccactcgttcacacacccactcattcacacactagcccactcattcacacacccattcacacactaactcacccactcattcacacactaactcccccactcattcacaaactcgcccactcgttcacacactaactcacccactcattcacacactaacccattcattcacacagtcacccactcattcacacactaactcacccactcgttcacaacccattcacacactaacccacccattcatgcactaacccactctttcacacaccaactcacccactcattcacacacccactcattcacacactaactcacccactcgttcacacacccattcacaaaatccctcattcacacactaacccacccattcacacactaactcatcgactcattcacatgcccactcattcacacagtaactcacccactcattcacaaacttgcccactgcttcacacactaactcgcccactcacacactaacttgcccactcgttcacaaactcacccattcattcatacactaacccacccacttattcacacactcattcacacaacccaacttattcacacactaacccactcattcacacactaactcacccattcattcacacactaacccacccactcattcacaaactaacccattcattcacaaactcacccactcgttcacacacccactcattcacacacctactcattcacacactaactcgcccactcattcatacagtaactcgcccactcattcacactaactcgcccactcgttcacacactaacttgcccactcgttcacacactaacttgcccactcgttcacaaactcacccattcacacactcactcatacactaacccacccacttattcacacactcactcattcacacaacccaacttattcacacactaacccactcattcacacactaacccacccattcacaaacccattcattcacaaactcacccactcatttacacacccacacactcacctactcattcacannnnnnnnnnnnnnnnnnnntcacacacccactcggtcacacacccactcattcacacacttaactcacccacttggtcacacatccactccttcacacactaacccactcattcacatactaactcgcccactcgttcacacactaactcacccattcatgcactcactcacacactaacccacccattcactaactcactcattcacacactaacccacccactcattcacacactaacccactcattcacacactaatctacccattcattcacacactaacccacccactcattcacacactaacccattcacacacgatctcacccattcattcacaaactcacccactcgttcacagccactcattcacacactaactcacccactcattcacacacgcactcattcacacccactcattgacacactaactcgcccactcgttcacacactaaccccttcacacacacactaacccacccattcactcactcattcacacactaacccactgattcattcacacactaactcattcacacactaactcacccattcacacactaacccactcacaccctaacacccactcgctcacacccagtcatttacacactaagtcacccactcgttcacacacattcacacacgaattcacccattcacacactaactcgcccactgattcacaaactcacccactcgttcacacactagcccactcgttcacacactaacccactcattcacacacccattcacacactaaccccctcacacactaacccattcattcacacgctaactcacccactcgttcacacacccactcattcacactaacccacccactcattcacgcactaacccattcacaaactcattcacacaataacccgactcattcatgcactaacccactcattcacacaccacccactcattcacacacccactcattcacacactaacccactcattcacacatccacacactccctctttcacaaactcacccattcacacactaacccattcgttcacacacccattcacaaacccagtcgttcatacacccattcacacactaactccctcattcacaaactccctcattcacacactaacccactcgttcacacacccattcacatactaacccactccttcacacacccattcactcattcacacccactcgttcacacacccattcacacaaacccatttgttcacacacccattcacacactgacccactcgttcacacacccactcattcacacactaacccactcattcacacactaacccactcactcactggttccctcactcaccaactcgttcacccagtcatctgcatactaattcacttacctgctcatccacccgttccctgactcacccattcacccactcatcattcactcactccttaagcacccattcattcacagctcacccactgtcacccacccattcattcgcctactcatgtactcatttacccctcagccctcactcatcactgtcactcactcattgttcattcacccgttcactcattcacacactcatttacacactaacccactcactgtcatgcattcattcgcctactcatgtactcatttacccctcagccctcactcaccactgtcattcactcactcagtcaccgttccattcatttattcacccgttcactcattcattccctaattcacccactcatccttcacccattcactcactaatttacaccaagtcactcccactcattcagatacaggctggtccagcgacaagatcatctggtagtcaaagtctacactcacacaagaaagaacaaggctcttggtttctgtgacccaggcctctgtccgtgtgtcacctttgtcacccggtctcctgcagtgaagcctttctggtgccagcatggtgggaagactgggccaaacggcaggtagagctgccccaggagcaggctgtgtgccgggagtcctccgaggagcctctgcctccatcttgcctgcagcacagcacggccttccttttggtggcacccatgtcccccgacaggtgtggcccgggagccagagagggacctgatgccatcctgtgctgtgtcccttcccatccaccatgtgccaggcctgctggacatggtacccaacagcttcacacacacaattcgcccttggccccaggccaagctgctgcagcgtaactgacaagacacactgatctttacatgtgggtgtttaatgaacgagaccattcagcactggctcactttttgtgcatatgtgttttttgtagggtttttgacaggggggaggttcctgtgttagtctgtttggcattgctataaaagaatacctggcactggggtatttataaagaaaagaggtttatgtggctccccgttctgcaggctgtacaagcatggtgcccgcatctgctcagcttctggggagacctcaggaagcttccactcaacacaggaggcaaaggaggggcaggcatgtcacatggtcagagcaagagagagagggggaggtgccagttcctttaaaccagcagtccccaacctttttgccaccagggactggttttgtggaagacaagttttccacggacggggtgtggggatggtttcagaatgaaacttccacttccgatcatcaggcattagattctcataaggaacacacaacctagatccctcgtatgcgcagttcacaacagggttcgagcacccatcaggatctaatcccgcctctgatctaacaggaggcggggctcaggcactcatgctcactcaccaccgcccaccccatgctgtgcggcccgttcctaacaggccacaaaccagtagcagtccacagcctgggggttgtggcccttgctctaaagaaccagatctcccacaaacaccgaatgaga

SEQ ID NO: 1194 - DNA, 5114 bp, Homo sapiens
ccctcactaggagatggaaatccaagagaaaacagcccattcctcaacaatgtcgaggtggaacaagagagcttctttgaagggaagaacatggcacttttcgaggaggagatggacagtaaccccatggtgtcctcgctgctcaacaagctggccaactacaccaacctgagccagggcgtggtggagcacgaggaggacgaggagagccggcggcgggaggccaaggctccgcgcatgggcaccttcatcggcgtctacctgccgtgcctgcagaacatcctgggcgtcatcctcttcctgcgcctgacgtggatcgtgggggtggctggtgtcctggagtccttcctcatcgtggccatgtgctgcacatgtacaatgctgaccgccatttccatgagtgcgatcgctaccaacggtgtggtcccagctggcgggtcctactacatgatatcgcgctcgctgggacccgagtttggaggcgctgtcggcctctgcttctacctgggcacgacgtttgcaggggccatgtatattttggggaccatcgagatttttctgacgtacatctccccgggtgcggccatcttccaggcggaggctgcaggtggcgaggcggccgccatgctgcacaacatgcgtgtgtacggcacgtgcacgctcgtgctcatggccctggtggtcttcgtgggcgtcaagtatgtcaacaagctggcgctggtcttcctggcctgcgtcgtgctgtccatcctggccatctatgccggcgtcatcaagtctgccttcgaccccccggacatcccggtctgcctcctggggaaccgcacgctgtcacggcgcagcttcgatgcctgcgtcaaggcctacggcatccacaacaactcagccacctccgcgctctggggcctcttctgcaacggctcccagcccagcgccgcctgtgacgagtacttcatccagaacaacgtcaccgaaatccagggcatcccgggcgcggccagtggtgtcttcctggagaacctgtggagtacgtacgcgcacgcgggggcgtttgtggagaagaaaggtgtgccctcggtgcccgtggcagaggagagccgtgccagcgcactgccctacgtgctcaccgacatcgcggcctccttcaccctgctggttggcatctacttcccctccgtgaccggtatcatggcgggttcaaaccggtccggggacctcaaggatgcacagaagtccatccccacggggaccatcctggccatagtgacgacgtctttcatctatctctcctgcattgtgctgtttggggcctgcattgaaggcgtggtcttacgagataagttcggggaggccctgcaggggaacctggtcatcggcatgctggcctggccctccccctgggtcatcgtcatcggctccttcttctccacctgcggtgccggcctgcagagcctcacgggggcaccgcgcctactgcaggccattgcccgtgacggcatcgtccccttcctgcaggtgtttggccacgggaaggccaacggggagcccacgtgggcgctgctgctgacagtcctcatctgcgagactggcatcctcatcgcctctctggacagcgtggccccgatcctctccatgttcttcctcatgtgctacctgttcgtgaacctggcctgcgccgtgcagaccctgctacgtacccccaactggcgtccacgcttcaagttctaccactggaccctgtcctttctgggtatgagcctgtgcctggcgctgatgttcatctgctcctggtactacgcgctgtccgccatgctcatcgctggctgcatctacaagtacatcgagtaccgcggggccgagaaggagtggggcgatggcatccgtggcctatccctgaacgccgcccgctacgccctgctgcgcgtggagcacggtcccccccacaccaagaactggaggccccaggtgctggtgatgctgaacctggacgcggagcaggccgtgaagcacccccgcctgctgtccttcacgtcgcagctgaaggccggcaagggcctgaccatcgtgggctcggtgctggaggggacgtacctggacaagcacatggaggctcagcgggccgaggagaacatacggtccctaatgagcacagagaagaccaagggcttctgccagctggtggtctcgtccagcctgcgggatggcatgtcccacctgatccagtcggccggcctgggcggcctgaagcacaacacggtgctcatggcctggcccgcatcctggaagcaggaggacaaccccttctcctggaagaactttgtggacaccgtccgcgacaccaccgccgcgcaccaggctctgctggtggccaagaacgtcgactcgtttccgcaaaaccaggagcgcttcggcgggggccacatcgacgtgtggtggatcgtgcacgacggcggcatgctcatgctgctgcccttcctgctgcgccagcacaaggtgtggaggaagtgccggatgcgtatcttcaccgtggcccaggtggacgacaacagcatccagatgaagaaggacctgcagatgttcttgtatcacttgcgcatcagcgccgaggtggaggtggtggagatggttgaaaacgacatatctgctttcacctacgagaggacactaatgatggagcagaggtcgcagatgctgaagcagatgcagctgtccaagaacgagcaggagcgagaggcccagctgatccacgacaggaacaccgcgtcccacaccgcggcggcagccaggacccaagcgccgcctacgccagacaaggtgcagatgacctggaccagggagaagctgatcgctgagaagtacaggagcagagacaccagcctatctggtttcaaagacctcttcagcatgaagccggaccagtccaacgtcaggcggatgcacacggctgtgaagctcaatggcgtcgtcctcaacaagtcccaggatgcgcagctggtcctgctcaacatgccaggtcctcccaaaaaccggcagggagacgagaactacatggagtttcttgaagtcctgaccgaggggctgaacagagtcctcctggtcaggggtggcggccgggaggtgatcaccatctactcctaatgcccaacagcatcacggcactctgggacaggcacggaggacggcgtgggcagcctgggcctgggcttggcccagggaaacagacggcagacacacctgtcccccagtgatgccacccaagctgcccatggggcttcctacggaagtttctaggcccgtcacctagggctctcctgttcagccttaacaggctcagcaaatcagggcgtggctggacgatttccttgcatctgagggcagacgctgctaccggagtgacctggacgtggccagatcttctcgcaggtcacaagaagccagtgagcccttgccttggtttctggaagttcttttccttggctggatttacccagtggttaggttgcatttctaccccatccagaacattcttggaagagcacccggagctgaagctgtccctgatgatgaaggtgaaacgtcagccctggccatggctccgctcagggccccggtcacctccgagtcactctgttccttgactgtctttgtgtttctgtacctcaaggcactgaagctggaggactctgtccatgcccgtgtcaccctcgtgtgggagcctctgggctcggcaggtccacatttcatgagctgaggcgtgggccagggccatctggaaagggaactcggcttttccagaacgtggtggatcatctgtcgggtgtgtggtgaacacgttcagttcatcagggcctacgctccgggaaggggcccccagctgtggctctgccatgccgggctgtgtttgcagctgtccgagtctccatccacctttagaaaaccagccacttcttttcataagcactgacagggcccagcccacagccacaggtgcgatcagtgcctcacgcaggcaaatgcactgaaacccaggggcacacgcgcgcagagtgaacagtgagttcccccgacagcccacgacagccaggactgccctccccaccccaccccaccccaggagcacggcacacagttcagcctctgagctggctcacacgtgccatccccaccccggtgctccagggaaggaggacacggacccgacgtgggaggtcctcaggcagcagtggcgcctggtgtcaggtctgtctggctgagtcccgggcgtcccctgccatggcctgtgccttgcatggaggcggcggtggcactgaagagatagctttcaagggcccaacactttgcacttcggctggctgtgagtttctgctttgtaggttgtggtcacatttgcaggctgcgggcagtggcaccgacttgggcctccctttctatgtggcatatttatttatttaaacaccccagggagttacgtggtaacaaggttgtccataaagaggttgcttctatatactagaggccccagatggccaggccttgggctacgtctggcttgcatggtctcccaagggaatcagccccatcaacaaagttcaaatcggggcagaggctgcacttgtgcccccagatgtttctgaggagccagactagggctggcattgctgtagagtgacggctgctgcccagagcgtgtcccagacatcacagcggggctcagcagttcccacagcctctgcctgccttggctaagcatgagttaagcagcaaaacgctcctccatgtctggatggggccggcaggtcctgtgtcccctgcacctggaggagagcaggctagaggcacagcggccacatggtgctggctctgaacgttggttggtggctggaaaacagccctgcttctgagggccgctcagttctgcacacgaaaccacctcctgagggctcagctctgcccccgccctgggctgcagcctctgcacgcaagcaccaggcatcctttgtgttgtcaactccgtgtaaccagtaactacagccatttacaattgactccgtttccttttgtaggtttccctgtctgtctgtgttagtagaaaaataaaatcctatgaaatctga

SEQ ID NO: 1195 - protein, 1013 aa, Homo sapiens
MALFEEEMDSNPMVSSLLNKLANYTNLSQGVVEHEEDEESRRREAKAPRMGTFIGVYLPCLQNILGVILFLRLTWIVGVAGVLESFLIVAMCCTCTMLTAISMSAIATNGVVPAGGSYYMISRSLGPEFGGAVGLCFYLGTTFAGAMYILGTIEIFLTYISPGAAIFQAEAAGGEAAAMLHNMRVYGTCTLVLMALVVFVGVKYVNKLALVFLACVVLSILAIYAGVIKSAFDPPDIPVCLLGNRTLSRRSFDACVKAYGIHNNSATSALWGLFCNGSQPSAACDEYFIQNNVTEIQGIPGAASGVFLENLWSTYAHAGAFVEKKGVPSVPVAEESRASALPYVLTDIAASFTLLVGIYFPSVTGIMAGSNRSGDLKDAQKSIPTGTILAIVTTSFIYLSCIVLFGACIEGVVLRDKFGEALQGNLVIGMLAWPSPWVIVIGSFFSTCGAGLQSLTGAPRLLQAIARDGIVPFLQVFGHGKANGEPTWALLLTVLICETGILIASLDSVAPILSMFFLMCYLFVNLACAVQTLLRTPNWRPRFKFYHWTLSFLGMSLCLALMFICSWYYALSAMLIAGCIYKYIEYRGAEKEWGDGIRGLSLNAARYALLRVEHGPPHTKNWRPQVLVMLNLDAEQAVKHPRLLSFTSQLKAGKGLTIVGSVLEGTYLDKHMEAQRAEENIRSLMSTEKTKGFCQLVVSSSLRDGMSHLIQSAGLGGLKHNTVLMAWPASWKQEDNPFSWKNFVDTVRDTTAAHQALLVAKNVDSFPQNQERFGGGHIDVWWIVHDGGMLMLLPFLLRQHKVWRKCRMRIFTVAQVDDNSIQMKKDLQMFLYHLRISAEVEVVEMVENDISAFTYERTLMMEQRSQMLKQMQLSKNEQEREAQLIHDRNTASHTAAAARTQAPPTPDKVQMTWTREKLIAEKYRSRDTSLSGFKDLFSMKPDQSNVRRMHTAVKLNGVVLNKSQDAQLVLLNMPGPPKNRQGDENYMEFLEVLTEQRVLLVRGGGREVITIYS

SEQ ID NO: 1196 - DNA, 2509 bp, Homo sapiens
ccctcactaggagatggaaatccaagagaaaacagcccattcctcaacaatgtcgaggtggaacaagagagcttctttgaagggaagaacatggcacttttcgaggaggagatggacagtaaccccatggtgtcctcgctgctcaacaagctggccaactacaccaacctgagccagggcgtggtggagcacgaggaggacgaggagagccggcggcgggaggccaaggctccgcgcatgggcaccttcatcggcgtctacctgccgtgcctgcagaacatcctgggcgtcatcctcttcctgcgcctgacgtggatcgtgggggtggctggtgtcctggagtccttcctcatcgtggccatgtgctgcacatgtacaatgctgaccgccatttccatgagtgcgatcgctaccaacggtgtggtcccagctggcgggtcctactacatgatatcgcgctcgctgggacccgagtttggaggcgctgtcggcctctgcttctacctgggcacgacgtttgcaggggccatgtatattttggggaccatcgagatttttctggtaagcacggaggacggcgtgggcagcctgggcctgggcttggcccagggaaacagacggcagacacacctgtcccccagtgatgccacccaagctgcccatggggcttcctacggaagtttctaggcccgtcacctagggctctcctgttcagccttaacaggctcagcaaatcagggcgtggctggacgatttccttgcatctgagggcagacgctgctaccggagtgacctggacgtggccagatcttctcgcaggtcacaagaagccagtgagcccttgccttggtttctggaagttcttttccttggctggatttacccagtggttaggttgcatttctaccccatccagaacattcttggaagagcacccggagctgaagctgtccctgatgatgaaggtgaaacgtcagccctggccatggctccgctcagggccccggtcacctccgagtcactctgttccttgactgtctttgtgtttctgtacctcaaggcactgaagctggaggactctgtccatgcccgtgtcaccctcgtgtgggagcctctgggctcggcaggtccacatttcatgagctgaggcgtgggccagggccatctggaaagggaactcggcttttccagaacgtggtggatcatctgtcgggtgtgtggtgaacacgttcagttcatcagggcctacgctccgggaaggggcccccagctgtggctctgccatgccgggctgtgtttgcagctgtccgagtctccatccacctttagaaaaccagccacttcttttcataagcactgacagggcccagcccacagccacaggtgcgatcagtgcctcacgcaggcaaatgcactgaaacccaggggcacacgcgcgcagagtgaacagtgagttcccccgacagcccacgacagccaggactgccctccccaccccaccccaccccaggagcacggcacacagttcagcctctgagctggctcacacgtgccatccccaccccggtgctccagggaaggaggacacggacccgacgtgggaggtcctcaggcagcagtggcgcctggtgtcaggtctgtctggctgagtcccgggcgtcccctgccatggcctgtgccttgcatggaggcggcggtggcactgaagagatagctttcaagggcccaacactttgcacttcggctggctgtgagtttctgctttgtaggttgtggtcacatttgcaggctgcgggcagtggcaccgacttgggcctccctttctatgtggcatatttatttatttaaacaccccagggagttacgtggtaacaaggttgtccataaagaggttgcttctatatactagaggccccagatggccaggccttgggctacgtctggcttgcatggtctcccaagggaatcagccccatcaacaaagttcaaatcggggcagaggctgcacttgtgcccccagatgtttctgaggagccagactagggctggcattgctgtagagtgacggctgctgcccagagcgtgtcccagacatcacagcggggctcagcagttcccacagcctctgcctgccttggctaagcatgagttaagcagcaaaacgctcctccatgtctggatggggccggcaggtcctgtgtcccctgcacctggaggagagcaggctagaggcacagcggccacatggtgctggctctgaacgttggttggtggctggaaaacagccctgcttctgagggccgctcagttctgcacacgaaaccacctcctgagggctcagctctgcccccgccctgggctgcagcctctgcacgcaagcaccaggcatcctttgtgttgtcaactccgtgtaaccagtaactacagccatttacaattgactccgtttccttttgtaggtttccctgtctgtctgtgttagtagaaaaataaaatcctatgaaatctg

SEQ ID NO: 1197 - protein, 198 aa, Homo sapiens [sequence omitted]

SEQ ID NO: 1198 - DNA, 4934 bp, Homo sapiens
ccctcactaggagatggaaatccaagagaaaacagcccattcctcaacaatgtcgaggtggaacaagagagcttctttgaagggaagaacatggcacttttcgaggaggagatggacagtaaccccatggtgtcctcgctgctcaacaagctggccaactacaccaacctgagccagggcgtggtggagcacgaggaggacgaggagagccggcggcgggaggccaaggctccgcgcatgggcaccttcatcggcgtctacctgccgtgcctgcagaacatcctgggcgtcatcctcttcctgcgcctgacgtggatcgtgggggtggctggtgtcctggagtccttcctcatcgtggccatgtgctgcacatgtacaatgctgaccgccatttccatgagtgcgatcgctaccaacggtgtggtcccagctggcgggtcctactacatgatatcgcgctcgctgggacccgagtttggaggcgctgtcggcctctgcttctacctgggcacgacgtttgcaggggccatgtatattttggggaccatcgagatttttctgacgtacatctccccgggtgcggccatcttccaggcggaggctgcaggtggcgaggcggccgccatgctgcacaacatgcgtgtgtacggcacgtgcacgctcgtgctcatggccctggtggtcttcgtgggcgtcaagtatgtcaacaagctggcgctggtcttcctggcctgcgtcgtgctgtccatcctggccatctatgccggcgtcatcaagtctgccttcgaccccccggacatcccggtctgcctcctggggaaccgcacgctgtcacggcgcagcttcgatgcctgcgtcaaggcctacggcatccacaacaactcagccacctccgcgctctggggcctcttctgcaacggctcccagcccagcgccgcctgtgacgagtacttcatccagaacaacgtcaccgaaatccagggcatcccgggcgcggccagtggtgtcttcctggagaacctgtggagtacgtacgcgcacgcgggggcgtttgtggagaagaaaggtgtgccctcggtgcccgtggcagaggagagccgtgccagcgcactgccctacgtgctcaccgacatcgcggcctccttcaccctgctggttggcatctacttcccctccgtgaccggtatcatggcgggttcaaaccggtccggggacctcaaggatgcacagaagtccatccccacggggaccatcctggccatagtgacgacgtctttcatctgagtcgcccccactgcactgggcccctcgctctgggtgggagaagacattttgtctgactcaggctcacttctgaaagccgcccgcccgcctgcccgcctgcctgcagtcctcatctgcgagactggcatcctcatcgcctctctggacagcgtggccccgatcctctccatgttcttcctcatgtgctacctgttcgtgaacctggcctgcgccgtgcagaccctgctacgtacccccaactggcgtccacgcttcaagttctaccactggaccctgtcctttctgggtatgagcctgtgcctggcgctgatgttcatctgctcctggtactacgcgctgtccgccatgctcatcgctggctgcatctacaagtacatcgagtaccgcggggccgagaaggagtggggcgatggcatccgtggcctatccctgaacgccgcccgctacgccctgctgcgcgtggagcacggtcccccccacaccaagaactggaggccccaggtgctggtgatgctgaacctggacgcggagcaggccgtgaagcacccccgcctgctgtccttcacgtcgcagctgaaggccggcaagggcctgaccatcgtgggctcggtgctggaggggacgtacctggacaagcacatggaggctcagcgggccgaggagaacatacggtccctaatgagcacagagaagaccaagggcttctgccagctggtggtctcgtccagcctgcgggatggcatgtcccacctgatccagtcggccggcctgggcggcctgaagcacaacacggtgctcatggcctggcccgcatcctggaagcaggaggacaaccccttctcctggaagaactttgtggacaccgtccgcgacaccaccgccgcgcaccaggctctgctggtggccaagaacgtcgactcgtttccgcaaaaccaggagcgcttcggcgggggccacatcgacgtgtggtggatcgtgcacgacggcggcatgctcatgctgctgcccttcctgctgcgccagcacaaggtgtggaggaagtgccggatgcgtatcttcaccgtggcccaggtggacgacaacagcatccagatgaagaaggacctgcagatgttcttgtatcacttgcgcatcagcgccgaggtggaggtggtggagatggttgaaaacgacatatctgctttcacctacgagaggacactaatgatggagcagaggtcgcagatgctgaagcagatgcagctgtccaagaacgagcaggagcgagaggcccagctgatccacgacaggaacaccgcgtcccacaccgcggcggcagccaggacccaagcgccgcctacgccagacaaggtgcagatgacctggaccagggagaagctgatcgctgagaagtacaggagcagagacaccagcctatctggtttcaaagacctcttcagcatgaagccggaccagtccaacgtcaggcggatgcacacggctgtgaagctcaatggcgtcgtcctcaacaagtcccaggatgcgcagctggtcctgctcaacatgccaggtcctcccaaaaaccggcagggagacgagaactacatggagtttcttgaagtcctgaccgaggggctgaacagagtcctcctggtcaggggtggcggccgggaggtgatcaccatctactcctaatgcccaacagcatcacggcactctgggacaggcacggaggacggcgtgggcagcctgggcctgggcttggcccagggaaacagacggcagacacacctgtcccccagtgatgccacccaagctgcccatggggcttcctacggaagtttctaggcccgtcacctagggctctcctgttcagccttaacaggctcagcaaatcagggcgtggctggacgatttccttgcatctgagggcagacgctgctaccggagtgacctggacgtggccagatcttctcgcaggtcacaagaagccagtgagcccttgccttggtttctggaagttcttttccttggctggatttacccagtggttaggttgcatttctaccccatccagaacattcttggaagagcacccggagctgaagctgtccctgatgatgaaggtgaaacgtcagccctggccatggctccgctcagggccccggtcacctccgagtcactctgttccttgactgtctttgtgtttctgtacctcaaggcactgaagctggaggactctgtccatgcccgtgtcaccctcgtgtgggagcctctgggctcggcaggtccacatttcatgagctgaggcgtgggccagggccatctggaaagggaactcggcttttccagaacgtggtggatcatctgtcgggtgtgtggtgaacacgttcagttcatcagggcctacgctccgggaaggggcccccagctgtggctctgccatgccgggctgtgtttgcagctgtccgagtctccatccacctttagaaaaccagccacttcttttcataagcactgacagggcccagcccacagccacaggtgcgatcagtgcctcacgcaggcaaatgcactgaaacccaggggcacacgcgcgcagagtgaacagtgagttcccccgacagcccacgacagccaggactgccctccccaccccaccccaccccaggagcacggcacacagttcagcctctgagctggctcacacgtgccatccccaccccggtgctccagggaaggaggacacggacccgacgtgggaggtcctcaggcagcagtggcgcctggtgtcaggtctgtctggctgagtcccgggcgtcccctgccatggcctgtgccttgcatggaggcggcggtggcactgaagagatagctttcaagggcccaacactttgcacttcggctggctgtgagtttctgctttgtaggttgtggtcacatttgcaggctgcgggcagtggcaccgacttgggcctccctttctatgtggcatatttatttatttaaacaccccagggagttacgtggtaacaaggttgtccataaagaggttgcttctatatactagaggccccagatggccaggccttgggctacgtctggcttgcatggtctcccaagggaatcagccccatcaacaaagttcaaatcggggcagaggctgcacttgtgcccccagatgtttctgaggagccagactagggctggcattgctgtagagtgacggctgctgcccagagcgtgtcccagacatcacagcggggctcagcagttcccacagcctctgcctgccttggctaagcatgagttaagcagcaaaacgctcctccatgtctggatggggccggcaggtcctgtgtcccctgcacctggaggagagcaggctagaggcacagcggccacatggtgctggctctgaacgttggttggtggctggaaaacagccctgcttctgagggccgctcagttctgcacacgaaaccacctcctgagggctcagctctgcccccgccctgggctgcagcctctgcacgcaagcaccaggcatcctttgtgttgtcaactccgtgtaaccagtaactacagccatttacaattgactccgtttccttttgtaggtttccctgtctgtctgtgttagtagaaaaataaaatcctatgaaatctga

SEQ ID NO: 1199 - protein, 499 aa, Homo sapiens
MFFLMCYLFVNLACAVQTLLRTPNWRPRFKFYHWTLSFLGMSLCLALMFICSWYYALSAMLIAGCIYKYIEYRGAEKEWGDGIRGLSLNAARYALLRVEHGPPHTKNWRPQVLVMLNLDAEQAVKHPRLLSFTSQLKAGKGLTIVGSVLEGTYLDKHMEAQRAEENIRSLMSTEKTKGFCQLVVSSSLRDGMSHLIQSAGLGGLKHNTVLMAWPASWKQEDNPFSWKNFVDTVRDTTAAHQALLVAKNVDSFPQNQERFGGGHIDVWWIVHDGGMLMLLPFLLRQHKVWRKCRMRIFTVAQVDDNSIQMKKDLQMFLYHLRISAEVEVVEMVENDISAFTYERTLMMEQRSQMLKQMQLSKNEQEREAQLIHDRNTASHTAAAARTQAPPTPDKVQMTWTREKLIAEKYRSRDTSLSGFKDLFSMKPDQSNVRRMHTAVKLNGVVLNKSQDAQLVLLNMPGPPKNRQGDENYMEFLEVLTEQRVLLVRGGGREVITIYS

SEQ ID NO: 1200 - DNA, 5111 bp, Homo sapiens
ccctcactaggagatggaaatccaagagaaaacagcccattcctcaacaatgtcgaggtggaacaagagagcttctttgaagggaagaacatggcacttttcgaggaggagatggacagtaaccccatggtgtcctcgctgctcaacaagctggccaactacaccaacctgagccagggcgtggtggagcacgaggaggacgaggagagccggcggcgggaggccaaggctccgcgcatgggcaccttcatcggcgtctacctgccgtgcctgcagaacatcctgggcgtcatcctcttcctgcgcctgacgtggatcgtgggggtggctggtgtcctggagtccttcctcatcgtggccatgtgctgcacatgtacaatgctgaccgccatttccatgagtgcgatcgctaccaacggtgtggtcccagctggcgggtcctactacatgatatcgcgctcgctgggacccgagtttggaggcgctgtcggcctctgcttctacctgggcacgacgtttgcaggggccatgtatattttggggaccatcgagatttttctgacgtacatctccccgggtgcggccatcttccaggcggaggctgcaggtggcgaggcggccgccatgctgcacaacatgcgtgtgtacggcacgtgcacgctcgtgctcatggccctggtggtcttcgtgggcgtcaagtatgtcaacaagctggcgctggtcttcctggcctgcgtcgtgctgtccatcctggccatctatgccggcgtcatcaagtctgccttcgaccccccggacatcccggtctgcctcctggggaaccgcacgctgtcacggcgcagcttcgatgcctgcgtcaaggcctacggcatccacaacaactcagccacctccgcgctctggggcctcttctgcaacggctcccagcccagcgccgcctgtgacgagtacttcatccagaacaacgtcaccgaaatccagggcatcccgggcgcggccagtggtgtcttcctggagaacctgtggagtacgtacgcgcacgcgggggcgtttgtggagaagaaaggtgtgccctcggtgcccgtggcagaggagagccgtgccagcgcactgccctacgtgctcaccgacatcgcggcctccttcaccctgctggttggcatctacttcccctccgtgaccggtatcatggcgggttcaaaccggtccggggacctcaaggatgcacagaagtccatccccacggggaccatcctggccatagtgacgacggctgtggatctctcctgcattgtgctgtttggggcctgcattgaaggcgtggtcttacgagataagttcggggaggccctgcaggggaacctggtcatcggcatgctggcctggccctccccctgggtcatcgtcatcggctccttcttctccacctgcggtgccggcctgcagagcctcacgggggcaccgcgcctactgcaggccattgcccgtgacggcatcgtccccttcctgcaggtgtttggccacgggaaggccaacggggagcccacgtgggcgctgctgctgacagtcctcatctgcgagactggcatcctcatcgcctctctggacagcgtggccccgatcctctccatgttcttcctcatgtgctacctgttcgtgaacctggcctgcgccgtgcagaccctgctacgtacccccaactggcgtccacgcttcaagttctaccactggaccctgtcctttctgggtatgagcctgtgcctggcgctgatgttcatctgctcctggtactacgcgctgtccgccatgctcatcgctggctgcatctacaagtacatcgagtaccgcggggccgagaaggagtggggcgatggcatccgtggcctatccctgaacgccgcccgctacgccctgctgcgcgtggagcacggtcccccccacaccaagaactggaggccccaggtgctggtgatgctgaacctggacgcggagcaggccgtgaagcacccccgcctgctgtccttcacgtcgcagctgaaggccggcaagggcctgaccatcgtgggctcggtgctggaggggacgtacctggacaagcacatggaggctcagcgggccgaggagaacatacggtccctaatgagcacagagaagaccaagggcttctgccagctggtggtctcgtccagcctgcgggatggcatgtcccacctgatccagtcggccggcctgggcggcctgaagcacaacacggtgctcatggcctggcccgcatcctggaagcaggaggacaaccccttctcctggaagaactttgtggacaccgtccgcgacaccaccgccgcgcaccaggctctgctggtggccaagaacgtcgactcgtttccgcaaaaccaggagcgcttcggcgggggccacatcgacgtgtggtggatcgtgcacgacggcggcatgctcatgctgctgcccttcctgctgcgccagcacaaggtgtggaggaagtgccggatgcgtatcttcaccgtggcccaggtggacgacaacagcatccagatgaagaaggacctgcagatgttcttgtatcacttgcgcatcagcgccgaggtggaggtggtggagatggttgaaaacgacatatctgctttcacctacgagaggacactaatgatggagcagaggtcgcagatgctgaagcagatgcagctgtccaagaacgagcaggagcgagaggcccagctgatccacgacaggaacaccgcgtcccacaccgcggcggcagccaggacccaagcgccgcctacgccagacaaggtgcagatgacctggaccagggagaagctgatcgctgagaagtacaggagcagagacaccagcctatctggtttcaaagacctcttcagcatgaagccggaccagtccaacgtcaggcggatgcacacggctgtgaagctcaatggcgtcgtcctcaacaagtcccaggatgcgcagctggtcctgctcaacatgccaggtcctcccaaaaaccggcagggagacgagaactacatggagtttcttgaagtcctgaccgaggggctgaacagagtcctcctggtcaggggtggcggccgggaggtgatcaccatctactcctaatgcccaacagcatcacggcactctgggacaggcacggaggacggcgtgggcagcctgggcctgggcttggcccagggaaacagacggcagacacacctgtcccccagtgatgccacccaagctgcccatggggcttcctacggaagtttctaggcccgtcacctagggctctcctgttcagccttaacaggctcagcaaatcagggcgtggctggacgatttccttgcatctgagggcagacgctgctaccggagtgacctggacgtggccagatcttctcgcaggtcacaagaagccagtgagcccttgccttggtttctggaagttcttttccttggctggatttacccagtggttaggttgcatttctaccccatccagaacattcttggaagagcacccggagctgaagctgtccctgatgatgaaggtgaaacgtcagccctggccatggctccgctcagggccccggtcacctccgagtcactctgttccttgactgtctttgtgtttctgtacctcaaggcactgaagctggaggactctgtccatgcccgtgtcaccctcgtgtgggagcctctgggctcggcaggtccacatttcatgagctgaggcgtgggccagggccatctggaaagggaactcggcttttccagaacgtggtggatcatctgtcgggtgtgtggtgaacacgttcagttcatcagggcctacgctccgggaaggggcccccagctgtggctctgccatgccgggctgtgtttgcagctgtccgagtctccatccacctttagaaaaccagccacttcttttcataagcactgacagggcccagcccacagccacaggtgcgatcagtgcctcacgcaggcaaatgcactgaaacccaggggcacacgcgcgcagagtgaacagtgagttcccccgacagcccacgacagccaggactgccctccccaccccaccccaccccaggagcacggcacacagttcagcctctgagctggctcacacgtgccatccccaccccggtgctccagggaaggaggacacggacccgacgtgggaggtcctcaggcagcagtggcgcctggtgtcaggtctgtctggctgagtcccgggcgtcccctgccatggcctgtgccttgcatggaggcggcggtggcactgaagagatagctttcaagggcccaacactttgcacttcggctggctgtgagtttctgctttgtaggttgtggtcacatttgcaggctgcgggcagtggcaccgacttgggcctccctttctatgtggcatatttatttatttaaacaccccagggagttacgtggtaacaaggttgtccataaagaggttgcttctatatactagaggccccagatggccaggccttgggctacgtctggcttgcatggtctcccaagggaatcagccccatcaacaaagttcaaatcggggcagaggctgcacttgtgcccccagatgtttctgaggagccagactagggctggcattgctgtagagtgacggctgctgcccagagcgtgtcccagacatcacagcggggctcagcagttcccacagcctctgcctgccttggctaagcatgagttaagcagcaaaacgctcctccatgtctggatggggccggcaggtcctgtgtcccctgcacctggaggagagcaggctagaggcacagcggccacatggtgctggctctgaacgttggttggtggctggaaaacagccctgcttctgagggccgctcagttctgcacacgaaaccacctcctgagggctcagctctgcccccgccctgggctgcagcctctgcacgcaagcaccaggcatcctttgtgttgtcaactccgtgtaaccagtaactacagccatttacaattgactccgtttccttttgtaggtttccctgtctgtctgtgttagtagaaaaataaaatcctatgaaatctga

SEQ ID NO: 1201 - protein, 1012 aa, Homo sapiens
MALFEEEMDSNPMVSSLLNKLANYTNLSQGVVEHEEDEESRRREAKAPRMGTFIGVYLPCLQNILGVILFLRLTWIVGVAGVLESFLIVAMCCTCTMLTAISMSAIATNGVVPAGGSYYMISRSLGPEFGGAVGLCFYLGTTFAGAMYILGTIEIFLTYISPGAAIFQAEAAGGEAAAMLHNMRVYGTCTLVLMALVVFVGVKYVNKLALVFLACVVLSILAIYAGVIKSAFDPPDIPVCLLGNRTLSRRSFDACVKAYGIHNNSATSALWGLFCNGSQPSAACDEYFIQNNVTEIQGIPGAASGVFLENLWSTYAHAGAFVEKKGVPSVPVAEESRASALPYVLTDIAASFTLLVGIYFPSVTGIMAGSNRSGDLKDAQKSIPTGTILAIVTTAVDLSCIVLFGACIEGVVLRDKFGEALQGNLVIGMLAWPSPWVIVIGSFFSTCGAGLQSLTGAPRLLQAIARDGIVPFLQVFGHGKANGEPTWALLLTVLICETGILIASLDSVAPILSMFFLMCYLFVNLACAVQTLLRTPNWRPRFKFYHWTLSFLGMSLCLALMFICSWYYALSAMLIAGCIYKYIEYRGAEKEWGDGIRGLSLNAARYALLRVEHGPPHTKNWRPQVLVMLNLDAEQAVKHPRLLSFTSQLKAGKGLTIVGSVLEGTYLDKHMEAQRAEENIRSLMSTEKTKGFCQLVVSSSLRDGMSHLIQSAGLGGLKHNTVLMAWPASWKQEDNPFSWKNFVDTVRDTTAAHQALLVAKNVDSFPQNQERFGGGHIDVWWIVHDGGMLMLLPFLLRQHKVWRKCRMRIFTVAQVDDNSIQMKKDLQMFLYHLRISAEVEVVEMVENDISAFTYERTLMMEQRSQMLKQMQLSKNEQEREAQLIHDRNTASHTAAAARTQAPPTPDKVQMTWTREKLIAEKYRSRDTSLSGFKDLFSMKPDQSNVRRMHTAVKLNGVVLNKSQDAQLVLLNMPGPPKNRQGDENYMEFLEVLTEQRVLLVRGGGREVITIYS

SEQ ID NO: 1202 - DNA, 28126 bp, Mus musculus
tgtagtaattcatctaaccctctgtgttaactttaaatttttttctccatttataaataaaaagcaatggtcagagtcaaatagactgaactgtttctgtgtaatgaacaagatgaattagtctataaaacataaagctgatataaagtcttttcctggctgccaacagtttataaatgtttacaggagcctcgggaagaatatagactcaggatttacttctggtcctaagtgaccttactacaggtgcttggataagctcttcaatctctctggatccccgggtgtcatctctagtacaagagaagggatatgaagcagacattctctacatttctttaagctcttctctgattttacaatgggctaaaacatagccttccttgagagtgaaataccttcagttcttcccgcttaaaaaacaaaacaaaacaaaataaaaatagtgtttttattttgtgatattttattcattctgaggccgttatggtcatgccttaaattagagttatcacaggctttggttccatacagatttctgaaaaatgatttatagcttagttttatgacataaaaaatgcataagaattaatgattgccaaagcccctttaccccagtagatctaacttaagcagctttttggcttctactaatgcaaaacacagctataatatcatgaattacttactgatttctctggaagaaataatgctacgatggttgtgcttagggaaacacttcctgcacaaaatcgcagactttttcttccttccatgtttgacaaagacctgagttatatatgaattcactcagggttttctccacaatgtgaagtaagtgggcaatgttttccctagaaaagatttatttcaatatcagaaaaaatttttatacaatgtgaaatacaactctgttcatggctttgattgccaacacttggatgggtccttctggaagtatctgcagctctaaacacctgtgctttgtactgtccctaccacagcacaccccatgtgatctcatttcaaactgggacagctgttaatcatacacaagcacttgctttaccctagtttgtcattaaatcctttcctggtttgtgagataagtttatattagaatttacttggatggttttaaagagctcactgtgaatcctggacctggaaacacaccatatctgtctttctaggaatatatgctaatggaaggtaatgtttcaaaatataacacttgtgaaattcataagtcatgactcctgacatgttcaaataagaataggtttagtcaaagaatacacatggagggacccatggctccagccgcatatgtagcagaggatagccttgtcaagcatcaatgggagtagaggcccttggtcctgtgaaggctcaatgccccagtgtaggggcataccagggcagggaggtgggagtaggtaggtgggtggaggaacaccttcatagatgcaggggtaggagggatgggataagggtttgggggggcaaaccaggaaaggggataacatttgagatgcaaataaagaaaatatccaataaaaaaaaagaataggttagggctgtttgtttttgttgtttttaatcttcactgggaagagacttaataaagcattacctagatcatgctctcttatagacaactctatagaagattgtcttaattgctaattaatgtagaaagagccactctattgtgctaccagtcctggaacaggaggttcctgaatagtagaagagataagagagcaagaagagagaaagaaaggatacaactatgcaatttatttgctcttgactgtgggtgtgatgtgactaattgaattcttgccctgacctccctgaaaccacagcctatgacctggaatgataagccaaataaaaccttttccccaaagttgctttctatcagagaatctgtcatggcaacagaaaggaaagtaggataaccgatgagacaaaacagctagaaaaatgtctagctgagactgtggaaagacacattagatcactaactccaagtatttgttgactaccctggggcatagggccacaacacaatcaggggccttctcttccattgatgagagataaggccatcctctgctacatttgcagctagagccatgggtccctccatgtgtatgctttagtgtctgtgtttggtgactgtatatggaatggagtcaagtttgatttgtaagaaatatcttaaacagaattcagcaagtcagcaaaattttaaagaattatatttggatttcgtggtaatatttctgacattattaaatactaggtcagtgccagtgggttgactatttaaagttatacttgtatgtgtgtgtgtgtgtgtgtgtgtgtatgtgtgtgtgtgtgtgtgtgtgtgcatgtatgtgtgtttgatgctgtgtatgaaacacaagactttgaacatgctagataaattctctgtcactgagctgtatccaccagaccaaatgctcaaactttttcattaaattaccagttaattaaatacagtcttaaatgtgtaattcttatgattggcctccgttctgatccataagatcaaactgatgtctcagttcttttctatgtcttgggttactaagtgagaatgtaaaagaccatttggtctttaagaagataggaaatatacatctcctcatggaacattggtaatgacttttctcattggacctcatttctttttgtaattctcaatgtcaagtgtcttggaagacactgcagcttataaaaaaaaaatagctggcctgcattatgcagaacaggaatcccatgtctataactataccagatacctcagacttagactattcattggctcactatgctgtccttctttgaaaaaaaaaatcattttagaaaaagcatattctttcaaccctgggttgaaaggctggggataaaatgaatcccaattgtactgaaccagtgtcacaaccatgagcataacattaagggcaacatacagatctttactccttagattatcaatacaaatcatttgaagatgtccataaaagttgttgaagtctcctaaatttcctttaacatttctacagtcatatttgtaagaaagcaaatctgataataaaatctttaataaaatatttatatttttatgttatatgtatgcacatttcgtctgcatgtatgttatgtgcatcatgtacatgcctggagccaatgaagggcagaagaaggaatttggttcccgcagtcctctgcaagagcagggcatgctctttaccgctgaaccattctctaaaccctctgatgatattactccaagtctttaacgacacggccaatgaaacaatacatgtatagtgcttaggtcccaaattcatattttgtcagttctgtagctatcaagaaccccactcctgtcattcagaagaaaaccctcttctagtcacaactctcaaaagctttttccagggaaattaaaggctgccattatttgtatctcttcctgggttggttctacccctctccacatggttttgcctctgtttttgtgccatcaaagctgtccctgcctctgagctgtaatgtacagagcagtgggtggtccttgcactggcggaaaattcacatgctggaaaatcttatgccagggtcccagcctagatctatggagtagaagaacctaccaatctgtgtttaaacatgctgtccaggttgctaaggcggtttgagtttggagaccacaatggtaaattagttaacctgccaccatagtgatccagctgacaggacacagatttactagcctttccctaaaatgccaacaccctgtgagcactaaagcagtttgtcccaataaacaaataaaaatctaagagtccggagtgcaactgactttcctgtattgtttagttatccagcatcaggggtgcaaaccctggttcttctgcttttgcatagctattgcttaattcacttccaaatttcatgacctcaagtgtgaccttgcagttcctttgaaaaacatgtggtaagtagaaacaggaattaagggaaggagaagctaactaaaaaaaacaaaaaacaaaaaaacaacaaaaaaaaccaactccccaaaatttaatatcacatatattattttgagctacactcaacatagtgattacttacacattatttcaaaagaaattaattgttgaattagcctaatacactatctcagacaggtcaaaaacatgttctcattgctactgtatgcaaaataaattttagagtgcttgtaatccaatatgacagatgtgactccaaaataaatgatattttattttgattaaaacccagacaggttcaaactggtagtaaactaacagacagtaacatgcccagctccctttcatagggcaataatctttttgatcttttttttatatcaaatatttatggaatattttggtgacacagaacatccaagattttggtgagagtttttaactctacaggctctgaatgatgttttttttttaattattatcatataatcatcaaagggaaaataacagcactagagactgctccagacaataggccagctgttcagacagtcatggtaatggagagaaggattatgggaactggggtcaactctgtgacaaaggtaactgaggttttttttaaaggaagacagatagggtctgtattagtaccttttctgttgctatgacaaaatacctaaaactgtgtaccatgtaaggaataaaggtttatttgactcatcattccagggggcagagagttcaatatcaaggtacagacatctgtcaaagcctccttgaggcatcattggtgaagaagaacagattagctcaggtctctctgtgtatgtagccatgaatgccaccacagaaacctaccttaatcgtgggtctctatttagccataaatgtcatcatataaatctacctcactttcatgactctatcgaaacctttggtatattactaatagcagttttatttaataaagcttaacactgtagaaagagtaaaggctttgtatccaaatatcaaatcaactatattcaagacagtatatgcccactaatttatataattttgccaaagctttctccagcttgcaaataacacaaagcttaactctgatatattttgttaaattaattgggaatttgagtcatatataagagtacaaagcccacgaggggcctttataacagctttatttgtgttacctattattttcaaataaatttaagggagttggagatacagcttaatggcaacatacaaatattttgttgtcttccactgatcaaaaatgaacattgcttaaattaaagatcctacatgaaaaataaccgtttaacaccatgttcaaaattcctctacttataattatattaactaatagttgagcatatattcaaaatttattaaaaagaccctctagatttacaataacttacttataactgatatcaaatataccttaaaattcattttttctttgaattcattttgaagttatttttaatttcatgtttcttttagtgagatatgaacttatttattcataatttcacaaataggactcctagcaaaaacaaaaattgtagattttagaaatgcccccattttgccatgcacagtcaattgattctcttggcattcttgactatctaccaagtgtatattatgaacaacatgtatctattacggttctttaatgaatatgaattatacaggagataaatcccagtgtgattcttaggggaccaaatgcatagccatgacctgctgcatacttctctgtgtgcctacttaagctctgatgtacacaactgaaaagtgagggtgaccaaggtgttcttccatgttagcatagagtagatcagtttgaggctctacaattacaattacaatgggaaagagggagagatttaactttaaaagatttaaattgtaatgccattaaactaaacatgacatatttcaaaatattgattaaaactagcaaagtatctaagtattttaaatgtccttgggcttggtaatagatatctttaccactgagccatttgtccgagtctccaaagcttttactagaaataattgtagcatcatataggttgcaaaaatggagagaggtcccatatacccttcactcactcttaagcaggagactctttcaaatggcattgcattttatgtagacacatacaaatataatagtagctgatctaacgaagctcaaaaatttctggagttcctttccaagaatgatccatatatatctatatctatctatagctacatctacatctatcaatctatcaatctatcaatctatctatctatctatctatctatctatctatctatctatctatctatctatctatctatctatctgagacacctgcagacttggttcctcccaaagaggtgtccacatacacaggtgcttgcaataaatgcagccactgtctgggtcctatgaagctttgaaattatgaattggtgacctgtggtacaacccagacttactttcagaattcaaaagggcattaaatcacctaagtctttccttttgttctattttgaaagaatagcaaacttcctttgaaggcaaaggtaaacttattctgatataatcattaagcaatacacatacattcttgagcatcatatgatggcccttaaatatgtacattttaatgtctcaattttaaaatgctttaaagtaaatatttatatgcttgcccaaactagatataaagttaaaagggggggggtgtcagtcctttaaacactgagttcccatttgaggtaaaacacagagttccaagtgtattttagcagattctctgacacgttgtgtgccagagtctccaaagagccagccatggatttggtgatattcataccatgttgtttcctttattcagcttggtctcattttttttgttttttgttttgttttgttttttgagacagggtttctctgtgtagccctggctgtcctggaattcactctgtagaccaggctggcctcgaactcagaaattcacctgcctctgcctcccaagtgctagaattaaaggcatgcgccaccatgcccggctttgcactcccttctttagaggcacagaggcttaaatttttttttttttttttgttttttttttttggtttttttttttttgaggcttaaattttttacatcacatcggaatgccacgtgctgtctagttagtatcttctccttgtcataagtttattaaagtttaccccccctctgaaactctgaaattttcccaagtggcaccccaatatcattgggagaatagcatgttgtcatttaataatgagttatattgctaaatggtttctttagaaaccaattgtaggaaggagaaagagaaggaaaatgaaaataaccagatgtgaagagagaagccacaggactgaacttgtcttgaccttgtatgtgagctatataaattatctttatcatttattttctaatctataactgatgacaagaatggcaatacctccttgatgaacagttatagatattacagtcattcaccacaagagagcactttttaaattattcaaatgaatatgtgtatgagtaccctgagggcaacaaccagcatagggtaatgtaaaagtaaattttattcacctgatgtaattgttgtctgggaggcttattgccttcatctgctaggcctagaatgtttgcagcctctgagatttgttgctgaataagctcacccttccttgttctttctaagctctacttggctggttcaactcagatgttccggatcaaagtcctctctcccagatgacttattcaatttggcttttttgcgttgctctgcttggcatcaaactaactctagcaatcttttataatattctagctccttctcattctcttgctcattctgtctttccctgtgtctagcttgttctctcttcaatcagtctctataaaactctcccagtaaaactgcctcctctctctctgagctgctctaactcccactctactgcactggtctccacgagctctactgtatcctatactgcactctcttcctcctgtactgcctgctctaccttaagtcacttccctttgctctctcttctcttgagagttgagcatattctgtcccatcaaactgttctttgatccatcacttgttcatccactcaatttgacatcactttcaaacatgggtggttccttctacaaactctctttaccttcatcgtttgggattaaaggtaaatactaagggcttgtctgtattccagtattccaggcagagggattaaaggtgtgtgctaagggctgagccacactctaactagaaataggttcaaatatcctgtaacaggtaataaatattaatgatgtaaacattgtcccaaagtgcaccttagaatctggccttgcaaatgcagtgggatgtcacattaatgaagattgtgttgtatgaggctagacatttcctctacacatggatagaggttttcctgcacaagtctcctttaatgtcaacttacttgttctctcatttcttctagcttttagtagtctaacctggaaaagaaaaggagagaaaacattcaagttctgagtataagccatttgttccgttgtggggaaaaaaatctgaggatacattttatatgctacatttaagatggtgtgtgttatgttaggtgatacacattatgtgggaacttacgatttccttccaccacattatctggctaagccaatgaaagttttatctgatgtatggagaagtttcataactttgggaagaagttccaagtttcagaactattaggagaaaacttgcctctaataataacagaagctctgagatctaggcaaattataatcattgttttatggaccatcttcactgcaagattctgtgaggaaatattatgttggccacttttcaaatgatgctgagatgtggggcagtctcttgacttctgtgggcacttcccaatagatgcagagccatgagtcaaatgcatataccccatttccaatgttacactctcttcactgtcctgctcatccagcctgagcaagctctcttgcaagtaatgaagtcagttttattctgagatcttcttaggcaaaacaggtgggcttttgcattctggatcaaatgacttttcccacatatgcctataaacttttcaaagaatatcatcgttgcatacaccaaactctgccttttactggaggaagtggtcttgtttgctaattactacttctgtccattttcccttccttctagaaaaagcgataatcccttaacctggagtattgtatctgcttttgtaagatggtgtggatgctgagacacgtctctctgtacctcagaatgtcaacacgttggccaaagaaatgaatttatcagttaaaatgcagccaagggatttagtttatctagatgtgctccaaaggaaaaatagtttaccattgtttttacagattgaggtaaatctgacagatctttgacatatgctacggatttaatttaataccacagtacagatgtaggctctgataagtttttttttttttttaaatctaggctaagatgagtagagtagtttcaatatttatggggttgaaattgcagagattgcaaaggaagcattttaattaaaacagcattctcctgtatatgctcagattctgtacaaatggagggacaacctctcaaagcctcactcctggtttgctatactccctggggttttcaacacgttcaacagttttggctcagtttggctatcccattgtttgtcttttgccttgaggataatagaaaatgaactttatcatttgttttgatttttaccttctcccagctaaacatgatgaccctttacagctcatctttgtgattgtgtgttttaggtgtcctggagataacatcagtggaaatcggagttgttgccgtcaaagccatcaacagcaactattacttagccatgaacaagaaggggaaactctatggctcagtaagtagcctgattttgttttcaaagcacattgtattgttagtaccaaagatttggatggtttcctagagaagacactgaatggctttgctgtcatttgatcgctactaataggattcgcagcatctcaagggctggcaaacagcttgttcaactctataatctcccgaactgtttgccaatgagtctactaaacaggccattactaacatttgtgaatgttcagaactgcaagccaatcaggctttcacggaagcatctggatgaaatagtgtagagactagagatgacaacttggagaagaatcacttaaaacaaaaacattgggtggaatggaagatcatgcactatgagtatctgccatagctgaaaagtaaaaccacagctcagatgctgtgtactttgttaaaatcataaataatgaaacatacctaggaatttcacatacctaggtaatagtgttaaattttaattatgcatgaacattatagacattatgtaaaaacaaaatactgtcctcacaatagggtctacttctaccaaaaaaaaaaaactacatgtaataataaaggatactcttttagtaaggtcctcatgtgccttgggtagactgattagtgttaagtactttgaatatgttaatatttgaatttgaatattagtgttaagtactcttcaatttcaagttcagttcatttagaaaaagtctttttgactgaaacctcacataaaataataagtatttagaattaaaatcacagtcataattaaaacagtatcattcatggtatatgatttaaacttttagaagaaatgtcttaattaaacatgtgggtagctactgtgtgccagatactggttatcctgcctcccaaggatatataaggaagaagtttagaataacacatggtgatgtacaactctggtcacagcacttggaaggctgaggcaggaagatcacatattctgtactagtgtagatacatagaagaacttatttccagacaaagcaaaacaactccttcattcatgtgaatgcacacatatacacacatacagagggagagattgagagagaggagcaatctttgacttcaagcattttatactatataggggaaactgtcaacaaatacaaaatagttatagaacaactagcttgtattgtaagaaaagactgttagtagtacagtagccttgtgatgacggcagaactctgcttcaatctcttaattgccattttaagtataatacaagcaggacaattaatgactatggatatgtcttgcagttttgatcccagcactatactaaaaatcactaaatgaatttaaatttttctaaattccactatagaggaatatatggaatatagatacataaacttttaattatatttttggagaatatatagtaacatttgacacaggtatttaataagcacatcattttctagcgagatattttatattttcacatttttcatagatatcaaaaattaactttcaatatgtaaatttactttcttaattagtataagggtggtcagtagttcttaaacgtgagtaagcttcaaaatcagtgcgaggctttgttaaacagcataatgatggaacacagtcccacactgtctgattcaagtttaaggactaaggatttatacattcaatgaggtgcccactgctgtctgtgttattggttttgagttgagaaccatacgtcttgaaatgatctagctttgttttttattcatatcagctctgctgttaaatgacaagccagtcataccaggacaaatcctggtatgagggccacaggaattttaattcaatttcttcattgcatattattcccccaagaagcctaaaaaggcagtaaaacatttttaaaaacagctctatttagggctttaaattcttaccacttttgaaaaaatagtgtttttgcttttgtttttattaagcatgtttagggccttgccagatggcccagcctgtaaatcttcgttctcccaaatctaacaacctgggttcaatctccagaactcatatggtaggacaatgatgactcccacagtggtcttcctgcttacacacactcatttatttgcccccaccatacacactcatgcaggcacgcacacacacaaacacacagatgcatacatactaccaccagcaccaccaccaccaccaccaacaacaacaacaaaataaacaaatctgcttataatttttatttcaaagtgtcataggcatggagagatgatggctcagtgtttaaaaacacttgctgctcttgcagaggacccaaattcagttatcagtaaccacatgatggctcacaccataggttattcctgttccaagccataaaatactctattaacatccttaggtaccagacatgcaggtagtaatcagaaaaatacacaggctgaacatccatacatgtaaaataaatcacttttaaagtaaacaaaacaaaacaaacaaaaacaaaatatgtctgaatccagacagtggcctgcacattaattttcagcgacctaaggctaaggtaagaggacaactttgaatctacaaagcaagaggtcttggtcttttaaaaatatcaactaaacaaaaagtcccttcttgttccactatatcagagtcaggatgtaagagtgtattcgtatactctttgaagaggtacttaaatgtacacattagccaaagctaacataatacagaatcatctaatataagttagcttaagaaaataaagtatacaatttaagttgtgagaaaagattaagccaattttaatcataaaacatgcttcttttacaatgtggtatcaagagagtaataacccactctcaaatgaactatgacattaaaaaatgacattttcttatcagttacccattcccttctatgctgacatacctcctgtgctttgtggttgcctcatgttgagctatattctctataagtctcttcattcaacctgttcgtttgaacttgttccccaggtactctatcctattaccatattacctagatattacctagataggctcactgtctgaaatgactattatctggtgtttctatcatcggtgtgtttgctgccaacctcctactaccaggttgtaaccctgaagaaggctgaattagccacctctctcactatgtacacaacatctgcacacaacatctagatccactcggtttccagagcacaacaatgcaaaaacttatctacctcccagtagctccattagaaaacatgttctctgcttctagcccatataagaactaaatatctaaagactatactgctaaaaatcaatactgcatactagtatgcatctacacgccaggagataacactgatttttgtattattatttccaaaatgatttctattgattacagaagcctgcctggaagaatctctgagcaaacacacgagtgattggtgaaactttctctgtattattctccttgaatattttcttctgttcatttatggggaatgtctatctttctttcattttcagagcaatactatcctatgttccaaggtttctgttgaatgatagacctgagcaagtcttgaggatgaattagtctggtcttcaagcatcatgattgaagaatcaaatcaatgcctcagatgagcacagaaaatccaaaacctttccttaatccaccctaattcaatttgggatcttgttttacctaattctttgaaaggatttttattctttaagaattactcacaatgcagtgtgatctttttcaccaactcctggccctgtcgccatcaagatacacttccacctccttactatctcaattcaatttggtgctacctactttttaaataactcatgggttcaattttatgctgtttaaacattcctaggtgtagactcacctactagtgtggtagacataccagcatccacacccttaatagtaaactcgctcccctctctggaagccatcagctgtccacagtatcttggttagggatgaagcccattaatgacttcctagtccatgatacagttgactgccttgatctgatgtagttttgttatcacaggtgtggtgcatccttgattgcagtagtcctgccatgtccagcagtcagttttctcttattccctctgacctctgacctttacagtctttctcccaactcttacatgatactatgatactcccagatccttatgaaggtgggagtaagatacagcagactaatgagtccatgacatttactctccactgacatgttgtcaactaccatccaatacaatacacaatgaaacgtctctggtgagatctaaatggtgtgctaatccaccagcagagagacagagatttacaggaaagtttgatgttttgttcatttcacaaattaatagcaataggtacagtcttgggtcccatgcgctccccaattatgaatccttaaccagatttatagtatcaagtatatgtttcctcctgcgaaataggccttaagtttaatcagaaagtggtggttatcctcataatatttgtaccactattgaatttgtgggcaactcttgacacatcagtcattatggtaatttacagagttcacagacaggtaagaccttccctcagtatcctgtatagcaccttccaatattatgaaagcaagcagtagagagaaatgtccttcattagtacaacctagatttcctaatcattaggacttaggcttatgcttatctcatgaacatctaggccttcctccagaaattatagctatggcacatttcagttacatcccaagtgtcaagacacctgaggtgagaaagctgaatcaggcacacttcattttttaaaatattactctttaaattcattttagagaggggaaaagcatcaattatggaatctccaatatgaaattatttgaaataatccaaatctttattttaaaaagtttatacacttgtttggtctctgtctctgtctctgtctctgtctctctctgtcggtgtgtctgtgtgtgtgtgtgtgtgaacatgagaaggcaggtacatactgcaatatgcacatgtagaggccagaagacaacctgaaagagttgtttctctttatccatcttgtatttcttcgaaatggaaattaaaccattagtctttgaagcaagtgtcttaactaattaactgtcttactggcctcttcttttactctttaagctatatagcactttagtaagtgtaaaacacaactctattgcttgaaagccatatatttcagacaaatgaataagaagtaaaattaaatatgttcataaaaagatttaatattttcaatacagatttttttattttattaaaagacttatcgtagataatttatttttcttctttatatcagtcttatcattgaatggattttgtatttaatagtactttatagatgagaagcacacactactataaaactcccagaatggaaaaataaactgataatgtcagtataagcatgtgatgtttcattatgttcccagcaattatctatagggcagaaacctgaatttaactttgtggcctggatcaatggctcagtgattaagaatagttactgttctttccgaggaccgggattcagttgccagcacccatgtagtggttcacaatagtctgtaactcaagtttcagggggattagataccctcttctgacctaagcatgctcctgctagaatgtaatacactcaaactaataaagcctcatgcacatatacataaatcttaaaaataaataaataatttaaggatagaaaatataaagattcctgggatgaaagaaattgcccagttgaggcttctatcttcagtgtgtcatggggcccttttggtagacgaagagagtagaaactcagagctctggagttttagtttctgaactagtctagttttcttcaagagcagaggggcatttcttcaggttttgtgtctataattaactgcagaaaaagatactaaattctgaattcaagaagcagatgacagaacattcttgactcatcaaaaactctctaagaccattggccacttgaagcagtgccagaattttgcaggtataggtggatatcccagtgagaaggttcataattattttgacagggtgattgacaaaacaaagcatttttttgaaaaaaaaattgaaacaaggcctcatgtggcaagggctaacctagaactaattattgtagctttccttgtgatccactcacctctacatttcaatctctagtagtcatagtagtcagggttctctagagtcactgagtttatggaatgtttctccatagggaactttattgtaatggcttagattgtgcactccaactaacccaataatgggcagccatgaatgggaagtctaaggatccaggaattgttcagtcccatgagcctagacgtttcaggaggtcttctatataaactggtatcctgaagaaatagattctaatagatgtgttagcaagtaagggcaagtagataaagaagagtgaggcttcctcctttcaatgtccttatgtaggtctctagcagaaagtgtggcccagattaaaggtgtgtaccactacgtctgtatttggaacttgctttgtcacaggctggccttgaactcagagatctgcttgccttagtctcctgggattaaaggtgtgttctacccagcctgggactaagcttttcatggccactatgactcaagatctccacatcaagatctagctcagaagcctgtgtctttccagcctcaaaatctggatcacaggtgtgctttccatttctggattgtagttcattctagatgtagtacaaccaggaatagccaccccacaaacatttgtattataatcatatggcaccatgttcagctagaacccagggccttcttctttctatgtatgaacactatcaagtgagtgacatctctagtacccaaaacattttctgtatcttagctttaaatcatcccttgaattgatttttaagtagataaggtttgtaaatgtgataagcccatatttctggtaattccatttttcttacaggatctatagttaataccatgaaaaataagattattaacactctcctctatagctagatcatcataaatactggtattgtaatgtctacttcctgataatcattctaggcacataaaccatgttatattcaaagcatttcaactttttaatgggccagaagacatggcactgctgcagtgattcatcaaagatgactcgtgtgttttcaaacacagaatctgttgtgtgcttaggatttttgactcttctgttgttagcgttgtatatgaagtgagtactttatgtaagaaaaaaatggaagctacaaacaagacaatggagtgtagatcattacatggcttgtatcacatggaatcaagtattatcaccatctgaataaataactgtgtttcccttgcagaaagagtttaacaacgactgtaagctgaaagagagaatagaggaaaatggatacaacacctatgcatcttttaactggcagcacaatggcaggcaaatgtatgtggcattgaatggaaaaggagctcccaggagaggacaaaaaacaagaaggaaaaacacctctgctcacttcctccccatgacgatccaaacatagaagaaaacactgttggtggatgcagtacaaccaatgactctttggacagaaagagatggtatcctcactgaagactgtagctcaaaaggcaaagacatagccctgaattcagcttgtttaaaggaaggaaggctttggatgtttttgtactcactgctgacatacaaagttcttttcactagctctgtgtcattgtgtcatgccttataatcaagatagaggcaagtcaagtttggatggaagttatcctcaagtgaacaatgttgtggtgggggctgggctttttttgtttgtttgtttgtttcatttttaagtttttgtttttgaacttctgagatagaacttaaagaacatggaacactctgttgaatgatctttgggaaagttatttatggaatatgaacacatatcaaagactttcattgctcattcaagcctgatgattcaatgagcagtaagacacgcaagcatttactggaaagcacttgggtcatatcatatgcacaaccaaaggagctttgggtgtggcaccatggaagaattggatcagatttacaaatataaacatagtagtatgaaactgtcctaatacaaatagtatggtatgcttgtgcattctgtctccatccttttctatttccttctaagttatttatttaataggatgttaaatatcttttggggtttaaagagtatcttcaatgctgccctctggtttaccttttctctctctctctctctctctctctctctctctctctctctctctctctctctctctctctctctctctccctctctctccctccctcccccctctggcaccatacgcacattcatgacaaagtgttttaaaaccttggcaaacacttcagaaataggagatgagatcaaggaagcagtatgaatgccccatgcgctctcagttgacttaatttgcacttctgcaataaaaaacaccagcaatgactatggcagaattctgctatagattatgtaacagatatctgtcatcatttgtcaacatatatcagtccagagggacccttaccttaaaatgtagaaggccaaattctctttcattgtcttatttcatcttcaagaatatactaaaagaagaaaaaatgaattgttagactaacattgttgggttttttttttcctactgatgatggcttgccacaggtcacaatggcaaatgatgcaaaggttatctgcacatacatgagccctttgtaaggcccacagaatccttctccctcaaaagaaccaaaaaaggaaatttggtatgaagtgcaactctccctggggcttaacctgagcaaatatatcctagtatatgagtaaccatatactgacacctgttcaagctgaatggtctagtctttacagaaccacataaaccttgttttctgtaaatttaaaatgttctagaaggttccataatataaccacattgaaattcattttcttagaaaaggtatagaaagcagtatgtaagtgtgccatgcaccctcgctctgtagatcactaaataaacacgtaagccttatttgcagtgtctgtagtgattttaagaatgtaggaaacacttctaaaaaaattttaaaggataactctgagatgatattgatgctgcagtcttctttcttgtttggaaatgtctgtttattttcattgtttggattcagtattttgataggaacaaaaagactcaccaaatgtgtctgtttactaaaatttaacctctagagaggctagtgatttgtgatcctcttctaacttatttgtgctgatgcttgaccagtacaaatcagctttttaaaatattattattaaaggttgatcagtcattttaaaattggccttttttttcagaatgttcctacaggtcataatttatgatttctttgaaaagcttgcatttcaagagaaaagcacagaggcacaatgctttggtttatgggtataggttgcattttgtggtgttctttcaacttgttttctgacaaatgggatttttaaaatgtatacttcttgtggttggattctgtatgttagagtttaattggtaactgagtctaaaggctctaatgtaatgaatctctagaagaactaggtatctttttttacttttattttaaaataataattatacctgacacatgaccatggaccacccacaaccaaaattaaatgtttggggagacaaactatagtattcagtgacaagggtaacagcaaatagtgcagacgttggattcttatttcactttgccatttagattactaaagagactatgtgtaaacagtcatcattatagtactcaagacattaaacagcttctagcaaaatgtatcaaagcttgcagagtccaaaaatagaaaacatctttccccctctcccaccctacatttccccctgtatgcatcctaacagagataaatacaaaatgaattcggtaaggagagaggagattcttcttcacttcatatttgtttgatattaatagagaattctggtcctttttacaactactgaaagaaaagaagttcagtcctaaattttgtgtgttaaaaaaagaaaagattttgtgagttctgcctccgtgggaagtgtgggcactgctccaccatgctgaagtgtgttagccacgggtacagagcatatgactgttgacatcagactccttaaagatacagaatcgcttccctcctcctaatcctcaaaaggctgaacagtgtatattatgttacatttaaataaaggcaataaaaatgctgggaaaagagaataaaagtactgttcttattttatttcctttctttcttctcttctcttttcttttctttccttttcttttttttttcctttttttttcttttttttttttattagcctaaaactatacctggtaatgagatcagctccagggctgtgtgcatggcaggatgtggttaaatgccccacagccccaaacaacaacaacagaaaaaaaaattactcaaacatttgtaaggtttctttaatgttttacatgtgtgagccggctatccttaccctaataacaaccaaatgctttcgggttctcctaactactcaggtccacctagtttacacagtggataaagaagaatgaattgaaaacaaggatggcttgtgcaacaatgagaggctcttggaggaaagccaggagctgcaaacgttgacttccagggcatggaaaagaccaacgaatttgatttgaaaagtaggcaggaaagaaaagaaaaaaaaaaaaaaactgtagtaatgcaagttgattccagggctcaagcaagtttgtggacagagtggagggatcagtgttctatggctcaattctaataactagagcattgttaattcttggattgattattcaataaagtaaacgtaacatttttatatcaatgagtagctagccctaagttagtttatatatgtatgcacgtatacatccatatatacatatatatgtatacctgcatacatacatatatacaaatgtatatacatgcatacatacatacatgcatggagttaaaaatatttaagagatgatgaactgtactttaaaatagcacatatgagttcaaacaaatgtggagacaagagctttgcctacctttgctatttaaactaagctagaaaaacaatttatcttgaaagaatcctgaggctctctgaattcttccagaattggaaaatagagcaggaagcatcttgtcgctctccctcgtttcctgtaagctcacactgactagatggttacgggttgctcacttccaagttgtttctttccaactacaaaactctgaacttccttttctcaagaagaaaaatcgaaacactgttaagtatgactcctagtgctcggttttgactaatttaccaatcagcatcaggagcaatctgctagcaagggatctaggcatcgtgaagggccagtcttcattcatgtgagcacaaagaggcaagggacagtttctgcaagttcacacacaagagtgaagaatcagccacttaaaggaggaagaaaagaggaagaaaggaaataataaaaagtaaatgataaaaataataataaaataaaaggcaggtataaaaactgaataattgctagttacatgtgcttaaaataaactatttatcttattcctatatattttaatcaactccaattatctgtcatttattttttccaaatgaaaaagatagaaagatttttaaatgaaaataatatttgctttgttttaagccaagaatggaaccctggatatagccaagctctccgtagctttgcacactttgtagaaagatcagttgaatgaattacaagttttcaatgaaaaaaggctggcccttctagtaaataacaactagcatcataaagatgctataaatacttctttaaacgtcttccataaacatgtgctaatgttcttgagtaatcaacatacaaaagattgaaaaacaggtatcatttgttgttttaattgtagaataaaaatggaaaataaattgtgttacatcttttaacgtatcttgtagagttttaacagaagacaaaagaaaactttacaacctgcattcctcttttctcttgtatattaggggacacatcagaaaattcccttctaagtaaacaatctattgaaacatatttataaataccatgcattagttaaaatggaatgatcatgaccaaactagcaggatcaaagcagctggtcttatttctaagtggatataacagacatttctatgagtctccatcgtgatagcagagaaaggcaacagtctccaaactctgagagaagccatatgccaaccatacatgcatgtgacatgtattattttacacatctttattaccctccacaaaagagcctatattcttttttttttttcatgcaggcaattgcatcctccagagatgagcacagcaaatgaagaatcaaaacatcccatgttcctcattacaactgtaaattgaacatatgccataatacaacgtaggcagtgaccccagttgcagagcaaccaactgcagtgtggccttagccctcctaaagtttggttttaattaccttatacacatcttaaatgcctaaatcatcttacaattttctaaattatttagttatcatttctgtggtcaatttaagctgctgacaatgcaaatacactcaaagaggtctttcaaggagaagtaaattagaaccagttttccatgaggtattatagatttagaaaggactgtgttttatggttatgggaagcactagggttaggggtcaattattaattcaactcaacattaaaatattttaacatatggtatttaaaccagaatccttaacagacattttttttctgtgacataaattaatatgttcaggtataaatggtatttaagccaatatttatataatttctatgagaagcatatttgttatcaaggagttttccagtgggaagcactgaaggaggatggcattaaatgctagtaaagatgctaccttagggacatttcctgataaattgagttctgaaatcaaaatgcattttacatatcaagtttatacttacatagaaatcaaatgaaattaaattgtagccttagctgatatctgtagtcattcctcccagtcacatgggcgagccctatattccaccccttacatccctagaaaataggcaagccagcccatttctacagggacagtgcatttacctgtctacttctcctctgctttaattcaagaggatattaaatagcttcctgccatgcatttcctcacaagaaaatgatggcttttattggaaccaataatctactccacttctttccaatgactagtaactctagaaggctgtaaatagagattgttggtggcaagtagcaagatgattgttctatttttttcttattgttaaattatttaccttattagagtagtggttttcaatcatttacataattcagtttgaactcggtactaatgagaaaacaaaacaaaatttaagcataggaactactactggttgaatttttaatagcagtcagtccctagaatatgttcctatttagaagcaaggtcatttcagggacattgaataaaagcaatttatacatagacataaaacaaaaccaccctagtctcttcgggcttctctaataaaacaccacatcctgagtggattctgtagacaaatgaattggatatatgttctaataatcattttgcatacaaatattgcattcaaaaagacatgactataaataattgagttctctaatacaatttatgtactctagtgagtattgaccatttcaaaaatatatcagaagattgtgtttacattaatagacttcatcatagaaattagatgctgttgagtgactgcttgaggagatgtatctatttatcccaggaagggaactaatgacaaaccaaagaaaccattctacccaagtctatcttgatgaaccactgaggttgttttgcaattttctataaaagatctgatgcctcagaggctgcagtgtcactgaaaaaccccagagcatgctgtctaagctgaagacagttccactagacagtctcccgtatcttagcaaccactcattgattgcttatataatcttagggtctggccttgtgaatcctgtaaatttcaggtgcttcctgaactttgtacatatcaattccctgaatcccatgaacctcactactttccctgaaaggaagtgtttcagtttaaaggaagcagctatacaacacatgtcttcaaaatttctctcctcaaaagtaacttcacatcttattcacagctatttgaactacagataggcactttggctttaaataattcatcttaatattcttgcttttttagacgtacatatatttaaacatacagatatgttcaaatatatatacatattatatatgttatatatatcatacatatatatttagacatgcagtatatttgaacatattcatcccatcccaaattcctcccatgaaaaacacacttttatatcctttaattcaatcccatcaaacgttgagatttctccttttattgccttttccccattgagcccattttgaatttcccagctagtcttgagagtggagcctaccatgatatttggccagcctaccaggatcgttcacacacacacacacacacacacacacacacacacacacacacacacacacacacacaaaacccaaaactctctctttctccccccccccttttcccctccccagaagacatcaaatgacaacagtttctcagctagtagtggaattttgagaccaccctattccctctatgttgaaattttgtctgactagatcttccacaggtcatatgcatgttatcacaatcaatatgagttcttatgtacaaataccctgctggttctagaaaacatcatttccttggtattatcaatccctttgtctcttacagtctttcttccttcttccttccttccttcctgagccctgtgggaagtagtatgacatggatgtcctatttaggactgataacgctgcagtttgtaattctatgcacattaaccagttggaagtctctgagttagttgccatcttctgcaagaagtttctctggtgaacattgaaagagtatctatggatatagccataagtcattagaagttttttttttattaataaattctatgaccattatcaaaatgatagtattgagccataacttagggcctataacctatctaatcacaagtttttgcctcttttaacagtgccaggcatgggttctatctcacgaagtgggccttagatacagtcagaaagtgtttggttactcctataatatttgtgccacaattgcatcatgtctgttaaggctagtttttgcagggtttacaggaaagtgggaccgagattaacctttctcctccagcagtgtacatagcatcatccagcaccatgtgtgctaggtgataggaatagctatcaggttgagttccagcttggtttctctatgttttatgattcaaggacgtgacatatttagcaatagtgttctgccatctacttcctaaggataagcatgaatatggaaaatagcctataattcctcacctctggtgacctcactggccaacatatcagaaagatactgtaaaagaatgaagcagaaaaaaaatataaatataaattttgagccaccctaatttttttcctttatgttactgaaaatttaagtgtgaacaccacaccatagttttttttttttttaattaaaatttggtattttacattttttttttttagttcatcattctctttgatgaacaataaattctgaaaacctatttggtgttacagggcataaaaattaagtataatacattgactaataacctcagagccagtctaagtatttttaagtactcttttctccaaagttgattagtagtagtagtagttgatttttctgttattcaaggaatgggttttcagcctttatacttttaaaatgtcatgctggattgcctgtgcattatagtgtttgaatcataacaatatcccaccaattgtgatagccaaaaatgcttataataaacaagagttaaatttgtttttgtcccctgaactcagcattaggtaatgaagtaagtctcatgactctacaacattgttctccttcttgtatacatattctacacaggaaaagcaagtccagtgtcttttataaccctgcttttcaatcttcagaaatgcaattttaaagacaaccaaggtatttcattttaatgatgtacctcttggttgacattgttttacagggaatgttatgtacttgtaaattagagaaacaaatattttaattcttgctattcttagccatacatttgggaaaggcactctacataaggtaaacatgagtaaccgtaaaagtggcaatagtcactaatgctgggttcagtcctaggagtaaataatatatttgttaagagttttgtatgatgctgcccaatagtgcatattcaattcatgtgtagttttctacagctttggttcttaagtcaaagttcctggtgatgataataccaccttatctgaaggaagaatatttatggaaattttcctgatgtggtaaaattatgatgaatcctgttctgaattttcctttaagagagggcatacagaacacatgtgaagggttctacaaaaatacccattgttttcttgccagaatgctcatttgtctaaaactactgaagaccccttgcaagctcacactggtagccacatccagtgaaggctttctgttaagtacacaaaactgggaataacctgacaaggttattacctatgatcagctgaaacagtgactgacacttgacatcatgtcaactttccttacttctcaacattgcttcctttccctggtcacacacatccttatgggcactccccacaaagctcctacatgtgtctctttattacaattggtttcctgtaggaacagcccgaagacattgtttgagacaagtttgtttatttttaaggtaggaaatgagcctatttcatgctgttacaggaacatagctaaagctaggtaatttataaagaaaagaaaataatctgtgctgtccaggagagtaggaaagtcaaggtcaagagcatgaactaggtgagagccttcttattttgccattcctgatggaaggcagaagggagaatatcagctagagttttaattcacaatatcaagacagatttaactataatttgatttaagtttttcttgaaggcagacccttcctgacataaacatcttccattcagcctaacattatggcacagttacaatgggtattacatttctgacacatgaattttggatggacaatttcaaactgtaccaaggactattagagaaaacagtatcaaagaactagttaccctctcatgtgaatgccagtcttcctcattttctttttctttttttttaaaaagattgatttattcattatatgtaagtacactgtagctgtcttcagacactagacttacatagcctatgagtttaataaatgtactggagatactcaacatgttcttggagccaatcattaatgggaacagataatcttgatggttaaattggaaataggtagcaacataaggacaaagagttaagtgatttgctcagtgaactagagaagacacatggttaagaacccatggatgttctaatattagggaaa

SEQ ID NO: 1203 - DNA, 888 bp, Mus musculus
aggtgtcctggagataacatcagtggaaatcggagttgttgccgtcaaagccatcaacagcaactattacttagccatgaacaagaaggggaaactctatggctcaaaagagtttaacaacgactgtaagctgaaagagagaatagaggaaaatggatacaacacctatgcatcttttaactggcagcacaatggcaggcaaatgtatgtggcattgaatggaaaaggagctcccaggagaggacaaaaaacaagaaggaaaaacacctctgctcacttcctccccatgacgatccaaacatagaagaaaacactgttggtggatgcagtacaaccaatgactctttggacagaaagagatggtatcctcactgaagactgtagctcaaaaggcaaagacatagccctgaattcagcttgtttaaaggaaggaaggctttggatgtttttgtactcactgctgacatacaaagttcttttcactagctctgtgtcattgtgtcatgccttataatcaagatagaggcaagtcaagtttggatggaagttatcctcaagtgaacaatgttgtggtgggggctgggctttttttgtttgtttgtttgtttcatttttaagtttttgtttttgaacttctgagatagaacttaaagaacatggaacactctgttgaatgatctttgggaaagttatttatggaatatgaacacatatcaaagactttcattgctcattcaagcctgatgattcaatgagcagtaagacacgcaagcatttactggaaagcacttgggtcatatcatatgcacaaccaaaggagctttgggtgtggcaccatggaagaattggatcagatttacaaatataaacatagtagtatgaaactgt

SEQ ID NO: 1204 - protein, 98 aa, Mus musculus
GVLEITSVEIGVVAVKAINSNYYLAMNKKGKLYGSKEFNNDCKLKERIEENGYNTYASFNWQHNGRQMYVNGKGAPRRGQKTRRKNTSAHFLPMTIQT

SEQ ID NO: 1205 - DNA, 104362 bp, Homo sapiens
aaaatgatgaaaatgaaattggctccccaaactttatacagcaattaatttcttcataaaacctttatatgctgtcatgtggatacaactgtgtgtattttcagtaggcctgaaaggatagtgtttatcattaaaatgttcctaagtaccaaaacgaattatactttatattgctaaatctaaaagttgctttatttaaaaaagaaaaaaaaaaactctgaggctgaggtttctaactttaccaaagatgtggtttccttgctgtctgtatttcatttcccttgcttctttaccaaaagataaactagtcactttttcccctggctttgcttagttataatttttttaaccttacaaacaatttcattttggactttgataataggagatcctgtctttaggttaagactcattttactactttaaagttttacttattttaaaaatgcagtagctaaaattcaactgacacactcaaaataccaaaacagaggtgagaatggcagcagagtttgttagctaaattctaactcttaagtaatgagtaaatagggattttttttcctcatagccccccttgaggtcattttaagaatcttcactaaagtaagcttcaaatgctctcagggaacatcctcagctagcttgcaaagttttttttctccactaattatgtagaatggatgtgcactatccagccttagatttctaggcaaaataatcaatttctttttcatcttggtggaaaagtagcccagaagttaggtatctgcccccaaaggaaagaagaagggttaacttgacacagagcagggtcccaagtcaaggacaagggctctctttactgctactgttgtagtatcaataatcaaacagagcaggtggttctgcagaacaaacctctacatttgggaatgaaacagagaagcagaggtattgctttcatttaagtatgccttcagaacccagaattttctagaataagcaataaaatcaggcacgtgaaagagaaaaatataaaaagacataatgtgaagtaccactgtccttactccttaggctctctcaacatggagtcccccagactttgccaactggcatttctgaggttcaaagtactgaatctgggtgcccagggcttttctaggcagaggattgtgtcagaaaatggaaataaatgctggctttgccacttgggcaagtaacttcacctgcctggatgtggactttcatatctaaggtccatgttcctttctactttttcccctatcttgtcagactggagggcaaataacttacgcatctaatcatataacacttaaatttctttgataaatcaaatgctcttaattgccttccagttacagtgggctacttttattgttctactatgcaattcttttactagcattatttctgtcagtctagaagttgacctctaaaacagaatctagcaataattaatagaaataacatttatctgttatagatagatattgaacagtgccaaaattgtatatgtaagtctttaagcttcttattattttttcaatctattcctaatgatctgataagctttatttttcaaattcaaaacaagactagatgtctaataagaggtccttgaaggggtgtgtgtgtgtgtgtgtgtgtgtgtgtgtgtgtgtgtgtttataaaatgacaggaatgagttgggtgatttcccacaactaagtttcaaattgtagaaaatacatgattaaaatatttctcatatatattttaggaaattatatatttatatatattttcctatttttagggaaaaaatatataaaacagcaagtataggcgaaacactgaaaacataccagctaaataaataaacattactatctagtgctgtaaggtaggaagactctaccttaattcacccacagatgaacatggctacaatggtgtaaagcaaaagaatgtttctttctcagaagttggccgaagaaatatttctaagttctttctccctctgccaatataattcaaatgtcaaattaaaatagccaaacttctgctgataactgaatgtattagtctgttttcatgctgctgataaagacataacctagactgggcaatttacagaagaaagaggttcaattggacttacagtttcacatggctggggaggcctcacaatcatggcagagggaaaggaggagcaagtcacatcttacatggatggcggcaggcaaagaaagagagtttgtgcaggggaattcctctttttaagactatcagatcttgtgagacttattcactatcatgagaagggcacaggaaagacttgccaccatgactcaattacctcccactgggtccctcccacatgtgggaattcaagatgagatttcggtggggacacagccaaaccatatcactgcaataggaatatgaaagccagaatttatacttaacatataggaaagaaggagacattatagatttttaagaagaaatgaatttcaaaagggcctactgttgaaccataaacctaaaagcagtctccttcacccctagctaagattcaagagatttatcaaaaagctgtcctaacttagcgatagcccagaagttttcaaccacaaggtcagaaccttccgaaggcaaacattgcaatacaccttgagaattttccaaacatcacgtgccaaatgccccagagattctgaaatgttccctctcttccttcttgccccacagcctcagaaggggccactgttattcttggaagtgcattatatctgtaagtatgtaaggctgaagtgcttgccattcactagtttagtgcacaggaagcagcttgtcactatcggccctgtcatcctgggcagctcacttcgtgatcccagatctctctttttttttttttccacctgtaaagtaagggcagtagaactaagagagttaaagtattttctagctataaagatacaaaattctataaattctcagggttataagattagaagatgaaagactaagccctgatctgggcttcatagactctaggctatattgatttctataagaagtcatttgtttatgaaatttgtgaaactgtctagacagtgagcaatacacaaaattatctgcaaatgtatttcatcttggggtttttggtgctttacctagctttagcacctagctgtacaattgagggctgcatatttctttatttatttttaaagatctgtctttagttgaaacgaaaatgttcaaacaatacctctcagtgggctagaaaataatattaatttcccccattcttttatacaccagactattaacaaacatcagtataacatgtttccttataaaaacattaatgattttaaaaattagtaaagattaatattaggaaatatttaaactaaaaagaaaaaagctgattttaatttagaactttacagttttccataaatgtatgtcatttatgaacataatttctactttcttggattccttttctgaagtcatttatataaatgtattttattgaacagtcagcaatcaaaataaattactctttgattttagacctcaaaatcattagctaaataaaaaactctgcaatgatcaatcaaaattcaatattagattatacatttctagagggcaaatgtcatgcggcattacctttcgtatggtttaaggaatcctgtacatcaccaagcaagcattagatgcttcacaacctgctttgtagtaatttgcacttccctgttatctcagatatccaaaaaaccacattttatgaactggttacttactgtgatggtatatactgcagtttgaagttagtgtcctgagtaggacagaattcttcccagttgatttaagtgaagagactttaataaagtaaccagttacaaaggtgcaggcactgtgaaagaaacaagggataatgatgataggcaagtaatagacaggaactgctaccagtccttgagcttaagaagatggggaggaaatattattttagggttgccagtgatagccagagtcctagaggaggggtcacccagtgggaagggatacagacactgccagaaaagtgtcactgaaacataaaggaggagaggaggaaatatccagagttctctcgccttctgtgtgctgatctaaggattccattctcccattgacaaaacaaactcaaagtcttctatttaaaaaggaccggtgattcacacatgtcagcacagagctgagcagaggaggggaaagaatggatctgggggccaatcgaaggaaatccagtacagcaaatattgcattgcccccaacacaataatttttaattcatagaaaatacattctttttgtcaaaatttgcttaacagaggcaaaatttttcaaatagaatggatatcaggtcaaattatatttcataataagaggcacagaggacagcaaatggattagggaacttttattgggaagtaattaaaataataaactagaaagcaagaaatatgcttccaggagtctgggagcaggagtaaaagagaggaggtcgggttgggttgacagaaaggatgcaaccaaaatctccacactgtagagaaaatctagaaaaaaggattgtgccagggacataaaatagggaaaaatcaagtcttaatcattcgtgaagccataaatagaagtcacagttttccttagctcttgttgtagagaaaaggaaaatcaaaaagaattttcaggggctcttctttctttttcaatatctgtctttccaatatctggtttctgagtcctaagataaccatattttgcccatcattaatgataaactgcctaaattcatgcattcaatcatgcatgcacattctttatggggtaagtttctctgtctaatttattggaaaaaccttgcaccattcacaatgcctacctagcatatagtaggcactcaataaacattaattgaataaaaaccagttaaatgtctgttggcatgacattacaactttaaagaaaatattataatctgtcagttaattcacaaacataaatgactaatatcagaatgtttacaattttgccatagatagcaggactaagatgcctagagagcttgaagtaggaagaggcacagatctacaaaaggacagctgggaacacagaaaacaaacaaaacttttcagagacttcacaactttgtcaagggaaggttctgtttaccatcagctgggaggggacaaacagcagctttgtgaaaatatgtttgttgtgtttagtgccaagatgcaaagttcagtttccaggaatttgtggtgatttattgtatgttttaaacaatcttatatagaattcttttcttgttacaaaagatcctttttatcatcttggccatatttccttcctaataacagatcattgagtctgtttgaaagtgagggaacagaaaattaaccttagtttcaaactttgaaaaaaacttgtttaagcaacctatgctttgaaatatcacaatactttatggaaaattaatattagaacgcagaaacccggatcaaattataaatctacttttctagaaagtctcatcagttttctagaggtgaacttataaattcagattctattaaaaaattggggtattctgaaaatatggggtattcattactttttgattgtgctcatctcggaagcattgataaaatatccccctttgccaagtatatatcaatatttattttagctaacccagctggtacttaataattcaacactattttattacttttctctggttaatctattgcagcaaagatataattgcttttccataactaaacccctaactctttttatcatttctactctgccatcttagacatattagaatgatgaatggtcaatggtaagaaagggagtagggaggaagaaaaagaatataaacaggacaggtgttgcaaaaattagggtaatagcctaaggtctatcacaggagttccaaattctggtctaccatggagtgacctgggaatcagcttattcatctataaaatacatgtgttggattcagttatagctaagattcccactggctctgaagcaatgcacaccactatctgtgggataacacctcttttctgttcacttgaagctcctggtttaaaaacaataagatatcactccttcattcacccaaatgtgagtgattattagcatcatttctagctgcagcctgggaagtgcacaagtcctaatgatgacttaaaactggcatgttctgtgtccaaaagggaaaaatgggctgtgacacatactcataaggtctgcaccacagggtgaaaaaatgaggcctgcatatgtctaaatttttgaacagcgtggctgacttttgaccttacttagcattacttgaagcagcttactgacgctgccaataacatcatacataatagggcacacatcttgtaactgaaccataggtagtgctgagcaacataaagaatccaggcaatacatatgtaaaatgtaaactgctcaaacacaatagctactgaaggatctgctagtacatacactgattgcttctctgaggttcaagagccaggttttaggattcttcaatggctgctgccatggtcttgttttaaaaagcctcaatcatttctcaagacatcacacgtaacaaaaggctgcatctatttctctcaatacagagctagcctgatagtagcagatatgtttaagggcatagaaataaagtatgccttccagaagttggataaaagagaaaaacagcctttgagaattagtaggtaccactctaatctgaagcttgtactgtccttttcaatcctagcaaagaaacaattaataaaggaacccattaagacctgattattgcagctaaaaaaggaaggtagaatttcagtcctttgaagtaactgagaatgattcaggcctcattacagagatataatctacattcatacatttatgttagtgattcaaatctattgggagagattgaattccgttaaatagtgcatctttcctgtggaacttttctcaggctttctcgggctaacctaagaggtgacctaacaatgcaaagtagttgggtatttagagattcaactgtgctgtaaaagaaaggctgcacagaaaagaaaaagaagaatgagatataatctaaaaagctatgtcagcttttcctttgggctgttttgtaaatgccctcttgtcatcacgctgtacagaagagcagcgaaggggctctagaactttcaaacactgcacctgctgcaaccagattttaatatgaaagtttaaagacatcttttccctcattttagacagaaaaaacaaagaaactcctagctaaaagatctgaatggcttcttctactggaacataaagttggtagatgtgtgtatgagagagagagggagaaagagagactagctttggattggaggggcacatgtctagggtgagtttaacaaaaattcttaaaccccaaagtggcatcaatagtgttggttcctattgtacagaaaccccaaaataataacttcctgtgttttgtaacttttcacagcagaatctttattgtatggtttcatcaaacataatttttaaaaaatgtagttttaattagttgtaaattcaaacatttggattcttctggaccattgggctgaaacccaaatccatgggaaacactacactgtctttcaggcatttgtcctctcaggtataaaactgtgaactaaaacattgaaattcgcactgttggttcatttttcagtatcctaaagaaaaagactcgcttgatgtgtgctctttatttgcttaactttccaattaatatctacagaaattagagctaattatattaaactttaaaaacctattgtaatgttcaccacattgttgaactcttctaaataagcactgcatgagttataactaatgcaattaaaatcctgattctagtattaaatgattctatttcaaaggatttgaatacacagaaaaatataagaacattcatgtaaactcatttttcaagtcactaaatacttaattgagcaatcattcctaatgctcatctctaacgctaattcttttttctttgcatttcctctggttcacaaccaatatggaggtcaaacgcacatcatagggatcctagcttgtgtgaacacagactcttctaattagttccctccaaattacagttgctgttgttaaactcccagttcaccttgaagtgtttctctgtcttacattggcagcctaattttaggttgaaacatatgaaattaccacttttgtaggtacaaaaccttaaaatgttggcaattttgtgggcttcaacaaaacacaaatgtctaactgtcctatgtgacatagatagttcattccagtacatgtttaggcattccttctagttaaacgttccctagtttagagtcattcttaaagaagtggtcctctaggagctgtttcttattcagattggaatggattatcacagtatttccttttttgtgcctcttaactcttggcaaaggtttcttagccttggacttagttctgtcaatacctgggctgtgagctagtttctgcgagcaagggaggagttggggtggcctgaaagagtgtgaaaaggagaggaggactagtagtgcagtgatattgtaaaacagagccctttaaacattaaatgtgaagatagaaaaaaaaaaaaacctcccctttatgacaaagtgcaaaggaaattgcataaaaaagaaaacagacagcagggtattcagccaaattatatggtaaaatctttgcgatcgccataaagtgcgtttgctttgaagtgcacgcatgattcagtgaagggctcatgttagcaattagaaatcggttatttgggtccctgatttcatttgcgccgagagaggcaacttttaagggtgacgataaatctccctgagcttaaaaggcagagagggccaaagtgtgaactttttacttcagcaacggaagcgagaaatcagtgattcattaaagaggagacctccttggaagctggcagcagaggaggaaaggacactaattatgtcttccttttctgtgctcgttctgaccagtttataacctgctgctttggacggtttaaaatcctcagcatcttctgctttctcccagccctctcctcttctgggagtgagaaggggggaaaagtcagccaagcaccaggctccaggtggctctcaagtacttcactgccaaaagaaatgggggtggggggaggagatcctacgctggaaagcaagtgagaaaggggctccccagaagggattggttcaggctggaagacagcaaaattcggaaagcgggaagataccgtcagcgccgtggcccgcgctgcaagcataggacgctttagcagcgaattagacagagctagaggcgccggcggaggctgcggccgcaacagccgcggcgaggaagggacctggcagcccccgagctcggtgcaaaggcatcgcgctctctcctcgctcccctgctcccccacccccttctctgcccctttcaccctccctctccctggcgttcccagcagcctagggtttcagatgtcccaccgccggttgaccccctcccccctcttctccacccctgcaaatgaggtttgaccagcagaggcagagcccacctctggcttagaatcactgacatttagactccaggcttcaacctgtttacaagcggactttccaaaggaagggggtgggagatagggccatacaaaacaccagccgccgtcccccaaaacaaaaagtgactttcggcagccttcaaatcggcaggcaccactaaaaacagaaaggaagagagggaagaaaacaacggcgactgggcagctgcctccacttctgacaactccaaagggatatacttgtagaagtggctcgcaggctggggctccgcagagagagaccagaaggtgccaaccgcagaggggtgcagatatctccccctattccccaccccacctcccttgggttttgttcaccgtgctgtcatctgtttttcagacctttttggcatctaacatggtgaagaaaggagtaaagaagagaacaaagtaactcctgggggagcgaagagcgctggtgaccaacaccaccaacgccaccaccagctcctgctgctgcggccacccacgtccaccatttaccgggaggctccagaggcgtaggcagcggatccgagaaaggagcgaggggagtcagccggcttttccgaggagttatggatgttggtgcattcacttctggccagatccgcgcccagagggagctaaccagcagccaccacctcgagctctctccttgccttgcatcgggtcttacccttccagtatgttccttctgatgagacaatttccagtgccgagagtttcagtacaatgtggaaatggatactgacacattgtgcctcagcctttccccacctgcccggctgctgctgctgctgctttttgttgctgttcttggtgtcttccgtccctgtcacctgccaagcccttggtcaggacatggtgtcaccagaggccaccaactcttcttcctcctccttctcctctccttccagcgcgggaaggcatgtgcggagctacaatcaccttcaaggagatgtccgctggagaaagctattctctttcaccaagtactttctcaagattgagaagaacgggaaggtcagcgggaccaagaaggagaactgcccgtacagtaagtaacaaatgcatgctcccctccttccaattatccacccccagcccacacgggggggaaaaatctgttccagatgtggccagctaaatatttacgtccccaacccctgtaaaatgattaagtggaatactttcacactaattcaccccccaacccccgtgtatacattgtgctgccgcatcccctcccctaagcgcgctcccttcacatcccccaccccttgccgctctacccaccccttccctccagcctgtcactagccggaccacgcagggcgctcaagagagttgttgcagtgcaaagatgcccctttctctctccaccgcctttcccacctcatccaaagagcaatttttccttccttctggaaatggctcaagtaaacacattttgtttcttttccctggcaatcttgttaagagttttgggacaggctcctcaagctgaaaataattatccgctgtcaattataggggctttgtgggaactttatttaagaaagaaaagtcaattccactctctccccacccccatccctttaccccactacctctagatatgagcgaaaagcatttttctggttttgatttttgttttgttttgttttgttttgggtcccttatgttagtttgagtgattgcagtccatgaagttagcttttcaggcaccaccgctgctatttgtcttctgcctgccttccctcttggtaacatgatgctcatgtctgcattgtcaatagcgtatgcactgctttgtggtgtcctgttgtactgtttcttctgaaacctctcatattgcagagccatactactacagcattgtaaacatctgggactggattcacacagacctcacacaaatttcattgtcattcttttattttcaaagtaaaagtcataagtctgtttccatggctatagtttatcccacagtgtgacattttctcctcagcgtaaattatgcctgggatccctacattttggtcttgccttttccctctctctttccttctttctctctttcccttctttctttcttgcaggggtgtgggctggttgggggaagagaactagaagaagaggggtggatattgtgtctcttcttgaatcaacccagcaaacccagattactctgttgacttcctttctcagatactttcaagtggtgagacttattcatccactattgattgttatgtgaaaggaacccaaggctctgtaatggcacactgaagacagtagacaatgatgtttaaacatctttagtgaccatttggcattatctcaatggtaaattccaagtcacctttaaaggggacatttttgtgttagttgttcaggaattctaagcatagattgtcttgtcagttaacttaaatacgtcagtcaaacatttcaagattccttggtttagaaagtaccaggtactaatgggaatgacagttgaccagaatttagcattttatttttgaatacaaatttacaagaattaagaatttagttttcttctgtggggatgcacacacattcaacattaacttctgtttctcctcagccactggttctatttactaaaattcacaatatgtttataagtaataaaaatatgtgtagaggtgcttttaaagtgtttcattttatgtttcatactaaagatattaagtaccacattatctgattcaaagaaagtagctgaaataatgtcataatgatgacaattatttttgcttaaaaatcatttgttacccgaattcattagatcctatgtatataacctttaaggtttttcgattaaaaatttaaaaactttatttacttctaaaataaaatagttgtggtgtcattcagttagcaggatggggaagaagctatccaaacattgggctggacagagtgagctgggaattaacaacaacaacaaaaaattctgatggactcatttcttatttttcatggagaaaactcaaaagaatatgataaagtttcagagtgttatccttgagcaaacatttttctttttaaaaaatgtttgtgctatactttaaatgtctttatgatatgacttaaggtcaaatctgctctgttttagtttacacaacctaaattgctattttctagaataataatcacgtgtgattagctgcagagtaaaatgatttccacagtacacactgaatttcatctttacaataagaactatctgcaaagaagaaaagtatacaatatatattgtataaaaggggtgtagaaaagttccatcctaactgtccaaaatatactaatattttattttctctgtgataacatatattacttgttataatgacaagctaaatatcttatatggtaatgcaatcttaatcaacggttaacagtgaaaggggaggggttcactctgctaaatattgtcaaaccataaataatttaggctttccaagaacatctgtgtcaaaacatagcaagtgaaaattagagattgaaaaagccttaatttcacatgtggccaggtaatctaaatgctgctacgatttccagctggactgattcagctgaactacatggtatcattaagatattgtctaaacgttgcataataacatgtgaacaaacttttaccatgcctacagggtagccagccagctgtccaccaaatggtagcttgttaaatactaggatctctaacctctgaagagtgtcaattccttttccaaaaaccacatttcagtaacattttcctaaacaagttattaattattctcaatacacaaagctgttcttttgaggtttgcttatttgaagattaattttctttgttacttttgaccctagtattattgctgctaaaatacagtaacagcttatctaagaggttatatgtttttgttgtcctgggtaattaaacaactgttttctggctttttgccagcagaatgctaacaaaagggaagtaagacaatcattcataagtattgcaaaatcatttttaacttctactttcaaagctagttcccagaaattcgatggttctaaaaagactacatgtgttaacaaagctcttctctatatgggtgattattataatttttgagggtggggggctatactttttgtttgcttctttgccatgatatgagagtagaataaagagagcagagatgaattatgtttctcctgctagaagtctgagaaagcttgaataatttagaatagctgtggtgtatctgtcactagatatgtgtaggctcatttaggttttgttttatcattctttacatctagagctttgcccttgaaaccttaccactcggctttagttctgacctcttagaaaggctggatacagctgttaggtatccttgcaactgggaccagttgacttatttctggatgtgagtaaaacagctgtgagcttctcccatggttgtcatttgtagaaaagagggatctagtgaaaggaaaatgtaccctaaacttgagacaattaagaatagatattccaaaaagggaaactcacaaaaaaggctcctgggcctttctgggaaagaagaatgggaggcaatagagaaatcaatatgtaaagagtatgtagtataggctttatctctttaaatacacacttcatttaatagtcataatagtcctacaactatcaacatttttcaaatttgaaaactcatactgaaaaaagtaaattgtccaaggtcattcaactagacatgggcagaaccaggattcaagccccagcctattggttgtatctctcctttcttattgtacctttctgctacttccaacattaatatcaatttattagaatttgacacctcaaatctctaaaaaacaaattatccaaatctttacttgcttcttgctgtgaacacccgcagttctttagaattaaattggaacagaaataaaatgacaattgcagaaaaacaaatacattaaacgtgtcattgcaggtggccacatgatatcagacaaggttagtgtattctctaggtaaactctctcttttgatatttgggaatataattgcttatggatacacacaaaatacacatacatcaatctcactcatgttaacagaggtcattaggaatacatgactatttaagaaaaatccatgaatgtcattttatatagtaattgtttacagctgagggccaaatgtttaattgttcccatgtgtaataaaataatttgattgtaaatacctgtgataaattggactgttgcagaaacttctgatatatgactctaaaaagggcgacatcttagagacttaagccatacatattaagaaaattttaaaataaacctgcaaatcaaaaagacactttaccatataaaatgatagattattatctgggattattactttttaaccaggactagagcttattgtaggaagctaaatgaagtgagaaaaaaataattgttgaggaaaataggaactcagaagtgatcttctaataacgacacaagagttttctgtgaagaaaaacaatttatggcttccactggtatcttatttcagttgtggttgtttctagaatttggttgcataatttataaccggcagcatttaatcacgagcattgaggatttatgaaggtggaagacactgtatttaatgtttacatgacattgtcctgttacctttactgcattcctaccatatggaccctccactttgatggatttatcataaatctattaaaaatgcacaattcaagagagtttcctcttcataaacctgatttataacctcctacgaggagaaacctaaggaaacagttgtcaggaatcagatgcccgtattggagcatgagaattcagagacaccaaattctaggtcttggatatttcagtaacctattacctaaaggtgtgaatgactctttaaaagcagttgttttcaaaatgatgtttaggcacagaattttaacaaaagaaaaagaagtagaagaagcgtgtcttataggatcaaataaactccactgtcttcatagtttcttctacatttatgctatccagtttagagtgaaaagctttattccagtgcatttctttagaatttaaagaactgatagtagaacatgaatgaacactttaaatttctatacaattactttaatgtccagaagcaaaccccatttattatccaaatgtctaactttccacaagccaaaatgttgaaaaaaagttgacagctcatttgaaatggaactaatgttcctcccatttatgagctgcctgtgaataactacatctttcctaagccttaatgtctgtatgcttatctgacattgtagtgcaaatgatatttctttattatgcttcagaaagaagagtaatatatgtgtattagttcaaagtgattttaatctatcttaacattaattctgtgaactttgcaatgaagagtaattcagatgacatttttagtattactgttccaacatctgtcaacatttatagttgatgtttgcttaatataagtaaaatattagaattttccttccagaaattataaatctattttattttacagtaagatggaatatacaattcatgtttatgtaattttaatacagttttatcacaatatatacaagtaatcaacttcattttgtctcaagtcatttatgcagaaggatttaaatctttcatggtatattgcaatgatctaagataatttacatttgacatttgaccaagggtgtttattactttgtttcacagatttaaaacattattttgtaatcggcactctttcttctcagtgcatgttacctttatctgtgtcagtcagtcagtacaacaaagaatagcttagaaatgtacttttaaaatttgcgaaaggaaatatacctgcatcttggaaagccactagtgacactctgatactgaattaatgaatacaaaatgttgatgttttacagaatcagtttaaaacccagtacttaatttgtatagattttacacaaatagaaagtttcaagacatctaaaagggagccaggtcacccacaaaataatgaccttaaaggctcccttccttttaaatcagatcaattgtgttctttctttgaacgctgtgttctaattggcacaatacatcaaagaagacactcagagtagattcccatgtaaggtggacaactggacagtgactttttactgccgctaacacgtgcatccaattactatctgatagattcatagtgctggcagtaaagcattgccttattttatagttcacctaataattcttcaacctaaacctgtccacctttacctatacccattctgtcagtatgtgcattattaatgaataattttcaaagttttggcatgcttcctgcaaagaatgatgtcattgagctcttaatgaatcatctaaccctaatagaaggcaaagtattgattaacttgatataccccaaatttcaaagaattgtcaactaaacctaataattgcaccacaactagaacctaattctgaatagggtgggttaaattccatctaattctgaatagtgtgggattgctgcaagatttagaacttttttaaaaaggtatttttaatgtttttctgtaattattattacttttcttcaaggaccttgtgttaacatgctttactgataagcagacatgttatttcatccttaaccttttttgctcctgtgttgaggacaacttgacatgttcatagagtctttacaattcaaggctcattgacttctttctaatagctttgttttgagttagtctgtgacaaccctgcttctgagccattgtaaatccctaatagtttatcgtcccttcctcactccattattttcaccttcttggttttgtgtgtgtttttttttttattacttttatctggtttctgaactggctacatacctttaagcccagggaaagtcattcattagtattacttggcacccaaggtgacattcagggccagaggcctagacattttcagatgcgtagcatctaaagctgatagttttgtttttattttgcataaaaatcttcaatggtgtaaattcaatatactccatcaggaccgtcttctcatttcgattctgcagtgaattccttcttatcccagcattccaggtcaatttcttttaagctctgctgtaagtgaagtggacaaaccactgataagcccccttcagagtgctgattatcccattactagatcatcattctgcatttttcctccaagttaaatttttgctcccaataactcttcctgcttttcctattttcttttaaattatttgcatacataacacttactagctactttgccatttttctcacatttttgcctttgtctgggctaccatgaaagaaagaaagtgaagatgattttgaagacagggtctcactcatgatcacagcttactgtagcctcaacctgctgggctcaggcgatcctcccaagcagttggaactgcaggcatgtaccaccctgcctggataatttgctgatttttgtttgttcgttttgtagagacagggtctcactatgttgcccaggcttgtctcaaattcctgggctcaagcaatcctccagcctcggccacccaaagggctgggattacgggtgtgagccaccatacccagcctgaacacttatatttttctactttagttttcatttattttaaaaaagatgaatgctgatttggaggtctttgatattcccaacttccagaatggcacttagattatcaagcttctctgtgtacccctgtcaaatatatgtggcttttaaaaataaaacctaggttctcaataaaactttttaaatcaggaaacaatgtaaaataggtatatgtatgtcaggtgaaacaaatatagaaatacgtatgcctttactaggaatttttgaaacaccaacaggagttagaatctgaattaattccataagtgttttcatatacttctaagaattttttggcactgattgatgaattagatttaagtctatcatatgcagaatctgactattgacatatgttaaatttatgttttaataataataaaagtcaagcttgtttttacaattgtttccaaattttaagtaactttaatttactgatagaattattaaaagaagaattaatattctgtaacatggggtaaatggtaacatatggacactgatttacatactattgatagtctaaagtaagatacctttataatggtattcatagcagtaattaccagattttgggtgtcattttttgggaatatctctgcagaaggatatgattccacaagtattaaagaaaagtgctagtgatgttaatcacattatagtataaaaacttgatgaacaaaaatagtgttttagagctcaaatatgctgacgtccaggaagcaagagagacggtaaagatcacataatgaaattttttagaagccagagggaaaagtagaaaaagagaagaggccctagagtgtttagacacatactgtgaaaggaggaggagatgctttgctggagtgatgaagacaagggttttgaactctcaggaaagagatcaagctaatgagtagcactgcgaaagggctgacatgacaagaaaggtgtgagggaaatataacccaagccctggcattcaactggatgttaaattaactgaaatgagaacctatgatctaagagaagtcccacagaagtcatcgcagccaggctatcaaagtaaggaaagctaagtcccagttcctgctaaagaggaggtatgatagagtgattaaaagtatgggctttgattcaaagggataaaaagtatagtcccggagtgaaagcaggctttgaagccgcagacctgtaggcaaactgcgaggtaagagttgataactttgggcaagttgtcatcagtaaaacaaggatattaacaatacctacctttttactacatggtaaagatgaaatgagatcgtatattcattcattgattcattcatctgaaatttgagtgcttgctttgtgtcagatagtgtgtgaggcacgaataaatgcattgttgaaaaaagttggtctttctgctctcatagagcttacactctccacagataatgtcaaaaacgttaaccaagaggtgatatgatgaaaaattgaagtgagtgttatcaatgacacaagtacagtgttttaatagaaaacaactgggaactaccccaaagagcactgctagagaagccttttgaagaggtgagaagggaactaccccaaagagcactgctagagaagccttttgaagaggtgagaagggaactgcaaagggagagtttggtgcctcattcaagaagtacagagaaggcacattgaggctggatgtggcagaagtttgaaatctgaattgacacacacacagcttaatggtgcctgtcacatcataagccttaatcaaaaggatactatatgaagaaaaagtaaatacgatgcttcctcttatttcaaggggaaacatcaggaaagcaacaattatattattcgatgaagtggaaattaacaatgctggaattgaggaaagaggcaggaaggagaaatatacttggtttttgtttaaaaagggaaatatcggccaggcgcagtggctgaccctgtaatcccagcacttttggaggccgaggagggcagatcatgaggtcaggagatcaagaccatcctggctaacacggtgaaaccccgtctctactaaaaatacaaaaaattagccgggcgcggtggcgggcgcctgtggtcccagctactggggaggctgaggcaggagaatggtgtgaacccgggaggcagagcttgcactgagccgagattgtgccacagcactccagcctgggcgacagagcgagactctgtctcaaaatagaactacctgaaatttgatttggaattgtaatattcatactgttctgaagttttggggaaaaagttagaggcctggttctttaagaaattggtagaagaaacagattgagcacttctaatccaaaattctcaaatccaaaatgctccaaagtccaaaactttttgagtgccaacatgatgccacaagtagaaaattccaaacctgtcctcatataacagatcacagtccaaacacaggggcacagtttattcagcatccccaaggggaaaaaagaccctcccatcccccttcagctgctgttgcttaacagctgatacaggtattctggtgatgctactgtgctgcctagttacccccaacacatgattttttcactgtaatagtggtatgtcatgttgtttactcttaagtacttatgtatgaataagtgtaagaaaatgattgcttatcagtagcatttaaattcagagtcaggaatgatggtgatgccaaacaaccacagattacctacatcaacggctaagatagtgacatctttgctttctgatggttcaatgtatatggactttgtttcatgaacaaaatgatttaaaatattttaaaaaattacttccaggctgtgtgtatgtaaaccacaaattagttttgtgtttagacttgggtcccatccccaagatatcacattatgtatatgcaaatatttcaaaaactgaaaattccaaaatctgaaacctttctgatcccaagcatttcagataaaggatactcaacctgtatttgaaaactgaaggtaacttgaggagagaacaaggtgcttaaaataaagaatagaagatgaatattttcaaggacacaagctgtaaaaggttaaaagaaagaaaaaaagaatagcgaaataggtaaccgtggagatttgatgactatagaataaaaggcaacaaagaaaagtaattcttaatttttaaatatttcagaataagtcttatatttcaacttacagtttcgagacagcattatcacagatacttagttcttattaaacttggtagttgttttttgtttctcatcctattactgtgacctttttggctcatacccttaaagcatttgtagtctagaagtagaaagaggagatcatcacagggagttggaagagcatataaggcagtttctactcaatgccaagaagcagggcagaatttaagtaaacagcagtctctaactgagggagagatgcatgacatcaggaggtcacactgaggataagggactccagctagacagagataaaacaagagaaggaagaatattctaaacgaaggcacataagtgtgtgggtgcagagtcaaacatgaagttttcaggaaatcacagggaggaaacaaagtttgcatgcaggtgggcatcttctgacagacaaagcaaagtacagtagaaggtggtatcatgtgagagggaagtatgtaaatgtatccttacatttgtggatctaaactttctggcaaaatattacattgacatgatttttatttaaacttgccctttacttttttttttcatttttactttttgaagtaaaaaaagaaagaaagtggaagaatatttcaaaagagtattatctatattataattgacaatctaaatatagtaagtagcaagaaattgtagcttaatcaaaagaaaaaagaactaattttatactagggacatggaaaagaagagttcttctgctcttcactaaaatgacattattcttcatatttctgatttgccaaatgatcattattttacaatttaaaatacttggaacttcaaaagttcttaatatgtatatttcactgtgaagaggttttgtaatttccagcaaatccccaaaaggaacacctgaagcatcagtatttcttgctctagttgtgggttttttgtttttttttttttttttttttttttttggcatttgtattctaacttgtcttagatttacttggtttagataatcagaaaaagaaacaaagtatgctaaacttctttttctggaaaaggagtacatgtaagtgttttttaaacaaactaggagaaacatacagacagcatatatacgactacacccccctactgacactatgagctcttgagtcagacttcttggtgtagaatctgggttatttataaaacttcatagttgtgtgatcgtagccaagttactccctgggtcttggtctctgcatcttttaagtttagataaaccaacctcaccactgttggaagaatgagtcataaatttacaaatgatactataaatgtaaagttgtattaaatataggacctaacaccatgtaagagtttgacaatgttagttctcattactcttttatgccatgactgcttgtgttgttactaattattccattatgtgaaaaattccctaaatcattgaataataaaaacttcagcagattaatgctttcatcaattgattctcaaaaaaattttgtaatatgggtaagatcatcgttgttatacccatactatgtttagatgagaaaattaggcctaaaagttattgtgccagactgacattatagagttaacataattgaggataaaacctaggccagtcttagtgatggtgatcttctatctttgcttgcctgggacagtcccagtaaatgtctcttgttctggcattttattattaacacctgttcagtctcagtgtactatcacaagaccatcctagtcttaatcagtgtggtctatgtaaggcacaaatccacacaagctagttccctcttagatactactacattccatcacatcccatgtcatatgtcatataatatcatgtaatctctatattccttcacatgtcatataagaccctcatgatttactccctaccaactccctggcctcgtttgttactacagtgcccattatagctattttatgttgatttcagttctagaacctgccttgtcccttcctgttcagccttgccagacactgctaggtcggcctggaatgatgtccctgccctctttcccagctcttcttcttttcaaatttcacttagatgtcatctctgggaaaccttcctgctgtcctctcaaaacctgtgcttccaaaaaccatatacctagcattataatgcaataccacacttgattagttgactgtttacccatctagtttcctcataaacagaaaacttgttgagagtgagaaccacacctcactgacttttacatgcatgcacttaagatagtatttggcatataataagtcctctttctatatattattaggtaaataactgcttttaaccatatgatcttggtcaacttacttagactctcaaagttcagtcacctggtctggaaaggtgattaatatgctacctacctaaaatgatggttgaagtaaattagctcttaaaatttcacttagttctaagttctacaattctgagaacctgaaaaataagttagtagggctatcattatttaagagactgttaagtacttaaattcattaaaatttctgaattaaaaaaaatgtgtaatcatgaagtgaatcatttttcatgtttctctacttttcctaaggttactactgataacattcagtggggattaaaaattactttatcccctttaaaattcctgctgactatgagacagttatttctagtttcagagttgtgtttatggattcttggataatttggtggttattaaaaaatgagcaattcttagtaattattttagagaggaagaataaagtgctgtaaagagtgggagtaaagggagtggtcttgtctgtgtcaaaacatttactgtggatcttaagcaggtcatttactttatcttggcctcagagacttaatctataatatgagtgtattgaactacattattattaaaatattttagtttagtatatttatttcacagactaaggaccagattcctggagtgtacctatattaggaaataaagctatattatgctgaataatgagcacccaaagacatcaggttctaatcctggaacctgtgaatgttactgtatttgtaaagtttttgcaaatgtgatcaagttaaggatcttgaaatgaggagattattgtcattgtccaggtaggcccttaatgccatcacaagtgcccttataagagagacacaaggagattagacatacgtagaagcacagaaggcagaaggcattttgaaaatggaaacagaaagatttaaagatacaatgttgttgtctttgaagatggacaaaggagtcatgagccaaggagactggaagaggaaaggaacagattgtctccctagaacctacagaggagtttggccctgctgacaccttgctctaggcccagaaaaattgatattggatttctagtccccagaacattgagagaatagatttatattagtctaagacaccaactttgtggtaatttgttgcagaagccataagaaaccaatacagatatggtacttagagcagggtcctgctgtaactcaacctaaaaatgtgaaagtggcttgggacgtggacagtggacataagctggatggattttgaagcacatgataaagaaacctggatttctttaaacagacttctgttagaaatatgaggataaaaggtgctaaggtgaggatttaggaggaggtgtgaggcacagtagagaatgcctacctcatttagagaatacatataacatcataaacagaaagctggtggacatattaatattaacagtgctttttttgagggctcagaaggaaattaagaatatgttattgaaaactagaagaaaggcaatcctttcagctacagaaatgtagctgaactgtgttctacgttgtatgaaaaacagaacgtgtaagtgatgaatttggatatttagctgaggaaatttccaagcaaagtgttgaaggatcagcctggtttcttcttcctgtttatagtaaaatgcaaaaagaaggagataaagtgaaaaaagaactgttaagcagaatcaaaatagcacttgatgatttgggaaattctcagcctatccagattgcaaaagatgctaagttgggagattcactgttaggaaagcatgctctgaagagaaggctaagggtacgactagacaaccttatgatagtgctgaagaaatgaaacatgtgatggatggattccctcagccacctcagcagaagtcaggaatagagatgaggttacctaggaaagatttgtagagaaccctctcatggcatgaatccctgtgacatacatgggaggaccacagagtttttgagaatgttgtatcagcagaaacactgccagctggaactaaaatagacaaagacagagcaagttgaaggaaggctgtcagactcccaaaattctacaggcaagttgataaaactattcagctgcaaacacatgatagctttaaagaaaaaggatcaccatgaatgcagagccttgggtacaaaggaagtgcagaggcatagaagcagagactctagccatgtgccctgaggcaggaccctcaagtcacagaggctgattcccaggccttgaaacctagtggagtttaccctgctggattttgaaattgcttgggaccagtgacttctttcttctttacatttttctccttttggaataggaatgtttataactgttatactatgcttgttctaccattgcattttaggaactgataactttttttctagttttatggactcagtaatggagaataattttgcccaggatagatcatacccagagtcttatccatatctgaattccattatttacattacacaatttgagatttttgagctgctgttacttaaatgagattttgggctttaatttaggtaggatacagaaggctgaataatggccacccaaaaatatcaggctgtaatccctggaatgtgtgactattaccttatatggtaaagttttgcagatgtgattaaattaaggattttgagatgaggagattatcctggattattcaagtgggcctcatataccatgacaaatgtccttataagagagaagcagagggagattagatgtacacacagaaggcagaagatgatttgaggatggaagcagagatttgaagatgctacactgttggctttcaacatagtggtaaggccatgagccaaggaatgtggccaaggaatgtggcaccagaagctgaaagaggcaggcaatggacgctgtcccctggagagcttctagatggaatacagccctgccaacaccttaatttcagccgagggaaacagatattagagttctggcctccagaactgtgagagaataaatttccgttgctttaagccatcaactttgtagtaatttgttatatcggccctagaaaagtaatacaggaatctaagacaactttgtgcagcccaaattaaggataatttgacaaaaacaaagcactatcttgtggtagatagtactaagcatggactcaaatagatgtaagttctaacctcttaacgaatggtgtgagtcagaaatgtctctaaacttttgttttctcattccgtctatgaggattaaatgaaataatctatgaaaagtatctaggaaagtatcaggcttataatggaacctcaaattttagttgaatctaaagggataacaaatttagttgactatatgcttttaaaacgttattttaaaatatagtttatttgcttacaataccttgactgctaggcactacaaaagcaaagggctttggttgtttgatacagaacctatccataaaagtagcctgtttttcctttgggcgatacattcaatctgacttgattaaagggttcccattaacctggcccaaaagccccttttctgaagataggcgctaaaccaatgggaacctttcctatttaaagaaacccctttatatttaaaggtgagagaagaccaatttttaaaaatgggtaattagtgttgccttagttcattttctgttgcttgtaagagactacctgaaactgggcaatttataagaaacaaagtttgtttcttatacttctgaagtctgagaagtccaaagtcatggagccgcatctgttgagggtattcttgctgctgtggactttctgcagggcaccgtggcagcagagaacatcacacatcaaaggggctgagtgtggtagttcaggttcctctttctcttcttataaagccgccagttctactcccattataatccattaatcaattaatccatcaatgaattaatccaatcatgagggcagagcattcatgaaccaatcaccttttggttcctggtgccatactggggattaaatttcaaaatgaattttggaggggacaaatattcaaaccatagcaaatgtaattaaatttcagtaactggtacattctgaaggatttttcaacatttatgttgacattactgtgtatttactctttgaaactaacatcttttatcatctatcttctctcactatgtgtagatttcctttaacatcctacctttaagcctctcacatctcaaaatgtttccataatacatagtacaactctcctaaaatttattaacatctttgtttacatcacttgaatttttatggcttggaaaaaaataagattctaaaactggcatttcctcttacagaaaatttgtttctctcatagtaataggggctatgaagttagagacagcagacaaatgttttgttgtcaagtcttagggtaatggagcttttatggagctgaggctgactgaaacagctgctaatttagagtgttatggagcttacttctttttctcctcaacactctttgtctactgagtgctgggactatagtaatttgagaagagagatgatggttgtgatattgggaaaggtggtgcaattaggaatggggctccagtgcaagggaacgagataagaaatgtgacccaggattaccttgagcacaaagagcacatgaggatcaattctaccaaccccagtgccattcaaggatttttacttatattatctgagactaggcaaataaatgcatatgttcattccaatccccaggaggtttctgaaactttcttagagatagaatgcccacagataagagttgtgcattctgatttgagatccataccctacctatttctctttataagaagattctttctaatgagcatttagaaaacaggcttggagaaggagaggaaagccagattggaaataggtagtaataacaggcagtaatagatatttctcaaacttgggtctatggaccacatgctcagaatgaactagtgtgcttgctcaaaatgaaaattataaaagtctcattctagatgcactgcacacagttggcggtggaggaggggggcaaatatgttcacacatagaaatctgaactttaataatctctaaaaaacaataaaattaagagtaacactaaattaagtgtagaggtgatgggaggaaaggacaaaggtcttttgagcttgagataatctgaaaaatttggcagaatgaatttcatacacatattccaggtttgcacattttgtatttttgcacatattctggaaagggagaaagttccagtatattctataaaaagggggtaatttttaaagtaagttaaaacacatgcttaagtttaaatgctccctgtttggtgaaagagattttctgataaatctgagattaggtcagttttcagctcactcttgtaagtgtctgagtgcgtgtgtgctaaagctggagggagggaagagaagatatgatattcatcaaaagctggctgttttctcaccatgtcagagtgctccgccactgctatttatgaggaagagctggggatgctacaccaaatgacagtcgtgtaaacaaacttttagggattgagagctcttcccttcttcttttttaagccacaggaatttatgcgtatgtgcgtctaaccccaagagtgttggcgggaacctagccctcaaagtgatcacttgaatttgcagcccagcctccaaaactggaaacatgaagaaggaatattgacgagattctatagtttcctcaggaaccatcttttgaactcaaagagttctttaatgtcttatggtttattgagaaaaaagtcctctattgtgagaaattctttccttcagctgtggagattatttgagtttcagttcctgtagatgaccttttctcagacgagtgaactgggactacagtcaaagctgtgactctgtccaccttgggtgtttcatgagtatacaaattataggctcatgtctatgtaagtgacatttctttatacctacaaaatacacataataccagattcatattccatataattcatggaatatctcctgtaaagtcataggaaacatgaatatgaaaatattaataaagaattgaccacatgggctggaagcagtggcccatacctgtaatctcaacactttggaagaccaaagcaggaggattgcttcagcccaggaatttgagatcagtctggacaacataaggagacctcatctctacaaaaaataaaaaaaaattagccaatcatgatggtgcttgctggtagtcctagctactcgagagtctgaggcgggaggatccctttcacttaggatgaggctgcagtgagccctgatggtgccactgaaccctagcctgggcaagagtgagaccctgtctcaaaaaaacaaaacaacaaaaaaattgacagcacaatacacactgacgcatttttcttctgtacagatttttaaaaatattttttcttcatatcaaaggcttcaaagtcatttaataagcttgacctatagtttcagctgaatttagcagtatgtaaccactgacaatggccataactaattagtctgagatgattattgtactgaacaacctaaagtagtgtggttgggtttttcacagtcccaaaagacttcatggaggtgtggaggtttgaaattatttgttgtatgcggtgctatgttgtatgaggcacttagccaaagacatctttttcctaatgttttgtgctccaaagaaggcatcaaattattattaaagaatctgaattgcatacttccaattttactcattgaaaaatgccatccatcaattgtcttattatatattttcccctattagtgactatgattatagatagaatagaaatatattgcctcagtcctagaccatcctaccctctcatgtccttattagtgactggcactctgattgaattagtaaaattttaaattagtaacattgacattttgtgaagaagcagactggggactagaaagggaaaaattagaatttggaataggttgttattaaagtcatatttttatagtttgttacattaactataaaaaaatccttgtttccctatgttgatcttgggcaaggttttgaggcaattcagttttaatcaacatatgtgttctttatgtgccactgtgttttttttaaattactttgtgtattagcacattacatttaaaaaacagatagacttaaaaaaaaaaaaacagcatacaaaattttcttaggcagcattgaatgattaatgcaaactgggtgaatggtcttaactactgatatctagctcctggttttagatattgtttcagttctgtttttagaataggagaaaataataataactaatgatattgaatgcttaggcctatgtactttatatgtacactcacttaatgctcaaaacaatcctagagtgtggatactaggttatcctattgtactgatgggaaaatttgaagctactgagaagccgagtaacttcactgagtagttaataattgatgagactaggatttgaacccaggtagtatggcttcagttcctgtgcacttaatcactaagctattgtgccctttgataagatgcaactagtctaatttgaaatccttcaattagacagaggcaaattagtcactatgctacatcagcaaattaaactttatagctagaggaaacttccatagagtattctgtgctttcttgacaaagtttgcctacataaagaacaaaaaaagatctcttcttgccatctacaaatgtttacctgcagttaaaaaagtctggctcctgaccacttttattttgaaactcctgatggctaaaaaagaaacagatgaaaaaaatggatttttttcagtagttacttttcaaaggatgataaatggaaacatttaaaaaatacttttatagtgtgaattcattttctatcagttctttcagtttgaaatttcttttgttatttgtttaatatcaaagatttttaaccttctcacatatgaggaacactatttattttattttcttgcagtttgagaaatatttgtcttgatgccaaactgcctgaagacatactcttttacaaagaaagcaaaattttaagagaagttaacttagggttgctgacatttattttcttctttatttaatcttcccatagttcccaagttcagaacttgaaatattatctttattaaagaaagtattcatattaaactcccacatctatatgtagccatttttaagtctaaagtataaattaaaaattatccagacactatcaaataaaatccccatcttagcaaatgcttttcccaatgaatttcaaccaaactaacctagaatcagcttttggcgaaccttgtactaatggaagatttgcttttttgcttttgaaggcaaattgatattcacaaatcatatgtcacaagccactaaaagtgtcagaatcccacagcaggcccttggtagcttgttaatctctcctgtttaaaggaaacagactaattcacttaaatataatgaaagccatgcctgccccagcttagtcccttaaagcgtcagcccatacaagtcctgccttctttcttcacctccttctttcctggctctgacaattaaacatgaaactaagaagcaatgctttccttaatgttgccatgtctgagttatttcagatgtcacatatgtgaaaattgtgaaaatgcaggatgcctttaaaaaaaattttcattgacaatatatgcaagggggtatccttgcccacctttcaccattgttctcaacaaagcataaaagataaatcaggatgttaaatgcagggaccagatgtatatataaccttttgccctcattattctaattggtttccattaggaggagggagggaaaagtaaaacagcaaaaaaaaaaaaaaaaaaaaaaaaggaaataattgatatagaggtgagagagtgaacttttaacattggattggctaaaatctgggaatattataatcagaataatagaagagcaatttcaaaagatcaaatcaaaggtgattcatataacaccaataaatggggaggaaataatttatcttaattttatgcgcccagaaatttttcaactgtggtcagtggtgccccaactatattatttttaacacttctcatatttacatgtatttttgtactttgaaggaagagccaaatgttctctgactcttattgcccagatacacacaatcacatttgtggctaactatatttgtatttagttctcccccttctaaccatgtgcattttccccttttagtagcattagctatttgtggttctccacactgaaatgaactgtaatatgcagtaaggttagatcttccaatcaaggacttcagtggcaaaggacctgagactgggatgacaacagagtcttactttcaacctaagtcttaatcaaagcgtagagtcataagattgaaaatctggagttagggcatgtaggggaaaaaaccattttcattgcaagcatactgtacatgttagtcatggctcagactgcaataggaattttatggagcaagaaaggggaggtgcaagaagaaggttttgagtttcctactaaatgtatttttaaatagcattacagcatcaggatttataaagaaagaagcaataacaaaaaggagctttttacctctctctttttttttttttttttgcaaattatttgaggatgaaattgaccaccagaaaagagacatgaggagaccaaaaggagctgactgattaaagagtgagctcctgaatgtggcaaagtctggaatcctacaagacaacctaccaaagcctgttgacagctcatcttggggtataaagtctgagtggaggtcttaggtatggaaggagctttcagaggtcatttaggtcacttcaatctctctccacaaatcacactctttgttattttagacagctcccaaccatgccgacattttacagtaataactataattggaaacttgacagtatccattaatttccaattctagtgtttggctatacctatttttatctatatattttttaactcatatctcttattctctcattttagctcattttgccttggtttctcctcagtaagcatgagaagtaattgggtttaaataacttacttaaaatctttacatattctatgtgaaaaccacctacacagataatattatcagatttctatcttggtttccttaaactcaaaggattcacactgtgtttcaattcattttgatactttatttggtttacaggatcattttacatgtatgatgttatttagttttcaccataacgccatcaattaggtagcatatgtggtagtatcttcattatgtatgtgagaaacctcatcatatttcacttaaactagaattctctttctttgatttctaatcagtaatctttccactgcactatcatattaatcttaaataaagatttgttagccacagcactatttcgaaccaggtaattctttgtggtaggagcctgccctgggttttgtagcacatctagcagcatccctggtctccacctactgaatgccagtaacacctccctcccagttgtgacagtcaaaaactgttgtaggctgaggaattgaaaatctgactatatttggagaataattgcattcaattaatattgagtgtcatgagattctctaaatataagatgtgcatcttcctgttaatatacataagattgctgagttatcatttttttgattatgacaatgcctgtcacctcacagaggatatcatccaatacgttttcttaatacgtctaagggctttggttctccatcaaaaagtaattttccacttttgctttaaaaagagtcacagtaagaaatgctatttctttttttcttagaaatttaattttcaaaagaagaaaatgtaactcagatgggttttgaaagtctcagccacctcagccttggtggatagccaggatctcagccctggtgttttctttctttttttatggtggtccctgaggttgtgagtgtctgaaatatatagtgaattctacaatgcaattcaaatataaggaagtcttgtttattaccaggtgcaaacttgttgcttcattaccatgtgaaccagggctatcttatttgtgtaactgaggttataggagagatatcaactatgaaggaaaatgtatgtggagaccaaaagtgtatatgaaataatgaataatttcacgtgaatatgtagttagtgattgcccaccttctaagttaaaaatagatttcttaatgacataggacaaataccaggttgctgaaagttacttcttccatattgtaaagaggctgtttcaatgaagaaagatattatcaatgaccttattggaaagtcacatttaaggtgggtgaatccttcatgctctatttttgcccttcaacaaacatatcttttttggtgcttcttgagtgtataagacatttcatgggaagtttcaaactctgtgaaatttgcttgtacaaataacagaaaatttagagcataaagctttgaaatgtctttaaattttccaatctatgttttgaaaattactgttgagttcaagaatgcctaatggctgagtcctgttgcttcactgtaagtataattgtatttccttatgaaggttaaaattcccatttcatttcttccatttatctaagtttccaggtgtcattcacaattagccattaaaaatgattgtgtttaattgagatttaccagtggctttaatacaagttttcacttaaagagcaattatgttttatattgcaagttgaaaactgtattaacggtgaattcagtgaaggaaatttagaggtctgaggctaatgaaaactttttaatgacatgcaatacctaggaaatcatattcatctgttgtttttcacaaaaactaactccaggaaaattgatattgttgtagaatattggaaaagttacagaggacactatttagaagtacattcattattcaacaactactttcagtacttactacatgccaggccccgtgaaatattttggggacaacataattaataattgctgtctcccactaaaaccagagacagacgcataaacacataatcatacagtacagtaagtgctggaataacagggcagtggaggcacaaaaagagaggggaagagataaccctgcctaggtctgagtgtttagggtaggaacactcagagctgaatagtgtcaattcaaatttctccaagaggaaatttctttagcagagggtaaaggatatataggatatctccaagacattagggacattttgagtagaggagggaagcagcatctataagggcagataagattacaacaatttgtcatgctgagggagtatttgttctctaacatatagtatccattgatactctatgatatctctatatgggataagaggacaaaaggaatacaggactagctcctgtgaataacactagtgttgtcaaatatgaggaaatatagtaagttgctttgtgctgtttgctgggttataggagttctccctatgtcctagttaattttatcaaaaattgtaacattacagtgagtgctagaataacagggcagcagaggtacaaaaaaagagagaagagttaaccctgcctaggtctgagtgtttggagcaagaatactaggaaaggaatggtgtcaattcaagtttcaagaaggaatctctttagcaaaggataaaagatatatggactatctccaagacattggggacattgtgaatagaggacggaaagtagcacacatcatggagcagatgatgttattttcatttttcagaagaattaaggagtaactagtccaagttcacaaagatggtaaatagcagagccatgatgccaagctaggtctgcttgactccgattttcatgaaatatcatctctcttctatgtgttttatctggtttggcatggctttttagagagtatagtctcttcaagggatcttcagggaatagaagcaggaggcataaagacatgagatttgtttgggaaaaataaatacagatcacctttctggtaaagggagcagttgagagagtgataggaggtgactttgtgtccatatggatttgagaaagagaccttttgcagatgcagacgaaaggaaatgagaatggtatataggtgcttaggaagtagagactacaaaactgctgaataggcaaaccaaaatcagggaaaattttcaagcaaacttacagaaaatagcaaatgcagatttattaagtgaaatataataatgagtttgtaaggcataaagaatctgtagaagcccaatgtttccaaatcttgccagactatgcaagacagacttctctctcctccctggctcagctcctaaacagagctattatctgcagagataattccagatgctctgaccccttccaaattcttatttgatgatcagtcatctggagtggaactcttactccccattgaggtttcagagtgatgcaccaaactttgctctcctaattaacactgtgggtcatccccatgcacccagtagttcttagagactggactgtcaggctctcatatctatgacattgcctctagggaggagaaggatgggtggaccccttgagtggccttcaaatgcctcagcattaaaatagaaagctctcatgagtgcctgaaaaatctcagctgttatttctccagcttaaaaatgtttgaactcagaaagcaataaactacaagctaagaagacccaaggagcttctgtggggcagcagaagctgcttttagctgaactagcaaaccctctgattgtcatcattccagtcaagatttcagcactgaagaataaccttgagagttgctgctgcaaggcaactcttatcatataaaatgtttactattccttttaagtatacagagtaccttttaacaaagacatttctgggaactttggtttgaattctttattgggtcaatgagataacaaggatgacattcattcagaaaagttagaagttgaagttaggaaaattagagaatttacctatgctttctgcagcagcaggcctctttaaaagatccaaattttgaaatatcattaggacagaatatttggtcgataaagtagtcaggccattaatattctttcacaattattcacttggtgattgtgttgctacaggtgacttgcttctttttagtgatagtgttaatgattgtcatcatgccttgcaaatattaattacatccttgcaggcatcatataaagagacattaagatttcagctcccatgctttaaagtcttgcaattaaatttagaaaacaagacagctagtattctgataagtacctataaaaattcctaattgttgatgcaaaagaaatgacatataaaattaatacagaggtaggtatgagaagccatgaggtagacaagaggtattctttgaaggaagcctgtagtctagagaagtggctgcagggaattcaaagtgatggccttgacttaaattacaaatgttgctgttctgttcagggatcaaggatcagatgcttatggttgaatgaatgattgccctagggaagggagtgttaaagattagcagggaaaactaaatgggcatatcaaaagccatcagaagatatcaaatgtcaggataagtaggaaaactcattaacacattaaatgttttgccctttaaaactacttttcttgatggagtatattttaaacaattaagtgaaacctgttttaattaaagattcttctgatgtgattaagctgtcattttacagtggcatgatgaattgtaacacttggacttcaaaattctccaagtgcattttggcaaaagctattccatgaagtcataatctgtcgtcaagaaccaaagcattgaatgaatactggtcaatgcaaatttgtttctgtttttcagtgctgtcaggatggggatgatttgaagggcaactcttagggttcttaaaaggatataggtattccaaggtgattcagttcaggaaggtggcattttctaaacaatcacaggactaaccctggatcacatattttcaagatggaattagattttctagtccagtagaaagtagaatgatagaccatgagacttggaagggttagggggtgaaagttggagtggatgatgagaaattacataatgggtatgatgtatgttattcagatgataggtaccatcaaagccctcacttgaccattacacatgtaacaaaattccacttgtatcccataaatttatatgaatttttcaaaaagagattttccagtccagtaaggtccctacagtaagccactgaagaaagtggcattatcaccattttataatgaggaaaaataagattttgagacattaagccaatttactgaagttaccccactaataatttaacactttagcccagtctattagactgaaaagtccactgtacaacaccctccctcagattcaatctgcaggattggtctagaaaagatttatctaattcacattttccttcttccaggtaatgtggaagtttttgagattcagtgattttcctggaatgctatgcaatgacaaatgtcaggaagagtaattaagaattgatttccctgtaggattcagaatatcatatgtcattatctttgaatatgcatgtgatttttgcaatgctatcccattccctgtgtgccaatataactttttcttccaaaatcttttatgcaaaaatatgcaagttaatagcattacctagtagcaatcctcaaaactttactggcacataaattaaatataagcactctccaaaggtgcttagatggtgcaaaagaagtacaagatgataatttgactttgctgacttcagatcttgttaggaggctctcattggggtataacactgcacataatcaactgctaaaaggcttgagccattgtgtatgccaaggataagcgtatatgtattgcatcacatagagaacaaatgtaccacaaaagcagagggtctttattggagaatgttattctgagatttttattttaggagggtaatcctattaattatctaatttccatttttctcttggcttctaaagtagatgtatcaattttagatacaatgtactgactttttatgttgtcatgagtagagcatgtaccactaaaactgatgtgcggagataatatgcaccacatggtttcttactgtctatatgtctggctttaatcacagattcttcatgaaatgttgcaagcctggggtgagctagctgttagattcttctggggtacagcctgggctgtggattattggtgaaactgcattacgaggctactggggttaattatgtctgaaagttttcagtacaatccacatcagttgacactctgtgcatactacataaacagtctggagggagacctttattagcagagcaagaaagcagctagctgtctgtgttctataatgtcctttgttttttagagcttctgactcatgtagcccttctgttttatttaatgtattcttaatcaaatatgtgcttattaagccaaataatgaagagtcaagaggttcaaatcttgaacataaattccctatgtctaagaacaattcttaatttaagattatgtgccccaggacagcagcccactgaatctgggggaaagcatgccaatgtttacccagaatttcaacatacattgtggcactggaagccatcctaacctgcagaagtgctatgaagaaattagccaatgaacatacgttaaagatcttctcccttgtgtatgtcgtatcttatctgttggaacttctgccatgtagaatcttcctaattgtcaattaaccataatgttcttatgtataatattctttctgttcctaaacaaaagtagggtggaagaacattagtctaagctaatccagaaatgcccttgcccccctcaagactcctgactttaaagtcactcagcctcttgggtacacgatttctactttacctggcacgaactctgcatcatcttataatgtggtgggtttggtaagttctggaggagacagaggggaatgcattattccaacaggtcttcctaagaaccttcatggcagaaaagactaggaagcttgagggtcctgatggccttttaagtgaaaaagcacttatttggctatacttagctataaggagaaatctgtattcaccaagatgttgaaaagcaggagaattttgcccccaattggcatctttgtctctaaactacctaagcacctcacaaagagaggcaaaatagcataatggttaagagcaaggacactggatcagatgctgagtttgaatcctggcttcaccacttaagaggtatgtgaccgtagacaagttattgagcctcatgtgcctattacctctcagtaaaatgtaaaacagggatactaattgtacctcactcaaggctatcatgatggttaaattacttgatatttgtcacttggtaagtgttaaacagtttcaactgtgaattctcaattccatccatttctctgatagaaagttcattattagtcatttatgtatagatcaacttttatatctataaactaataagaaaaaaacctgacaaaactacaagataacttcttgctcttagcccaacactgggaagctgtgactttgtgcaaaaacatgatctttcagggtttaagattcctcctctgtaaaagaaaggttgaagtagatcactggtatggcccctttctggtctaacattaagtttttccaactttagggttttgttgttgctaaacaaaaataactcatcatgtttcgaaattacattagaatgttgtttttttttatgaaaatcttaggaaattggaggtagtgtcggtgatctaaatggcatctcttacctacacatacatattttttttgtaataatctttttttcaaacagttttggcagttgaagcagaaagaagtgaaacattagatttttgaaagccaagtgtactgggggaaagggatgtaaggtcacctggttagtttgaagtgtgtaattcttttctctctcacctcattctggcttcttcagaatggcagttgggtaatactgcatcagtttgataaggctgccttgcccttcctaacaactaaaaccatcctagacaccttttcatggacactccctccattaaagcaccagaactttagaactgcttttaaaaatagcagataaattaatgatgttcttgagtaacacttttcactagaagagtctgactgagaaacaaagttgataatgctgtacaatattcttatattgaataaaggcgtggagtctttctgccttgagaaacatagtcagaaaatagccctgggacaccgatattagaaaaggaacagacacaaactccattgcatttggctgccagtaaagagctcattttgtttacattattactctccaaagaagacaagatgaaattgtcattatccaaatgttgtctagtgttttccaactaagttcctgagctaaagtaagagattgccaaaaaccatgtttacaacactgaatgcattgtgtaataaagtgttaggtagatcagctaataaaattacttattttagacttagataagttgaatttaggtttaattcactacccaatggggacaaagtgagttgattttctgataaactgaaacatacccaactttttgttgataactgagtgtaagagcctttagatattacccacgggaaccactccctttcagtgggaaaagcctgccattctcaactgaattgctaatggtcatctatttaattgattttgattctcaaatttgttaaaatgcagttggcaaagaatattttttattgcccctgttggctgacctatggactatgagctggaatagagttggtgaaagtttaggaatggagctggaattaaatgcttagattcccatcatttatttcctaagggaaattgtaacaatttcacctcgctctttttcctgacactaagaattgtatgaccaacactctcttgttaaagtattagtggatcaagtcttttgggaaaagctgcaatgtactttgaacatttgacccacagtaccacttaggataatttatctgaatttattttatttataagatgcagaataggaaactgaatcatgacgctttaaatataaatacactctgttctcagcatattcctgcagagtcatatgaaagaggtcctctcttccacgctgcattgtattttacttttatcattttagttttgtttaagtattgcggaaaaatatggaccattatattctccctgtttttattttaccttctgtgcactaacaattagtcttcctttgttttgcactatgagtctgaaacgtttgttagttctctgctttcttagtaaatggtaccatttaaaatagattgtaaatatatattgcatagatatttaaatatatattataaatacatagaaatatatatgcatactcagagtcctctataagctctctgttctacttgagacttttcatatcagatccttatactgttttctctttgtgtttgatctgttcttttatcatgtctacaacaaagatgtttaacctatgtacaaagggaatataatttgactttatataccgccttttgaagatcatttttaatactagtttgaagccacatacatcagagtggtttggtaagatgagattttacacgtcttgaaaagtccaggagagaatggttatacttggtgaatcaaattgtcttctttcctaccccatttttccaactctaaatacaagtgaaatgaatgttcttgtaaattgtactttctttttatggcttttagaccatagttctatacactatgtgcacacataatttagagactaggtacatgcgaagagaataaagtcactgccttttaaagctctgtgtttacatcaacactgtctagctagatagcctgatgaatgaaaaagggaactggtattataatggtagttaattaagacagctaataaaaccaagatctgatcgaagctgcatctgggagtgaggttttaagaagcaggcaggactgtgcactaattgttggattgttattatattacatgtgtcttggagaggagatagtgtgactcagggtaggcagcagctgaatcagtagcactgggttttatccatcacaaatttagtattaaaacttcagctgtgttataactttcctaatggagcaaattccaacacatgacttgctgcaacagccaaacacacctaccactgcttttagagattttaaccctggtatgaggacaggttctatttggatactttctgagcaggatagaaagtttacttacatctgcgcggtgatgcttatggttctgctgtaacaatgaacaaaattagtgtctctgaagattttcagatgcaattagatgtaagagtaagttgattatttgacctaaaaaagcccacataactgtcctttagtatgagatagttgtagagacagggaagatataacagagtattaactataatatactactgattatattattttaatgatttaataagcacttttaattaaaaatatgccttcctcttagtccatgtgagaaatgccattaattataatattaaggcaacatatatgctagacaaaagcattttagtaagaacacatgagtgttcaacatgccatccactctctactttctatttaagagttttacttacaaaggtgttactagagatgcaacttaaggatctagtatattctttgttaaggagtctgtttgtattctcttaagaaaagggaacattttaatattcaaaggcaaggtagatccatcatattttaattcacctaaactaagaactccagagagagttatagcttattattcactatcttactctatctttatattattacttggttgtattgctaccaatatgaaagaaaaaaatagaggaaaaaatcctcaaattacttatgacataataggtgcactttttgcaaatttattttatttcagaaatggaagcatgttagctggctggataaaccggaactactctttcaagtctggctgtattctagcagagaaaagaagagcccccgccccccagcttttttcatattaaattattgagttttctcttcccattgatggcttagtagatagttcacttaatcttaaagcaaatagggagagatggtggaacttctaccactttccttacttaccagctatttttgctgaggaaaaagtttctagatacattctaattttgttaagagaatcttttaaattagaaggtacctgagctctcataatatttgaaatgtaccctcaggatttactttttaaaatttattatttctacataattaccaaggggcttgacgcaatttaaaaatacaaacacaaaacaaaactaatgaagtgagaaaatgagaataaaagctaaataatgagggtttagttacaacagttttattggaaactgtactggagattgctataaatcataacatttagctccaagcttattgaaatgtaaagaaaaaagaaaacgcagaacaaaccatatagttctcaacaaaaaaacaaagcacagcaagcaaagcatgaaaactaacaacaacaataacaaacaggtcatttagacgataaacaaatatatcctggcactggattcttacatggatattgaagagggactatggactatgcattgggaatctaatattaactaagaagaaagtgttcacaagacactgttctaggaaatttacctgcataatctcattcataatcatcataagatcgctatgaaatcagttgcgtctctgtaataaaaatgagaacacagagactatttggtttcattgcacctacagatggcattgtgtcatactaagaaatcttttttaaattacaaaacattttctctaagaacgtatctcaacaattcttgtgagaagcctagcatataatattaggaagactgaaagtttttatttttaatagtgtcaaaaacaacttctgttagcatttattgaggacatattataattaactcgttcaaatctcagaaaaatccttctgttaggtacaaataatattttattgatgaggaaaaagagtcacagagggaatcctgggagcactttcaaataccgtaatgagagcttctcaggtatcttctaaattgaaaggttctcttggtagaatcaaatgtacctggaaaatgttttctcagcataagaagcctgggtaaacataattatagaacttagacatttccccaggagaatgtccaaatcatgtactcctgccaatctaaactagcacaggggtgggttttaagatactttcatagatgtttttgagctttagactgttgatctcaaaaattagctgtctcaatcagagttatgtcagcagctgagtaggagtcaggtggagttcccgaaatgcacagtggatattttgttcctaaaatgtaagagctaggcttgtaccctggccctggtaagggtcatgctacctctgtattggtgtccccttttagaggtatgaagggccaggcatgagttccctctgtggcagcttttgcattgtgtacaagcaactctttgactaaaccattgaaatctactgtcagagcacaagatttcaatcaaagaattgcatcgaaagtccctcaaatcctcaccctgctaacggtgtaagtggcatggcgttatctttatcagtcccaatgttgtgcccagtgctgaatgatggtcacccatgcagtgcatccccaaatgtgctcctctttcatggactatgcttctaattaatttttggccctacttagtctgagatggaatcactgataatggcataactgattgattctataaatatttattagtttcttttactactgagttagtagtattaaaattagtagtagtagtattagtagtattagaatttcacacttggaaaatccagaccttaaacgtaaaaatcaagatataaatcagtaaatatttaactctagatgtgtgtgcacgtgtgtgtgtaatttaaaaaaggaatgtaactgttgtttatcttttggcaaaaattattacactgaatcataaactattgactccatctctccaaatttatcctgcaagaatggaaattcatagggttcaaactaataatggtagtaaaatattaatagaaatgttagtatagaaagtagtcacaggtaatctggaagtcttcttccttacagataagattccaacgatgggactgacttggaaagcattgatttctggttttcagaggaaaagtttacagagtagcatgtttctttgtttaattaaacggtatttttgatctaacatttaactttagttttacttatagttctcaaatcgtcagagatatttctatttttaaatctttggaaaaccactgaactgttaaaaaaagattctatcaaatgggataaatcagagaaggtgacatctgttattgatataggacatctcaatataatctctaattatcaaaaatatgagaatgaactgctgactcattttgccaattatgtgtctatctatcttattatctgtttattgttgggtgagaaatcaaaccacttatttatataagaaaattgacacatactgtcatgtgtttaaagcatgtcttttgtatctgattagtgtattttgaatgagataaataagaaattctgccatagattagcatcttcttcctaaagaaaaaggataagagaataagagtatttttagacacaataaaattcaaattttaatgcgggctaaacttaattagctcacttttcttcatttaacaatgccagagtaagcagtcttacccaagaaggttaattttaattaatagatatttacctactttaagtacttttaaaattcttagccatgtgaaatataataattatcagcgggcattatttactaagctaccaaatgatacaaataaaaacaagttttctgaacttggaaactttcaacctggaagttaccaaaatcacattcttttaaagaaataaccaaagtgctatctaatacatggaacaaaaccaagaatgagccatagtaatttaataatctctttgctaaacctagatactgattttttttttcatgaaatgaatgatggatagaataaaacatttttatttaaaaaaatttgatacatcattttaaattggatacatttctttaaaataatacacagcaataatatataaaacttaaggacatatatgtatattatatatatacacacacctatgtgttgtatgtatgtatatgttatgcatacatatgtttatacatgtaaacattacttttttattgctaatagtattgcatgcccattgttagaaatatgtagataaagaggtattaaaatagctactcataattctactacctagaagtacctgttgttctattttggtgaatttctttttatttttttccctgtatctatgattatataattacacattaaatggataatctgaggagacatcatactgtatacagtacattttatcctgggtttaggcttttctcatggatactttttcatatcattaaaatattcatatgtattagtttaagattcttatattctgacttctagttatatcttagtttacttaaccatttatgtatataatagataatatacatttattatatatatttagaagagatacatatcaatagttaaaatattcacaataatcctgtttgatattcttattatctcagtttttgacgtggacaatttcaactctagatgtgtatgtgtgtgtgcgtgtgtgtgtgtgtttgtttaattttaaaaaaggaatgaacctgttgttcatcttttgtcataaattattacactgagccatacactattgagtatacttttccaaatatattctagaaaaatagacactcacatgattcaatacagtacatccaaataacaaactactaaacaaatgagacttagacttttcataactttagatggcaaaactaggatttgaacccaggtctgtaggaatccaaagactatgaccttaactactcaactttattactttcaaatacttgtctagaagccaactgtttaggtctaagagtattcaaaatttttaagttattgatagatattcccaaagagttttttagttttctatgaatatatttagccttagcaaaagtagaatatcaagctattttcaaaatgaagtatgagtcaaactgatatgtcatgtacactttggccatatctaacttagtgatttcaaaataagagactaaagcctagcagagcaaataaaatggcatatatagagatatatacacacacacatatatatatattctgatatatatatatatatatatatatatatatatatatatatatatatataaagaaaatgctttcccattttcttaggcaagaattatcattgttaaaagtattaagaccacaaagaccttaatttgtaaagtggtggtaaaaaaaagatagctaaattgctttccatatgaatttaataattatctggctgctggggtaagcagcaagacagatgagatggctgaagaaataggaggtgaaacaaaacagaatgaggcaaaagattatagagacaagtgcctatgagaaatttgctcaaagtagaaagtgggagaggggcagagaatgtaaccaaagtatcctagaaaataaacacaactttaatttaatcttaaattatttaagctggacagatctatagtctctttttagctgcaaatgttaagcaaagtctgctgtgttcataaatttcttgaacgagttttggaaggaaacattaaagaagagaaaccctggttcaccatgcaactagtgcagagcataaggaagaagagtcatagaaaatgaaatcagaattgtagtggacacataagattgagcatttagggtaagccagaatttagaatcagaggtgatgaggggaaacataagtcaccacttcccagaattctccccatgtagagctgccagataaaaattaaatatggatttctattaaatggcttccaattaaatatggacttcagataaataacagattctttttataaatatgtccaaaatattgcatgtaatataaatacacgtaaaataaaaagccattcgttatatatcttaaattcaaatttaattgggaattctgtatttttatttgctaagtctaggaacctgctcctaagaacctctagagataatgggaaggctggaagttccaccttatctgggatgggagtgatagaaacttgcactgaactttctttacaactcagaaggtctggtgaacacaaatatgcacaattagtgtcaaaatgattataaaatccagatcccatgttaagtgccctttcttctgtccctagttctgttttcagaactaggtgagactactccattagtaagttgtgttactatggcaaggaagtatggcaagactatcccattagtaagttttattagtgttaactttgtttaatacttatggaatatttcatcctactattgccagtggtttcacaaaagcaaattatatttttaataactcactgttaacccacctttatatgcacaacttttcagaacatatgagacatttcttttaaaaaaaagttgcaagtctacttgtgccttattaactacttcattcatggtatagagagatggcaggtagaatcctcaggagcttctgttaaccatccacatattgtcaaacatttttgcccagacacattctatttacattttatagcaaatcgtggcagtcttaggaaaagacatattccagagggattgtgtgtaagactcctatactgaccttctaaattaaataaaaatatagcatgttcccaacataaagaaaatcatattatagacactaaaaacagttgttctatataagacaaatggtaaaaaagaaaataatagtttttctataggaacaataaaaaccttgagacagagccattgggtcccctccaccagcacaatggaatcctactataagggcatgagatgagtttaattagcaagtattgattgagcacttattttgtgctatagctagaccttttgctctgtgctaaaattgcaaagtaggtcagtccatgctgtcctgtatgatttattcatgtggcaatcaatatttgggcaaagtataaaaggtgccccccaaaaaagagtgattcttagcaagagaagaaagatttgccagggacgaagcatcacaaagaacagccctcagagtttttgaaggatggatatagttttgctaaacaaaaagaagttctattcatactgccctaagatgtgtgaaaaatggcaagtacatcaatattgcttgagtaaaatatgaggtgggcagagccagactaggcaaaagttaccatattataaagggttgctcgcatttcttcatgatggtgacataaaaaccaaagtgttttaggcaggagagtgtgacttgatcccatatgtaactcagagtgatcacttttgacagtgacgtgaaggagagagtcgagtgaggcaggagtcatcccaggaagcatagggaggacgcagttatactagtctgaaagggagatattatgactcatgcttaacttcatgagggatagattcatccattcattcaattatctatttttttctacaaatatttattgagtatttactatgttcttggccttcctctaggtactgattatatgaaagcaaaccaacaaagacatccccaccctcatggtggttatgctgtagagaacagaaataaatttttcaaaagcatattaattcattttttgaaatttataatttataattttattttttaagaaacaaaataagatgctgtgctagaactgcattattcaattcagtagtcactagccaagcatagctattttaatttaaattagttgacacagtaaaagaaaactaaataaaattattctgtttctcaatattattagtcatattttaaatgctcaacactcacatattggatagcataagttatcaaacatttctattattgcaaaaagttcaagatggagctactttgagaccgattatttgtatcagattatttacttatgaggcgatgtactgagacctgaatgacaaagtgtagagtaagctatacaaaaatcaaggaaataaagctcaggcagagtgcatgagttctgaagaatgaaatcaatgtgtgaaaaagaaagaaggccaagtgggctggagaatgttgtgtgaagtagagagtagtgggagaagtttggaaagtagatcctggtcatgtaggccatgctagaaaatctgacatttattctaactaagtagtgatgttatctccaaaattaattgacatgttaatttgggaagctagtgaatggattgatgtaagtgaaaaacatgatataattttatatttgttttttttaattcactttattttggggactgggaaaaatgaaggaaatatacaaatgagaaaaaaatgatggttttggatagcactgacagtggagctgtagagaagtgaaagagtcaagacattttggaggcagaacaagtaagtgttcatgtttgactgtaaatgggggtgggaggtacatagataagaggaaaagagtaagtggtgttgttttgtgctgagattaaggctgtgggacaaggaacagcttcaggaggacaaatcagttaattttggagataagatcactattagaatttcaagggcagccgttaagtgattagaggtttatgaggttagagaataggtcaaggctggagatgtatgtttgggcatcatcaacatatgtattgaatttaaagtcatgaaacagaagtgcctgtggaggcagcatagaacacttaggcctgagtccaacgtcaacccaatattttcatactgagtagagcaagagaagaaaacagaaaaatgacttagaagtactaaagggatgggagaaaaatcaagagagtgatatctcagaagatggatgagaaaactttccaagtatagaaggtcagctatgttgaatgccatgcaaggaggggtaagatgagaaaagacagttgaaattgagcagcattgttggtgcctgatgaaaggcaagtagaagttcgatttttttttttttttttgagctgagaaagggaatgaacagtgaaacaatggggaaaaactttctatttctgagaagggaagcaaagaaaaaaaaggagagaaattttgaggaaagcttgaggtcaaaataaggttgtttttgtgaagagatccccaagcatgttgcagagaatgatcctgtacattgtcagatattgatgatggtaatggtcattcactttggttaagatgaatggaagttcaataataatggaaaattgtaatgcattaatagtcttgtaaacagaaaatataaaacctagctgaagtattatattcttggttaaattctatttgttcagttttattttactgatttttttcctcaaggtatcttcaaatcaagtcttcccattttctcattctatattcattattttccagcagtatattgtttgttttggaatttgaagactatttttaaggtcaagatattttgcagactcccacatggggtcattatacctacattatgatgaaaagctagtgtggatgctttaaaataaattttattattttgtcactaaaaatatccaaatatatttgaaaatagtgtatatacataatatatgctgatttaagttacagacaatctctaatgtgactctcgattgtaataactaaagttttttaggcacccaaggccacagatgggtggtccctatcaacatgaaaagaagggagctaacaagtaattgtatatactgcttattgccttgaatcagggaaactacaaggaatatacaagtgctattatccaaattcgaaaagttattttttcaaatgaaatcctttgaaagttccaaaacttcctttcttttactgacccctagaaaccactgacccagtacatactataaaatcataacaatgctgaaacttagttattattagcaaatgttccacagaaaatcatcatgaaggaaaacttgtactctctcaatcctgagtattggaaatgcaaaatatttgaccctggaagcagaagtgggtcagagagttggtttaacacacacacacacacacacacacacacacacacagagaaaacaaaacagtaaaaccctaattttggtaaaggaaaaaaaaaaggttaacttttgccccaactataactcatctcaaatctgatatttttactgtttgtttgaaattttgtaataaaaaaattcatttaatctttttaacaactttcaaatgacacatcttgtggtttttatagtaccctagtaacaaatacaattgcttaaaatgctattttcctaacagtttgtctttattcagacatggtattatcatctgcctgaatttatccccattcaagcatgaatccataaaattggactgtggcaatgggatgcattaaagtacttgggctggactagcagcttgcctcagacttggagctgacagcttttctgtgttttcagtctcacctgtctctctgttctctatggacgtctctttgcttgcactctgaccagatctctggccatccaacctggcttgttctgttggcccctatgtctggattcacatttgttcacctctagttctttaatcagagttgtgctttgatctgtctgcattcagcaagagcttttactttcctgggttgttaaaccatcattagcagtattttctcaacaccagtcattcacataccactactacaaatgttgccatatttgtcaggccctatcctattatttccttaattcttttcctgcaaattgactcactttgtatactaaaattaatgtatttttaaagacaaattattatatcactctaataaagggaaagccaatatctgttgccataaatagaaggtgatcacataattaaatataataaaaacaagataccatggttaaattgtggctatatgctatgttttggcaaaagaatctaagtctgaggcctcagatttcatttgttggaaagggagataagcaagttttccagaggtgttaaggacatattagtaataaactgagattttccttgacataaccagaagaactgaaaaacaggaagtgtttcattttatgatttaatgttatttcatactacttgtatgtgccacctcagaagcatctcatataccctcaacatagcatgaaacatctagaatgttatgtgtcccacattttagaagacagaattttaatgtaaaattagctatcagagagtttgtgctaaacatgaataaaactggataatacaatcaggtaatgcatgatcttcagtcgtatttcctatggttgagctataatattagcaataggctttaaggatctttagacttaagggatccaagataagttatgattgtaatgattctttgttttcttgtcatttgataagactttaggattcatagcatagatttcagtggggaataagtacttgtacctaacttgtacataaagtggaaatttaaattcaaaaaaattttttaagtagagcttttaaatgaaaaattatttttgtaaacaaaatgcctgtcatgaactataaactctagacgagttatttttatttgttcatgtaagggcaacacacacccacccacctctatttgaatctgcacccatctctggaaatgcttctttcctgaagttcggaactttgatggaatggtgaggaaattattatataactaatgagatcctaccaaactatgtgatgcatttggggaagaggattaatgctttggagctagtagacaatgcaataaaatctagagactcactttactccgctagaattggcttactgttctagattctgtttactcatgtaaaacagagagactgacatccccaaatttggagacatcatggatttcctttagacggcaacattctccaacttaaattactgaaatatctcaaagcaagcaacttattttttttaatgtagatgaactttagtgtgggcaaggtaacgaacttcctaaatattttcattccctttatgtaagggtactctgtcttcctcctgcctgtggtttactagagtgcttaacctatacgtggcaatcagtaaacacagcactttgaaaaatgaattctggttagtttttttttttttcctaaaactttctataaatttcttaatccaaaatccttgttcccttgaactccaattgaagttatttttgatacaatttattcagaaacttatatgttataaaagaatttgtgacatctatatctaatatttattaactttcacaaattgttttgtcctttgacagaatgtgcctaacacaatgtacactgaatttcaatgactgaagtaaaagtaaggtctagatgctggagtgtgacttctacttctttgtatcctatagttaataatacataagggctacttcataagtgtgcattgatttgtttgtgatactcatgaagatcaaatttaagactaaaataatataattttataaaggagacagctaattaaggaatacgtggtagcatggactgagaataaaaatttactaacttccagatagttttaaattcacaaatgttattgctagagtgaggttatcaagatatgcatacactctttttaaagaatattatagaaaagacaatattgctttcccctctctaccttcaatcatcaccaaatggtatttctgcaaagcatacaagattagttggaatttagaaataaaataaccactatttgttgaatactttccataccttaaataatgtattacttacataaattctatgaagtagggttgttcaatatcaatcaaaagagtataaggcagacctggttcagctctgtctgattttaaattctatgatgaacccactgtcccatgatttctccccagtcactttggatcttattcagaaatgtttctgttcttacatttaggtcctatagcagtgctgagcaaccataacagttccctagaggttttaggtcttcagataatgggtgttaaatctcctccaagattattacattacagtaagttggtctattatgtggacattatagagctttcattgctctgcttcaaagaatagactaaaataacttacctacttgaaaacactcatcaggtttatgttttttttttaataacaaggcagtgaattatggaaatagctcagactatctattatctatctgaatatataaaataataaaccatatcatatttcttcttcattgtattcagtaaaccagatacatgacctaatgaagtataacggagtggtgtagtttttttacattcttgctcctaagtattccctacaagtgaaattttaccaatttttatccaatgcagcattccttatgtataccacattttcaaaaagacatgttcaatgaatctgcataatatctgtaggaaagaagcaagcataatgttttccattgtaaaacattatgctataatagttattagattaacaagcatttactgccatttatttcacctagaactcatatgcaaacttttacgctagaactgagaaatcagatagactctagaaatgctaaaaaataagaacaaaggaagacttgattagaatatatttttctcatattaaatggaaagtatatttcaagtcatcatgtaaaccaatccttaacttgggggtggttctcatgttaatttctaaggtttatacatggacatggtttttctttctttctttcttttgttttgtctctccccttccaccttggattgattctttctttgactgtcaattcttttttcttttttttttttcttttgggcaaaggacaacacatacattcctaattctcttttcttctcaacatttctgagtttaccaaaggcggtagattttaaattcctagaaaaaaaggttagctgtgtatcaagaaagttattccaccagagtctaaattctcaaaagcattttctttcagaatttcatgttaagtaacactctgctgtcctaaagtgaaaaccaacaactatcaatcatttaagtcagtattgtcagaataatgaaaattaaaattatactgataaaagacaatacctgtagccatcacaacaaagaaacatttatctgtgtcctattattaaacacttcttttcatgctgcatataatgtcattgaactttcaaaattttattatatctcataatatttttctattaggttggtgctgtatcttttttaaaaagctaaagaaagtacaccaagaagctaaaatgttggcactttatggatacaagggtagatttcaaaggcttataaccctcactaaagtgtataacttttgggcaattcttgaagggacagggaaaggagtgttattcctattctttgggctactttcagttcattcacctcccaaattctgtgttgatgccaactcctgcttttcccctccactgctatttcagtctcatctgctcccgtcatttttatacactcctttcttctttaactccatttctccttaactgtccaaagtggtagatgtgtgcgaaatggaaaatttcatggccactttggcttagtagtggcaagtggtcactgggacaaagatgaggctactttctaaagttcttcactcccagcctctcataaatcttgattatcttgatttcttaccgttttcctgtcctattaactaaccaaatagtggagaaagaaagttcaactcaagagaaatgagcaaagttctaccttaatttaaagcaatgtataagaatgatgcaagagatggacattgataggaacatgaaaagaatgggggcatatagcctgaagtgccagtcctttgtctgagataataaggactctgaaagaagggaagaatttaaccaaaagtgggaaggtgaggagctgaacagcacagaacagaaagcatgatattaaagataggggtcaaatggccagaggaaaccttgaagataagcagacatcattcaaagaattgcaaagtggaaaaagaagtggaaatttctcagtatgggcctcataggttactgtttcacaaatagagtgttgatagaaggttatcattgcattttagataatttgcaaatacgcaaggaaaattgtcttgctataccagaacaaagcccacttatataaagaaagctcttatccccaacagaacgccttatgctaaaagtttttttaatttgtggggtttttctcttgtcctcaactctaaatgtctttaatatactgtgagaacaattatcataatttctacattcaaaagttaaaagccaattaaattataatatgtgtaacattttttgagtagtgggttagtttatacttactggtactactgaactctaaaataatttaactattctggtcatatttgtacaacatttagaacctgagatgtaaagacttcaaataaaaataattaaataaagcttaaaatgttctttgtgtttggattttagtctctatttaaagacagattagatattttggaaattttcataaaataccctctttaaatcatattcattgtgtgctttgatcgcttttagaaaaaatagtaaaaggaaagaagctgtttaaaattaaatatagttggtcttaaatgaacaggaaatcagattcatggatttggctttacatgaccatttacccacattctaactgatgttcctaacatgccttaaattcattactaagtagctagttagacaatctcaatctagatacagtttgcttttctacattaattctctgttatcttcttacattcctcgctcaataacaataacatgtctcattcttttgactttgatacttaaaacagaacaaattaatcacaaacagctaatgaaaattaatagagtactttaactcagctgttggggaaattctgataaagttatagagaaacttaaattgtaattcaaatctggggagatacatttgttagaatttagccttttcataataaatgtttctttgaacttgtgttgtgatgagggaagacaagggaaaagctttgctgatcttttaaacacatcaaagccttaggaagctaaacatgctggacggatgcttttgtcaacctgaatagtatctgtgccgcatctttcaatgtagatatggcatttatctcctctaaatggcagaagacctccggtcactgcagggactctaaaccaggaggtctacacagagcttcataatttcttttggtatccctcaaatttgattattgtcatattttctgaaaatcaattttgtactctgaaaaacaagtactaaatactggttgtagaaaatacagaagagtacaaagaaaataaaaataaccaataatgtcatcacacagaagcaatcattattttagattatcttccttctttcagatatgtaaaaactatatgtgttatttaagataatatattaaatggtagcttttatagaattgtgagcataaaatatcaaatttaaagcttacattattagcaattcctcaactcattaatgctatttttaacctttttctaacatgttatatgattgttggtggaaacataataattacatgttagaataataatttatttaatacatacatttatttggacatttagattgttttcactttgtcatcattacacataataattgtaatatgcatttttttttctgagacagagtctcgctgtgtcgcccaggctggagtgcagtggcacaattcaactcactgcaacctccacctcccgggttcaagtgattctcctgcgtcagcctcccatgtagctgggactacaggcgcatgccactacgcctggctaattttttgtatttttagtagagacgggttttcactgtgttagccaggatggtctcgatctcctgacctcgtgatccacctgtctcagcctcccaaagtgctgggattacaggcgtgagccaccacgctgggccctaatatgctttttaatgtccaaatctgtttttggcatctctgaccattttattttctaatagtgcttcacgcatagaaaaatgttgatttaaagtacttttaattcaacaaactgaaataaaggttttcagtagattatttttgtgttttagctaggcagttctatcatcaaaaggtaatgatggtatggtttcctctttttaatacttatctttctaatttttgtttaatgttacattgcattaacctggactagtgagttaatgttaaatactagttgtgtcagtcggtgtagtttactaagagtgaacttcatttgaattcctgggatatgcctcaattgatcataatgagatcttctataatagactgtggaattcaattaattaatgttttatctaggattcaatagtatctttctttttgtgttatcttaatatttcagtatcagagttatgctacttttttgcaaaataaattgggatcactaatataacataagcttacctattttagaaaaaaaatgtaataacattcacaggtgaaaccactagatgttaaagcctatttttgggattaaaatttgttataatagtagtggcagaaatagtggtactctatcttatttaagatagcctctttctcagtttgagtcagctgtcagggaatataggatctaagaaaatttgaggctcatctttggttattttcaggtttaccattctgccttgccacttccccaaattggttagtaagcgctctttgtcttccatgtcacttcctctatctagatttcaccttagatggaacgtaactaagatgaaaagttgctgacttctgaaatatgcaaaacaaggagattaataaaagtaactgtcattttaccatattcttttatcattcttctatatacttttaaggcatcatctcatttaattcttaccacagttctaaattctatttttatttcatattacagatgaaaaaactgggcttagcaagcttaaataatttgtggacccaggatttgaactccagctttccaaagtccaaatgtataagcattgctctatatggtctttctgtcacttagggtactcattagagaaatctttccatgagacagttcttctccacctctccccggaggaggagggtgtggggaaatgaagtgatatgattacaacaaaacaaagaagacaaacatagaatctgacaatcagtaattttgatcacagtaagtatttgaaactgattatctctgaatattatgaaatcaaaccacaaaaagacgagaataaaatatataaactagcacaaaattatgcatttaaataccatgaaagaaattttgaaaaacaccagtatttcttagactatttaaatcattttcagacaaaaattatatattttgagtaactctcattaaagagataaaatgaattagaaaaaaagaaagagaatcaaacttacaaagaacttaaaaattagcagttataaaaagcacagctctccaaaaacattaatgaaatactgatgaaaatttggttttaaaatatgatgaaaaacatgcaagttcattaatatacaatgataaagataaaacaattctaccttattcatctacaaatttgtgattcaaatggtacatattttatgttatcttatttcagttttcttcccttttactttctagttggtcaaacatttgaatccatagaattgtcctatttgttagacctctgttgaagttattactgttattaatatttaccaattatattctgatattttaaatattcaataatatgaatgtttatatgagttactaaaatgggtatgcctaggtaaagtagcatattctataacatttgtttacagattgtctttcattttcaatatgtactttcccaatctgtatagtcaataaagtggaaagcagtatattaaagctagacaggcaactctaatcatggcttgactcctgtatgaattggtacaaaggatgtgttttccataattagcttccatgtgctaaaaaataatttaacctaaataaatagaatgtaattggcctttcttaataacactcaggttgtaaatcaatgaatatgtttaacatgccaaacattatatttgtcacatagaattgggaacataaaatctgaatgattgttaccagtagaattcccaagagaacttttgtttagtacccttaatatgaaagtatgttttttgttttatactaagatacatactaagtagaacactagctataaatagaatggaaaatacagccactagagtttaacttgatacaaaaaggaaaatctgaagatctccagtctacttgggcatgcttgagggaagggaagggagagtaggtcatttcttctcaccattaagaaaagatgcatgaatgcctcttggtgagtgatcattgttatgagtgattattgttatgttatgagccacatattcctacctgtaagcctagtttgaaaaccaaatttcatttataactgatgattagaaaaagactattcagatttatatgttcctgtcttgctgttatttatcactctttcatgatgaagttaaattttgagtctggaagtacttggaaaagattaaattaaatcaaatacaatattatatctttttaaaatcctaacattagtaggggaaaatgttcaagtgagaatgattaagggagacaaagaaagggaaaagttcttctgtgatacagggatttatcttatgcttactcatgatttcctcccaacattcatgatcaatttccactgagcctttcctgggcttgtttatgcaagtatctttatttgtcagctgactaaacaatgtcaggcaccagctttcgctaggcattaccatatcaggtggtaactactctgcaatagtatcatttttttagagctagtgaaaagagcatttggctgatattgaaaaaaacatgagtttgaatttcagctggcttaaccaccagttgtgttaagctaggtaattcattcaaccattaggacatttattgtgtccaatccaaattactgacattctttaatatgacctctaaagacatttccattggtaagcttctaacgttgtgcacatgtgccctagaacttaaagtataataaaaaaaaaatttccctgtgggaagtaaccatattcccctatgtagttgggataagaaggtggcttacatttctttttttaagtgacctgggagagcctttatgttggttttggatttcaagatttctttgtagacaatgcctgagactattccagaaacaaacttagaatattctatgaaagaatgagaagaagcagtattttaaaatggattcttactctggagtacagagatgatatggcaaaacaggaacggatacaaggcctaaggttgtggacataaggatagggcactatatcctcattcaaaataaaaaaatggggcataacaaagtttcaagacaagtaactgatgcttgcctggaagtggaaaactgggaaggtaaatttgaagtaatatttaccattattataaggaaatgatgcccctcctagttgtagcagcaaaagagaatcaccttttgccccacgtgaccatttgtttctgaaaataaagagggtgtgggccagaagatttaatctactgaagaggatgaaagctacgctgaaggggtagagtagggaaccaaacttaaaacagagatacaagtctcaggttctgctttccctcccgctgcctcttcctacagccacgctcctcacagatcgaataaaaatgaagagatgctgagacaccaacacacattatttattactcaaactggcagcctcacattatctccttccattgcactaaagaggcagctgttgaaaatatggaacacagaggggaaggattccccttcatctgttgattagctggagttaacattttgaaaatcaatgaaatgcaacacaatccagtggttaaggtttgatgtcatacatgagtttggaccttgactttaacctcttttagtttcagcttccttatgtatataatggagaatataatggggccatcaaaataatggccgatgtttgcttagcatagggtcaaggacatagtgatgctccataaatgggatgactattaatcttctataaattttgttatactttaacatagttgtttattctcttcttctctggaattaactcatgacaaaatgccactgctgggttggcttccttgcttaggtctatattctcagtactcagaacagtgctttgaacatacaggtttttgttgctaaactttgactattctactgtctgggaagaaatctcactatgcaagagttaagtgcatctagctatatatactcagtgttccaccaacacagcttacttctgtaataaaatacacaaaagtagtgagtattttctctctagactgattttaatatgtatgtttacataattatagaattgtaaaatcttaactttgattcaagaagttgtaatttttttggggggggtcaggacttctttttaattaaaatttactaaaatataataaaagataagaggaacacaatgtaagtcctaatgcatatactgtcctattaagcctagatatagaaactttctagagattgctagtgatcaagaactatgtagttttgccacatgagccctttcaatctggtggatttaattccttcttcatattcttccccgtctccttctcattctcttgcccttttctctcctcctcctccttcccctccttctgtttctttttcttcctctgcatcttctgctaactagaaacttctttcatatcctgtgccaaatatgtttccttccttacttaaagtaattatataccaaagaaaatcacttaaactcatgctactcaaagtgtggtcctaggaccagcagcactgaaatcacctgggagtttgtaatgcagaagctaaggcgtcaccccaggtgatgtgtatagcttgagaagcgctattttaaccaaacttgttaactactctagggaagatatggttttatccactagagggcagtaggacatatgtaccactggcattgcatttatttcccaattaaaagctcttttaagaaccactctcagttgccaaatggatagtatgcttggttcctttaaaggaaaaaacaacaaagtcaaaccaggttacatagagaaattcaacatgtgagattaatgaaataagcagttccatggcactagcatagtataaaatcaggtgccaaatcctaaattgtgattttggctcttgttcatagatcatagaattataaagctggaaaagtctttgatactcactggggcaaccaacttattttacagatgaggaaggaaactcctagacattaactggctgtttcaaattcatacagcttccaacttgccaatccaaagctggaacttctaccaacaaaatccctacccaaagattaagagagagagagagactttaacacgatgctaaacacctctttgtattatttaaatggaaaactggggttcatacttgtgctttacacatctattgggtttaatagtattcgttgtttctgaagaggtggggagatagggaggaattggtaggttttttttttcccttcaagttatttatattctgctgcactgccatcagaacacagcttgcatgtctccatctcaagcccaaaagtgtccacattaaatatcaaccaatcactaagtattgagtaaccacaatattcatggcactgttagacattctttttagcatgatgctagcatgatttctgctctcgatgatctttggttatgtgttattaacagccggctggtaactgcttttaattttcaatcccacatgtattttgcatgcaaaatgggatcaacaacattgtgtcagactcagagacacaaaaggtgatgaaaactgagctgatggattctcattcttctaaggaattggcaaggctttacagaggaaagaaccctaattgcacatacaacaccctcagtacaacttgctcacatgtctttaaaatgaccttttaaagaatgttttaaatgtcaatgcttttttagaaaacattgaatcaaacatgaaaattgcttgagaaaaattttgcaatctccaattaaaggcacagtcacatttccagtttccttttcctctttctcttattatcaatggaattatttaataaagcctaaaatcacatgaagtttatggatgtaagaatttggatactgatagatgtttacaaacagtttctaagaaagagactgaattgttaagcaaagctccaaagtgaaaaatgtaataagcaaagtcttggtggagtggccccagaaaaaaggagctcctaaaataagtgcacaaaaattttaagcactatctagtctggcttaatttgtatctggacaaaaggaagaggcttgtcagaaatttaaatttagctcccaaagaaatttttcagaactatgtcttcaaaccacagaaaagcacttctcatttgtctctctctccttttaccattagctttagtatataaatgaagtcataaccatcataattttaccaggaatcattacttatgatgtcttttccccatgatctcaccattaattattaagaatatgaatgcaaattactgtttgtgagacaaagtctgaagaaaacgtccatttttttaattttaagcaaacagtcaataatctcacaaaaaatgacgtctgatcaatgaagttgataattcttagtttatattttgaacagtttaaattgtaattttgacatttttctaagagacagatgaggctttatattgcttacataagctatgtatgctctctatcctaacaaatagtgcaatagccatgaaagaaaacactagcatttaatatgctttaccttcagcattcattacatacacagttattttaggaaagtaatgttaccatttggacttactctacctatttcatctgagaatatcctctgttttcccctcattataataaaagaatagctctcaattattgccagtaatattagtgacacactcatgtttatatctcaaatatgcttttaattttctgaaacagaggcaaattgctggtgatatcttaatgttttaaggtagttaatgccaaaaggcttggatctgatcttaaactgaatatttcccagatgtttggtagggtgaaaggtggaactgctaacagaaaccaacttcctatccctgttatacttacttaggtgaattttaagtaaggattaattagacattgagaccttataagcagtcaacttcacagctcccagagataaaagctgggggcttgctcagttgtaacataagccatatgttgagaaagcgaagtctcaactgccactgtctccttgcaccttgtttataatgctcctttaactttcttttgaaaatgcaatacttttgaaaatgttgaaaaactactaaaggattagacaacttactgtttttgagtaagtattgggtaaatactaaagttgcagaaatacatccaaaatatttaactcacaagaatgagctcataaatataaaaggacagcttatgaatgaaaagaggaaactgctattaatgtggcttatcctagaccagctttgtactggcagataccctgaggacactaaggctctgaaaactctgtgtctccatgggaagccaggctgcctattataggaagaggaatttagcgcaaattcacagttgtttgcccagattcagtagggactaaagatgaactggaacaaggtcttgccaattacccgtgcttaagggttgggagctttagcttgacaagattttgccacctaaaacagctgttttgtgttggagaccagatggtaattttgccaaaaccacttaaaaggtccaagccatcaatttcaaagcaaatgtttcttatattgggtacatgctcatttttgtgattttttttcatttaaattttcatgtgaatatgcgttctagtttaggttggaggtgttgatgaaatagcagatagtgatgccaagttaagaaactatcaccaatctatgccagccaatgagaaagatctacttctacaaatatagaaaagactaggccaggcacggtggctcacacctgtaatcccagcactttggggtgccgaggcgggaggatcaagaggtcagaagtttgagaccagcctgacaaacatggtgaaaccccgcgtctactaaaaatacaaaaattagccaggtgtggtggcatgcacctgtaatcccagctactcaggaggctgaggcagaagaatcacttgaactcgggaggcagaggttgcagtgatctgagattgcactagcgcactccagccaggccagcctgggagacagagtgagactccacttcaaaacaaaacaaaagactgtacttggtaaaaccaaaaggaatcaatgaaatgcacctatttactaacagtaagagcacaatctatattattaattcttcaaatacgtcaactagttattctgggttggaatccacttgaaataatttttcttataaggttttcctcttcttaggctatttatttattcagagacagagtctcactctgtcacctaggctggattgtaatggcgcaatcgtggctcactgcagcttcaaactcctgggctcaaacatcctcccaactcagcttcctcagtagctgcaactacaggtgtgcgctgccatacccagataattttgtatcctctccacttatcagtgagaatacatatttgtctttttgtgtctgacttgtttcacttaaaataacagcttcctgttccatccacgttgctgcaaaagacactcagatggagtgcagtaatgcaatcacagctcactgcagcctctacctccttggctcaagtgattttcctacctcagccttctgagcatctgggaccacaggcatgcatcaccatgcccagctaatttttctgtgtgtgttttgtagtgacgcggtctcactatggtgcccaggctgctctcaaattcctaggctcaagcaatcctcctgcattggcttcccaaagtgctgggattacaagagtgagccaccatgcccgaccattagactttttaaaagtattttaggaatatacatgagattgtcagtatgggttaagatctcatagataagataattgtaagggttaagggaaatgtacagaatctgataaataagtatcttgtaaagaaaacaactggttatatgtttttatgtctgtaataaatttgccagcaaatttgctacctaaagaatttgtgtcaccattttgcttcagtttcaaaggcaaaaatatctctgactttccaatgcggttacgttgtttagtagttagccagcaagggcaactgaacaaaagaaaactgttggttctaatgagcagtactctcctcactcaacatctatgccaggatttttggaggggttacataaaggtgaaaggaaaaaaacaaaacaaaacatgaaaacaattttcaagtgcagccatttaagagtatagtatgaatgtcccttgaactttgtgagtgggaagacatctaaggaaatgtctctgtagctctccttttgaaaatcaatcttaactggacaagacccctggccacaagcctatgcaattagactgcatatcctagtaccacaaatgcaattgttagcagctgtctttgtcaacaggcaagttggagaaacaataaaaagaggagctggtgatgatgaaagaggaagggtgtgaaatggttgtgtgcttcctagtagtctttaagtctccacatacagaaaagaatttgtgctcctccctttagctaaagtgttgaatgactgagaaggcaaagagggatgagaaagctgtttgttgtctagaggaagaaagataggatatcctaccatgtcagaaagctgttaaacactcaagatgaaaacactcatcaggattttagaatcaacaagcagttgtttatatttggatgtttgcagtggaccttattaccttaacatccttgaccaagtttgtgagacaaagaatatccagggtgtggactgagatattggactttgtggttaagggactctttttaaaaaccttttttaaaaggttattatgactgcaaacttgggtaagaaaagggagccaaagtggtccttggcttttgttgtggttgaagcaagtgaatttagaagaaaaagactgagcagaataattctggtttaggcttgggactcttttattagttctcttcctatagcatacaagtcacaagaaatccttcttatgtttcgtagatggcttttatacccagtaaacatcaaatattgtcagtgtgatttttcacagggatacatttagcagtcagtccctcatggtacacgtttattattttgagttgaatatgcatatgttaaataatgggaggattcagcctcaggctggaaaccacgctgaagactgaagaaaacttggggcagtgggtggggagtgctgctctatagtcctgcctaccctggaagggcttctgattttaccccactgagtaccctgggcagagttgagacacaattaaatagggaatacctgccaacagaggaacagcttcccttttcctgtagtgtcccctttcaacttgagaattgaacagaaagaacaccgagcacttctttcttctttcctttttctaggaaaaaatgagtttgccaagttgaaacaagtacttttcacatgagtttcttcagataaatttattaatttgtttacatatatacatatgaaatatgatcccggtgctggtagtacagcatcaggtaagagaggcagatgaggtccatatgaagaaagaagtatgctttcaataaactaagggtggtctcaacactttgggaggctgagatgggaggattgcttgatcctgggagattgagaacagcttaggcaacatagtgagacctctgtctctacaaacaatattaaaaaaaaaaaaattagctgggcatggtggtttgtgcctgtagtcccagctacttgggaggcagagttgggaggatcgcttgagcctgggaggttgaagctgtaatgagccatgatcatggaactgcactccagcatgggtgacagagtgagaccctgtctcaacaataaatacgtaataaactaagggcaagttggatctcttttaacttcaagctaaatatgccatcctcttcatcatacttctcaattgtactacatgatcagagatcagaatgttgaaagagtttgaaatctgcacactaaacatttctcctctaaactaaaagatacctagttcttgtatcagtgcattaagaaataggctcagctacacagtagctataatctatacataaggaaaaattgcttaatagagttctattcctgagttccatttccatggtttgccagagtttaattaagtttctcaagctttttaagggcatgtctatttttatttatttctgttttggttaagttttatttttatttttaaatgctttttgacctgtttttgtataagatagatgtgtatctattcatatacatacctattgaataatagtgactgtgaaatatatgctgtatgatgggtactgaatttgagtctattttgttgaaatatagagacttcaaatatatcttttcttttttttaaaattttgtattatactttaagttttagggtacatgtgcacaacgtgcaggtttgtaacatatgtatacatgtgccatgttggtgtgctgcacccattaactcgtcatttacattaggtatatgtcctaatgctatccctcccccctccccaggccctggtgtgtgatgttcccttcctgtgtccaaatgttctcattgttcaattcccacctatgagtgagaacatgcagtgtttggttttttgtccttgtgatagtttgctgagaatgatggtttccagcttcatccatgtccctacaaaggacatgaactcatcatttttgatggctgcatagtattccatggtgtatatgtgccacatttttttaatccagtctatcattgttggacatttgcgttggttccaagtctttgctattgtgaatagtgccgcaataaacatacgtgtgcatgtgtctttatagcagcatgattgataatcctttgggtatatacccagtaatgggatggctaggtcaaatggtatttctagttctagatccctgaggaatcgccacactgacttccacaatggttgaactagtttacagtcccaccaacagtgtaaaagtgttcctatttctccacatcctctccagcacctgttgtttcctgactttttaatgaccgccattctaactcgtgtgagatggtatctcactgtggttttgatttgcatttctctgatggccagtgatgatgagcattttttcatgtgtcttttggctgcataaatgccttcttttgtgtctgctcatatccttcgcccacttattatgacactaaatttgatgtctatttggatatcatttataagatccttatataaaaacaaataaacagggtttactttgaattttaccaaggaataatctacattgaaattatgttacacacagtttttttcctgatctttaagaattagcaaaaaaagaggaaacatttgcaaaagaaattgaatagtatgaaactgttggatgttgcttattccttatagatgtttacattaatttattaatctgacttgaaaaagtcaaccactttacctagaattaggttttgccattttggtggcaagttgaaaagttgttttcaaatttgtccagtcttttccagcctttgtttttccctgtctcatatttatgtaccaacattttaatcatcatgcattattataaattattttatttcagttgaatttaataattatctgacaacactttataagctagtcagatttgagaaaatcaatttaaagtccttcttacaattcattatatgcaataaataatattaagagagtctttcttctggaaggaatgccttcagattttgacgaataaatgtaaataaaaacatttcttcaagatatgatattgtgcggttttatctagctgaacccaggtacgttaaaaagaagtttaaggtaatgtttttctcaatattcttcttctaagttttaaaagttttgacagtttcagataaaatttgacgaggaaagttagacatttacagttaacatggcttggatatatattttaataatgcatttaataatgtaatatatacaaagtcaagtcagttcaataattttcttttttttcagtgtttcttctcttttaacttttagcttttgcctttccctttatgtcccttgtcctttaatctggatcccagcaatattttatgtgcatgagaactcaagtacatagtagttttaatctatcatctattcttaaataatgaaatttcaacatattccatttagaatcatttactaagacaccaagaggagtatgaaataacacttgtttgtgtgtagatagataggtagatagatagggatatacattatttttatccacttactattctctttgcatttttaaaactctcttaatgtttcctgttgattttgtagcaccaattcccacataaaatgtgtcccttacccatcagttttcattttcaaattggatcagatagatcatgttttttcttaaagggcatgagcactttctcaagaacatactactttaaaacaatgtaagcatttttaaaaagtaaaacaggataatgggataatttctggtcttttctatcaagaggaaacagatcataatgtgccagattgcactcatcctctctaggaatttctttatagatagtttgttaactcaagacttaataaaagtgtttcatgagctttagaaaaacatcttacctaacaatccatttcccacatttaattacaaaaaacaataatgcatatatgttggattctaatatcaatccttagttgcatcttactaaagaatgagtaatgctccctccccacatgtggttaaggtaatagtacctgttcttagaccatctctagcccagtgttgcttttcccatgttatctgtactataatgtcagattttcatgctgagttctaatatttgtttaattactttcttaaaatacaatttttaagcaccaggaaaaccctttaaactaatttctatgaaagtactttctctaacatttcctacaaaatactggctgcatgctttactagtagtcacattgtatttagtagtcagaaatgatgtgtgatgctctcttcttgtatttccaacctatgggttctgttttctttctttgccaagtgtgagttgtggcaaaaataggacatttccatggactttagggataaagaaccacttcagtcttggtaatcatcccaaagggggtgatctgtagtccagaaagccaggaccttccaaaacatattgattaaacatctcctttacagcagaagccaaaaatctttattgccaatattataagttatagcagtgttccccaacttttttggcaccagggactgattttgtggaagacaatgtttccatggaccggtgaaggagatggtgtcagggggattcagtcacattacttttattgcgtactttatttctattattattattacattgtaatatataataacataattatacaactcaccataatgtagaatcagtgggagccctgagcttgttttcctgcaactagatagtcccatctactccataatctcattttggttgctgtcactgcagaaaaccctgcttcacaaagatagaatgttggaaattgaagcaggctctttggtgcttttgtggcaattacaagatattctgccttgactttaatccagaacatatggagatttgaagttgtctcaaatatattttaaagtccactgtcatttgtgatctcaagcagttgatccttttctaacatggacaaagtccattcacctggcttattcataaatgggtcatggatccatttcttcccagtttggggtcttttgagtaatactcaaatgcttttgaaagctgaggtaagtgatcatgtaccagctgtgagaaagaaggccctggctcagcctctttataaatcacagctaatgtttaaaacatatcagaaatcccaatgttcactcatcacccccataattctactttggcttttaatgcagacccttttgctgacttgaacacagttctcattctcccctgaagtgacagattgagtttgttgactaggttgaatatgtcacacaaataggcaagttttgggacccattctgtgtcactgaaatgtgctgccagtggtgattgttgttctaaaaatctctggagtagttctcataactcaaaaactctggccagggatctacctttaaaaagccatctcacttctgtgtataagggaagatgtagctgggcgcagtggctcacacctgtaatcccagcactttgggaggctaaggcgggcagatcacttgaggtcaggagttcaatgccagcctggccaacatggagaaaccctgtctctactaaaaccacaaaaattagccgggcatggtgatgggcaccctataatctcagctacttgggaggctgaggcaggagaatcactggaacccaggaggcagaggttgtggtgaactgagatcgtgccactgcactctggcctgggcaacagagtgagattctgtctcaaaaaaaagagaagatgtgtgtgctctctgtctgtctcctcacagaactgtgcaaacagacatgagttaagagcatgtactttaatgtggttgataattttaatcacatcctgcaaaatgttgttaagttcaagtgacattttttggctagccagcatttctctgtagatgacacagtgcatagactcacattcagaagcgacctctttgacccgagcagtgaaatcagaaagccattttagtcacggcagctactctgtctatgcatatactgacacaaaatgaccaattcagttttcttgatatatattcattcaaagacttgaatgtttatgcagctgtggtgttgattgccaacaaaagtgcacataacaaatcctcatgcacatcctcctgaaaaatatattgcactaaaacaagcattgttgccttgtcaacatcaatagacacatcaacctagactacataccatggtgactcattagtcctctctaacaattgtgccctgatatcccctgctatttcatcaattggtctagttatggtgctagctgaaagaggaacatgtgccaacttttgaactgcagcctcttctgtaagttcatgacaaatgtccttagcagcaggaaggatcaactcttcaccaatagtaaagggtctcttagctgtagcaatgtggttagccactaagaatgatgctctcagtttagacacatttgatgaagtggtgtccttcaatgtttgcttctgttcttcatgttcatctttttttttttcttttgaaaaacttcaaaatggactggcactttgggaggcctaggtgggtggattgcttgaggccaggagtttgagaccagcctgagcaacatggtgaaaccccatatatacaaaaaatacaaaaatcaggcatggcggcacatgcctgtggttccagctactagggatactgagatggaaggatcacttgagtccgggaggcagaggttgtgccactgcactccagcctgggtgacagagtgagaccctacctcaaaaagaaaaaaaaagtagagaaaaagaaaaaaaaagaaaacctccaaagacttgaacttgacttttgacacagggtgcttaatctgcatgtggtgaagaagttttaaaggttttatggcttttttggatagccagtcatcacatattatacaaagcaggcttgcagaatgaatgtgaatcacctgttgcagtgaacccataatttaagtgggactcttgttattttcttttaaatgctgaatttttgtaggcagtcttagaagtcttccgctgttgcatcactgggtctttccctccttcaaagaagcactccagtgatgtttgttttttactcattttggctgggttagcttgagggcttaccaaaactgtgactgaaacaagtgcacagtgcaggaaagaagcatgggtggaagtggtaaatacaataatggatgggccatacatggactaaattaagtgctagattctgacttaaagcctgacaccagatgcagcacagatagggttttgatatgagtctgtaagcaactgatttatgatggtctctgtgcagtcaaatctgtctgctaacgttcatctatatttgcatctgctcctcagtgctagcatcaccacctcagcttcacctcagatcatcaggcattagattctcataagaagcatgcaacccagtccctcacatatgcagttcacaatagtgttcgagctcctatgagaatctaatgctgctgctgatctgatgggaggcagagatcaggcagtaacgactgatgggcagtagctgtggagtggctgcaaatacagatggagcttcactcactcaccaccggccacttcctgctgtgcagcctggttcctaccaggccatggaccagtaccagtccatggcccagtggttggaggcccctgagttacataaatatatagttatggcaaatgaatcaatgttgccatttgtcaagtatacataaatagataaattgtctttctgcacaatcaaatcaaaattcacataccacacagtggaatatatatttcttataagtattatgattacccactaagtaatcatggaaataatctttgaaggaattaagaggccaattatgtattattctataccatgttggaagcttgtcaaatttacaatacacatgttcaaagtgagcctacagcttgaacccctcaaacttattccatattaagtatttaaaactactcagggctgttcatgattagcaaatttgtgaacactttaatgcatcaagtaagactttttcttacaggaaacccaatatcaagatgtgctctactgacccattttattattttccttaaattgaggagaaaagatactctatattataattagttatattaaagaaattcataaaaacctgagtaaatgtggtagacagtttatagcaatgtctttagggtaaatgtctatattaacatgttgatcatttattaaaatatgccatgcagtaactcctctaaccctttatgtggcttaattttttttctctctttataaataaaatgcagtggccaagcccaaatagaatgaattgtttctgtgtaatgaacaagatataaaatctttgcctggctgccaactgtttgtaaatgttagcaggagcctcatggtgaggtagactaagtatttacttaaggctctaagtaacctttacaggtaagtccctcaatctctctggatttcccaatgtcatctattacgaaagagaattggatatgaaacagacaatatctagatttcttcgaaatcttctctgactctacaatttgctaagaccaagccttaaatgatctgaacttttctcactaaaataacaagtattttttaaatttagtaattttagctcaaattagattgatcagaggttttgattgaacatagaagatatctcaaaataatgtaaaataacttagtactttggggaaaaatatgacagttgacatgcttgccaaagcttctgtatcataatagatctaatctaggtagtaagttggcttctactgatgcataacatgtttctaacattattttgcattctggatatattttcccagaagtgataacattgcaatgattgtgccttatttttgcatggtcagtatatgaaactttctgtacagactggcagactttctgtccttccaatgctcgcgagaagacacaaaccacacaaagattcccttgggattttccttaaaatatgaaatgcattagataagaatagagacaaaagtgggatgtggccatgatgctctggcaaaaagccaggatttcgaacttttcagaatttttgaagggttgagttatctactaaaggaaatgaggggaaagaaaaaccaataaattgctacataaaactttatatagaaatatgttttctgatacagaaatgtttacctatcgggaagaattactctctgccttgctcatggctttgttaccattcaaatgaattgtgcaggacttttctaacgtaatcgttcaggcttcttttcttaacttttctgtcttgtaccatttcccgcaatttatcccattgcaaaatgggatcaaaagtcagttatcttgggtcacagcaaatgactcaaacatgtaagtgtttccagtagttgttgtttttttgtttgtttgctggattgctggtagttgggaataagggtagagtttctatctccaggggaacacaagcttttctagatctttattttacccaaaactagcgatagaatcatttcacactttgtgaattcaatttatatcagcacttattatgaacagttctcaagaattacaaatccatttctgtcctagacacgtgtcatttgtgtctcactgtgaatgtatcctaagaacagagaggataatgtttgaaaacatgacattattacaatattgataagtaattatttcctgaaatatttccataatgttaaatacatttaaaaaatctctaccagtgaggaaaaaattagaaaaaaaaagtcaagtttaccaaatctattgatctagcacagtgttgtgaagaaacctattagatggtcatctgcaaatatttgttcacttatgatcactgtgaaagatctggagtcatatttcatttgtaataaaaatgcagtaagaaattgatctttaacacactttaacaattaatttaccacttaagaatattgtccctatattgcattgtaagtttctgatacttttaatgttagatcaatgacaatggctgaatgacaatattggttaaatatagtcttaaattgacaagtgttttgggatctgccactgtactcatcaataaggctaagctaggcactgtatttatcctatgacttgaattatcaggtgagaatgtaaaatgtcattttggtatttagcatactgtgaaagatatatcatcttatccagagatagaaaggattttctgcaaattcagatctcatttctatctgtaattccaaatgcatgtcaagcgtattgacagaactgtggaagatagagaaactaaataactcaaatacattatactaaaaaggcaaccagagtgtataatggtaggaggtggactagacatagattactgattagcccagtctagtaccctccttttaatggcaatgagatcattctagagcaagtattaatacatgctttcaacactgggtgtagggtgaaggataaagtggagccctattgctttgagacaatttcttgaccatgtgcatatatttaagggggccatatagtcctttaattcttggtgttaacacagttagccctttgaaaaagcccataaaattcttatgagtagttgaaggcacttaagtttccaccaacatttccacacttttaaaatggagaagaaaataaagattctgatgactatcaacaacaatgcagtatatctgtacacaaatcccaaattcacaataccatagttatgtagatgttaaaaatcccatacctgttcaaaaatgaggttactaattttccacattgtttaaaatttttcttgttgttaagctgccgctattacttgtgtgtattcctgtctgtggttctgcttctatgcacacgttctgtcaatgcttttttgcatcaaagctgtgctttgtctctgaatcatattgtatagaacagtgtgtggtccttggaaaagcagaatcagcactgtttggaaatatgccaggaattctaattctctactccaatctagaattactaagtcaaaaatcccagcaatctgtctttaagcaagtcttccagatgattctgatgcacgttcatatttgagaactattggtatagaaggttggttaacttgccactattctgattgagcacacagtaaatatatatttagcacccactctctgagattctttgcaaccctatgagctataggccagcggtccccaacctttttggcagcagagactggtttcgtggaagacaattttttacacgaaagggaatgaggagatggtttgtagatgaaactgttccaccccagattatcaggtattagttagattctcatatggagtgtgcaacctagatcccttccttgcattgttcacagtagggttcgcactcctgtgagaatctaatgctgccactgatctgataagaggcagtgctcaggcagtaatgctagtgatggagagtggctaaatacagttgaaacctcgctctcgcttgcctatggcttgcctcccgctgtgtggcccagttccaatattggtccatgggacattacagttcccataatgttttgaggcttcacttcatttaactttgtttcatttttaaagagaggtaaaaccacatttagagccatttagactcacactatggtatggccacataatcccagaggtattagtgaaaatgtgataacaaccccaaggagctccctaagtccttctgtgctaggatataatagatgaacttaggacactgacaacaattcttgggagagagaggtttcatttagagaggttagtatttgtgtcttacattgtgctaactatgatatgtttcagcaccttgattaaaactataaaactatatagcattataatcaatttcaagttaaaatgtttagagaaaaatagatgtgactgattctgaattaatgagactttccacgtttcacaataatttttttttggaaagtacattcctcacccagaaaagcaccactaccactcaatgaagcagaacctttagttttagctagtggccacctcaaagtgccattgggggaggtggggagaaatgtggctcaagcacttgagctctttctctctccaagcctgtttttatgcatgcactttctctccctggaatgttccttctcaacttcccaaatcccccctattaaaaccctgctcttgaaaagtcacctcaaacaccagctgtcttcttcaggatggcttcactatttaaagtaatgtataacatattttatctctcataccacacttaatatattttctttctggtttttttttttttttgtattgtcattacttatttgggtctttattttattgagctttaaaactccttgaggcaaggaccacatcttgtttgcctttgtaaccttcagaatgagagctaacacctaccctgcacactggtgcttaatacacattagctgaattaatttactcagtctatagaattccattgtatatttatgttctatttatctaggagtggatagaaggattttgcacttatttttcacatctagttttccttgtctatatccattctattaaatacaagttttatttgccatatactttctccttttgtgtttatggaaaaatatttagtgagaaacttaccctccagaccaatagctttttcattctaatagcaccaaaacagaagaagcctttgtccaacatgattgctagggggacaataggtcagatgctcctcttctggagaagaatgagaagcagcagctgggaaagatgcttgtgaatggccaccttctcagattaactatttagtcactcatcaaaacattaccagcccaaacaattatatatatgagtattaaaagaaaaaaatgcatttacacgaaaattgtgacttctaagttatttccactcagagattatcaagtcacaaaattttctccattactaaggtgatgatgcatcatgagggaacattcgcaaagtaatatgaactgatttttgtcataatcgcttttgtaatgttgactatcaaactttattttttaagattttaaatataatctaaaataagctttatagattgctactatttactgaagaaatttgctaaatattactttatttctaatgtattctttaaacaattttatatttgtagacaaaatccttcctagttgccaaaattcttagaatctgcacaagatgtttactaaactgagtctcattatctcccaacttcacttttcccagcttcctgacttgttccttgtactccagttggtaaatcaaacctcttatgatatttgaaaacaccatactgttttaccttaataatttgctcttgccttcccacccttcccagccttcccctggacacttcttaaccttcatgactcagttcaggtctcatctccaacaataatttgatcgtggaaccccagccagtatgacctgcctttacctttgccccatagtccccttgtcatcatcttaagtcatcacttactgccatgtaacatgttttattgtaattatctgtgtttgtcttttattcccaatagtacatagacttatcaatagaaaagccattacgtatttgactttatattttcattttctaaaagcgtacccttctcctcctaggtcttcctaagtgattgaactaaattgtccaaagacccttaaatagattcacaatactacctgggctattcatgttttaagggacataaaaactaatatagttacaacttaatataaataatagaatttcactacaagaatatgcctataaatttacaaaatatctgttttacatgaatgggaaatataattcatgtgtcctttcattaataatataattttcaggtgtttctttgagttaaaaaaaaaaaaacctttttttatagcttttaatgttaaggtaattgtagagtcataaacttgtaagaaacacggggagatccagtatgcccttaactcactttcctccaggaggctcttttaactggcatttagttttgattcaaaatatacacatatagaactataagctactgatccaacaatcctcaaacaaaattctggagctcctttccaaaaataatttgataggcaaacttgatcatcctcaccaaagaacagaaaaactggagtgattccttacaaaaagtaaagaagtcctctaggcttcagtccttcagaactcccctttcacattcacagatgtttataataggtgcagtcattgtccattactcacaagatgatcaaattataacttacctgaccatacgctgcgtcccaaaattattttcaaaattcgaaaggatattaaatcacctatgtcttccctctattttgaaacaataactaaataataatataaaaataatagctaaacctttttaagcttgcctaaactagttgcaaagtggaaaaaaaatggttgattgagtctttgaatattgtgctcccatttcaggtaaagcagaaagaaacaaaggggtatctaagctaaatataatctacaataccacttgcagttcatcctcagaaataacgggtcaaaaattcagttgtatcttatactattactatagctcagtctgttagtatagtttaatcccaggacgttgcatgcaccttcacaaatattggtttattttttgcttaaaatcatccttcattcctctttgttctattaattttcagtttcaaaagtatacataagagaatatcttgcagtttactgacagtactttcttgtcttttggccagacaatgtaagcagctgcctaatcttttgcccctgaattctacctcctgctctgctctgtatcttctgcttatgacataaataaagtatgttagattttgttctctaagattcagacgttatcctctatggcatgccatcatccttgggaggaacagcacattaagtcattaaagaaaattatcttgatgagtcattttgtcagatggtttgcaacagggttcccttgtaggaatgggaaagaggaggaagatgtgatggagaggcaaagtagtcagagatggggagcaatagagtctaaaagtcagaggcttaagtgttaacatccattattaccgacctttatcaccttaccacctgtgtgtgtgtgagttaaataacctaagtatcttccgtttttatatttgtaatcgagactaacaacagtatccttagagggctattgtgtgaattaagaaaatatttttcagaatatgcaaataaatgtgcgtgtgtgtgtgtgtgtgtgtgtaccttagggaaactaccagcataagggaaatggatgtaaaaaaacacaaataatgtctccttcatccttcacaatctttccttggttttggcttgcaaatagagtgagatatatctcttttgatgaaaaggagtgctgtgttaggtcagagacttcctacagatacatggacagaagggtctctgacatgtagtcttggcaaagtctctggttatgtcaacttggcaacaggggaaactcaagcatttctattggcctccataaggctaacctgtgaaggaataggaaagaaggtattcatctctcgagaataagctaagccactctatctctatgggaagagtgaaaacatataatctgtagactgcattggggatggtgtttctcatgatacatgacaaatgataatatgctcaactttcagatttcatgtattaagccaatgggaatttgtatgtattgttcaggatttacatagcccattgaagaatttccaaaatctagcactgttggagaaaaactaccctctgatgataattaagaagatactaagctccaggcaaattctaataattttataggtactatctcatttaatattcacaacaaaattatgagggaggtactattatgttgcccattttgcaaataaaattgagtcatgggacacttcagtgacttctcctatggtaattcactaataaatgtagagccaggagttgaacccagacattttggctccagaggccacatgctaatcacgatgctacttctctaccctgaacaaactgctgagagttatgaaataagtagttttagttccctaggtcttcttaaactaaaatgggtgggcacttttagtagacgataaactgacttccctattgtgatctacaaacttttccgagaaaattatctttagatgcagcaatcgaaacttgtgtataaggggaaaaggagctcttgtctacctcttactacttccctcgattttccatttttcctaggaaaaaaaaaaaccttaaaaatccatgtttatggattttcccccaacacagagcagtaattctgctatttcagggacagtgcagatgttgggattagtctccctgtatctcagaatgtcaacacatttgccaaaaatgaatctatcagttaaatgtagccaagagatttagattatctatatcctagcaagaagaaatagtttatcactgtttttagagattgaggtaatctggcatattattgacatgtgctacagatttaatttaataccatagtacagatatgggctctgataagttattttgaaatctaggctaagatgagtagagttgtttcaatatttatagggttgaaaatgcagagttagcaaaggaagcattttaattaaaacaatattttctatgtatgctcagagtaaaatgaaggggaattcttttaaagccttattacttttttctatatatttgctggaaatacttgccgggttttaagacacattgaaaaagatttgcttgtttgcttgtttgtttaccaatgttttgtgccttttgtttttagaaccacacaaaaaacaactcaatagtttcttttgattttacttttcttccaaatatatttaggattctttatttagccttttaaaattgtatgttttaggcatcctggagataacatcagtagaaatcggagttgttgccgtcaaagccattaacagcaactattacttagccatgaacaagaaggggaaactctatggctcagtaagtattctgcttttgttttcaaatccactccagtaaaccattaccatagttttggaaagtttcctccagacaccgaatagctttgttatccttctattgctagtaaatagagccacagtgggttagtcaccactgtttcaagggctggcaaagcagctcttccaattctgtaatctcctctgttgttcacccattagtctaccacacaggctgctgctggcatttgtctgtgaatgttctaaactgctaaccaagtcaggctctcacggaagcatccggtcagattggcatggaaaatgaagacaacttggagaaaaaacactaaaaacaaagatcttgaattgagtagaaacccatgtattatatatgcgttacggctgaagatgaaacaagggctcagatgttttgcattttgttaaaatctgaaatggggaaatgtgtcaagaaacaccattttgcttgttgttcaatcaactctagaattttatttacctagacaataacctttaattcaaattatgcctcaaaatcatatatatatatgtgggaaatattctttgcaatagggtccttgtggagcaggtatccctgcagtgctttgggcacatccatgcctatattccataccaggtgttaagtatttggaataccacttctgcaatcttggatcaaactcttttaaaccaatttcttagaaatttaagatctcacttaaaatgccaaatagttgttttataattgcaattgtaataataattaaattacaagcagtgagacaatttatcctgctcaagtccttagaaaaaaatgcatcaatcaatcatatcaacatctactatatgccagatattgtttgacatatcaaagatgcataagaaagaagtatagaaatgggccttgacttcaaataatttataatatatttaggggaaatgttaacaaatatgaaataattacagcatgattggttgttacatgtatgaaaggatcagctatagcaaagcagccctataataaagttgggaactaggtttcaatctcttagctgtcatttgaatgatgacaggagtatattagtttgtgcatgtggatccatcttattgtgtccctcccagagacagatcaaggggatgctaactgaatttcatttttttctctggattctactgaaggggagtgtattgaaggcaactataaacttggaaaaattttaatttaattttttggaggacatgtaatattatatatggccagaaataaaacctgtgacacaaatcttttaaataatttttacttttgtaaacagatcctgtgtcatttttacatttttatgtaatcaaaaaggaatttcactttaaatttgtaaataaacttactttgttgattagcataaggctgagagaaccatttagaaccatttagtgaccatttagaaccagcagctcttaaacttgagtatgcatcagaatcagtggaagggcttattaaaagacagaataatgggacccacagccatattttctgattcaataagtctgtggtgcagttcaatttccatttctcacatggtcccaggtgttcctgatgctgctggtgcagtaaccacaatttgagaaccgctggtctggatgtagagtagccttgtattttactaatatcaggtccacttttaactggggagtcaggcatgctttgagttggtccctgggactagggcaaatgcttttttttgcatgggggtcagaggaattttagtaaaatttctccattaccattgctcccctaatgaacccagaggaataacagaccattataaaaagtggttccatttaggggttcacatcataatctcttttgaggcatgtttaatgttttcattaaacatgtccaggttcttccttgatctactatatcagaattattggggaagagaaccaggtacatattctttgaagagataacaacacacatacttagtctagacccaacgtcctaaagccagctaacactaatttagattaaggaagaaaatgtaaataattttaatgaatataaaagattttaaatacttttaattgataaaatatacttatttaaaaacatgacatcaaggagaaatggataactttcaaataaactctgacataaaaatatttaatacttttcttcacatttctcctctttttttcttctgccccaacacagctcatggactgtgcttatgcttcatcttgagctctaagctctgtgaattatttcattcaaattctttatttaaagtagagtccggtggctttctattatctgcagtggcacttatctgagatttctctcattaatgtgtttgttgttcactgtcttctcccaatagattgtgaccttggagagagtgaggtcagtcttgtcccccactatttgttcagcacttagaaccatacagagcacagttatacactgcataaacctaacctctggtagaagctcagccaattacagaacatactttccacttccagcctgtctcagaaagaaactcattctctaaccataacattcttttttgtgtaactttacatttctactaggaataatgaaaaattatggtttgttcaaattaaacgaaaaatttattcaagttcaatattctgctcagagtggaatagaactaacatcaaaatttataagtgcatatctaatataattctgtatattaggtgacaactcttgtaattcctaccttcattttttgtttcatacagtatccatcaattccgtaagccctcctaaaaatctgacttgggcaaagattcagactgactgattaaaccagttttatatctattctcttgaattatcttcctctattcctttttggaaactgtatacctttcttatattttcattattcattctctaagcaatttatctattgtattttgagttttctcctgactgatgggattcagtaaataaagtataaaactgaattaaatagaataggtcttcatagagcatgatttaaggaccaaagaaaattttcaggtagctggaaaaaatccaaacttcttttaaaaaaactccctgaaccctgcttttgagtccttgctgtagcctgaattttctttttatacataactgcttatgatttgcttagatcctgtcaacaacatatattttgaggcccctcctctagagatttggtacctttggcccaaatatttaaaacatctgaaataaaaaggctgatacatgtgcacttcaatttaagaaacattactctataaattaattttggggaggaaaattaacattaagcatacactcccacttttctatacctagcttcatctgaaatatgaaatcacctcaaacaatctcagtccttcattagtctctaaactgtaccccatttattgattgaaatgaacataattatccatattttaaaaattactctgctttgaaaagtatatagttttagacagactgagataaagagaataaaagtaaatccacactaaggatttatattcctttcaaatacagaattatttttgttttatcaaaatccttaccttaaataatttacctttccttcttactttcagccagttaaatcatcatttgaatgttatatttaaatattactttatagaagagaagcatttaagactaaaaaatttcaggacagataacttgagctggtagcattaacatagaatacatctgcttcttatggttctgataatgttctaaactgtgataaatcctacagacacctaggtatataaacatatacattttcaggaatttggaattttgtagaaatttcaaaaagtctcaaggtgagagaaactgccaagtacagtcctcaactgaactatgcccacggggcccttgctttggatgaagaagatagaaccagagggcaagtgctccaattccttagcttcttaactactttagtttgagtataagaaaagaagctacttctctttttctgtttgtttttgttttgttttgttttgagacggagtctcgttctgttgcccaggctgcagtgcagtggaatgatctcggctcactgcaacctccgcatcccagcttcaaactactctcctgcctcagcctgccgagtagctgagattacaggcgcccaccaatacgcctggctaattttttctatttttagtatagacggggtttcaccatgttggccaggctggtcttgaactcctgaccttgtgattcgcctgcctcagcctcccaaagtgctgggattacaggcgtgaggcactgcggaggctacttctaaagccagagtcttgagatcattgagctacttcctctttgttattaactccagagtaagaacctggatttgtggagtgagtgagagcgaagccttgtccaggaatgtctccttaaatccaattggcctcctgaacaaaaccaaagctctatggctatgggatggaacttcccaggatccaagtccttaagatacaatgtaggcattgctattcaccatgctcataatttcttcaacatagtagttcacaaaacgaggaattccatgtcctagttttcaatccctagagttcacgagcaaaatctgtcaaaattccaagctatagaatattgcaaataatttcattaaattaagaaatttgatatttggaagaaagacatcccccccttttggttatgcagaactattgtggttttgctataagctctgctttcttatgaatgtgtgtgtgtatttattatggatttgtaggtaaagtttgcaaacttgacaagcccatatctttccttcagttctattttttcccatggggcccctggttattactgtaaaagaagcattataacactattctttattactgactcatcacaaatattgttagtgagatgtctacttcttgacaatcactctaggcacttaaaccatataatattcaaagcacatcagctttttaaaagggctttcaaaaagtggctatgatgatcaattaaaatgtatcatgtgctttcaaacagaatgtgttttgtggttctgagatttacttttctattgttgacattatgtattaagtgcacaacttaggtacaaatggcaactacaaacagaatccttggactggagttctctggatggcttgtatcaaatgaaatcaagtacaatcaccataggaataaaagattctgtttttcctttgcagaaagaatttaacaatgactgtaagctgaaggagaggatagaggaaaatggatacaatacctatgcatcatttaactggcagcataatgggaggcaaatgtatgtggcattgaatggaaaaggagctccaaggagaggacagaaaacacgaaggaaaaacacctctgctcactttcttccaatggtggtacactcatagaggaaggcaacgtttgtggatgcagtagaaccaatggctcttttgccaagaatagtggatattcttcatgaagacagtagattgaaaggcaaagacacgttgcagatgtctgcttgcttaaaagaaagccagcctttgaaggtttttgtattcactgctgacatatgatgttcttttaattagttctgtgtcatgtcttataatcaagatataggcagatcgaatgggatagaagttattcccaagtgaaaaacattgtggctgggttttttgttgttgttgtcaagtttttgtttttaaacctctgagatagaacttaaaggacatagaacaatctgttgaaagaacgatcttcgggaaagttatttatggaatacgaactcatatcaaagacttcattgctcattcaagcctaatgaatcaatgaacagtaatacatgcaagcatttactggaaagcacttgggtcatatcatatgcacaaccaaaggagttctggatgtggtctcatggaataattgaatagaatttaaaaatataaacatgttagtgtgaaactgttctaacaatacaaatagtatggtatgcttgtgcattctgccttcatccctttctatttctttctaagttatttatttaataggatgttaaatatcttttggggttttaaagagtatctcagcagctgtcttctgatttatcttttctttttattcagcacaccacatgcatgttcacgacaaagtgtttttaaaacttggcgaacacttcaaaaataggagttgggattagggaagcagtatgagtgcccgtgtgctatcagttgacttaatttgcacttctgcagtaataaccatcaacaataaatatggcaatgctgtgccatggcttgagtgagagatgtctgctatcatttgaaaacatatattactctcgaggcttcctgtctcaagaaatagaccagaaggccaaattcttctctttcaatacatcagtttgcctccaagaatatactaaaaaaaggaaaattaattgctaaatacatttaaatagcctagcctcattatttactcatgatttcttgccaaatgtcatggcggtaaagaggctgtccacatctctaaaaaccctctgtaaattccacataatgcatctttcccaaaggaactatcaaagaatttggtatgaagcgcaactctcccaggggcttaaactgagcaaatcaaatatatactggtatatgtgtaaccatatacaaaaacctgttctagctgtatgatctagtctttacaaaaccaaataaaacttgttttctgtaaatttaaagagctttacaaagttccataatgtaaccatatcaaaattcattttgttagagcaggtatagaaaagagtacataagagtttaccaatcatcatcacattgtattccactaaataaatacataagccttatttgcagtgtctgtagtgattttaaaaatgtagaaaaatactatttgttctaaatacttttaagcaataactataatagtatattgatgctgcagttttatcttcatatttcttgttttgaaaaagcattttattgtttggacacagtattttggtacaaaaaaaaagactcactaaatgtgtcttactaaagtttaacctttggaaatgctggcgttctgtgattctccaacaaacttatttgtgtcaatacttaaccagcacttccagttaatctgttatttttaaaaattgctttattaagaaattttttgtataatcccataaaaggtcatatttttcccattcttcaaaaaaactgtatttcagaagaaacacatttgaggcactgtcttttggcttatagtttaaattgcatttcatcatactttgcttccaacttgctttttggcaaatgagattataaaaatgtttaatttttgtggttggaatctggatgttaaaatttaattggtaactcagtctgtgagctataatgtaatgcattcctatcaaaactaggtatctttttttcctttattttaaaataataattgcacctgacacataaacatagaccacccacaaccaaaattaaatgtttggtaagacaaatacacattggatgaccacagtaacagcaaacagggcacaaactggattcttatttcacatagacatttagattactaaagagactatgtgtaaacagtcatcattatagtactcaagacactaaaacagcttctagcaaaatatattaaagcttgcagaggccaaaaatagaaaacatctccctgtctctcccacatttccctcacagaaagacaaaaaacctgcctggtgcagtagctcacacctgtaatcccagcagtttgggagactgtgggaagatggcttgagtccaggagttctagacaggcctgagaaacctagtgagacatccttctcttaaacaaaacaaaacaaaacaaatgtagccatgcgtggtggcatatacctgtggtcccaactactcaggaggctgaaacggaaggatctcttgggcccaggagtttgaggctgcagtgagctataatcttgccattgcactccagcctgggtgaaaaagagccagaaagaaaggaaagagagaaaagagaaaagaaagagagaaaagacagaaagacaggaaggaaggaaggaaggaaggaaggaaggaaggaaggaaggaaggaagcaaggaaagaaggaaggaaggaaagaagggagggaaggaaggagagagaaagaaagattgtttggtaaggagtaatgacattctcttgcatttaaaagtggcatatttgcttgaaatggaaatagaattctggtcccttttgcaactactgaagaaaaaaaaaagcagtttcagccctgaatgttgtagatttgaaaaaaaaaaaaattggagctattgagagatctgcctctgtaggagtatggtcccaggcccacaaagttaaagtgcatcagccacaaatatgtgtccatttgagttttggttctgagaatactcctcataaagatatagaatcactccctcctcctaactcgcaaaaggctgaacagtgtatagtatgttacatttaaataaaaacaataaaaatgttgggaaaagaaaattaaaatattgtccttgtttgttttattagtcagaaactctacctggtaataaagagagaagctcaagtgtgtgcatggcaggatgtggttaaatgccccacagccccaaacaacaacaacagaaaaaaaaattactcaaacatttgtaagttttctctaatgtttcacatgtgtgagttagctatctttactctaataacaaccaaatgctttcaatcttttctaaatattcaggtccacctaatttacacagtggataaagaaaaatgaattggaaacgaggatggcttatgaaacaatggaagacttttggaggaaagccaggtggctgcagaatctgatttcaaggggatgaatgaccaatgaatttgatttgaaaattagagagaaaaaatacataataatgcaagttgcttccagggcccaagcaagtttatgaacccaatttacatagatcagcattaatgctgcacagttctaataatttggatgctgccaattcaaggtttgtgattattcagtgaagtaaaatttacctttttcatattactgaagggttcagctggtccaaactttgtctaaataaagttatatatgtagcttaaaatatttaagagaagatgtctagtacattagaagtaggacatatacatgcaaacagataccatattgattaagagttcttgtttatttcatgaagcaggacttttccaacttaaactgaaaaaaaaataaaaaggaagaggaatatctttgaaggatgctcaggagaaaaaggaactctgagttctatgagtacttagaaatgaagtaacgaagatctgcttcttctcagacattcattttctgttacccttcattggttttatttggttaggccagattgcttctagtctacttctttcctactccaaaacccaaaaccccaaactcctttactacaagatccaaaaaggtaaacatcctagatataactcttattggccaggtttggataacataccaacctctagaccaatcagtataagagatttgggaattgtgattgaccaatcttcagtgacatgaccacagagaggcaaggtgaagattttggcagcccacacaaccgcaactagtgaagaagagtacaccaaggagacagcagtgctgcaggtgcaaaaaccaaatggttgtttgctacatcttattaaatgaagctgtgacataaaaacattttctattcctatatttcccaccaattccaattattcttcacctgtttgtttgtccaagttagagaggttttaagatcattctctttcatatgttctttaccattgaaagattacatttgcattgttttgttttaagccaagagtagggccctggatatagctaggctcactgtggttttgcaaactttatattgggatgaatgcaagttttcactgaataaaaagctggtcctcctacttcaacctgtatcacaatatgatgttataaatgtttctttcagtttatcccaagagtatgtgctagtattttcaagtgtatcgacatatagaaaaaatctgaaaccctgatgtcattcattgtttaagtgtaaaataaaaaaaaaacagaaaaaaacctgctttgtcttttactacattcaacatgtgacaaaagaaaactttatcacctaaactttatctatttgtctttttgcagaatagtaaaataaaacacaaaatgcccttgcaagtgaataatctttggaaaacaccttcataaataccatgtattagttaaaatggaataatcatgatcaaactaatgaggtcaaacgaattggtcttgttcctaagtggctaataatgaacatttccatgagcctgttccatgatagcaacaaagggcaacaattccataaacagagaaaagccacatgccaaacatacatgcacgtggcacgtattatcttacacatttttattatccgccacaaaagagtccatgttcattgtttaatacaggcaattgcatcctctagagatcagcacaacaaatgaaggatcaaaacaccccatgttcctcattacaactgtaaattgaacatatgccttcatacaacttaggcagtgaccccagctatagaataaccaactacagtgaggtcttacccctccgaaagtttggttttaattaccttatacacatcttaaatgcctaaatcatcttacggttttctaaattatttagttattatctctgtggtcaatttaagctgctgacaatgcaaatattcccagcgaggtctttcaaggggaagtaaattaaaactagtgtttcatgaggtattacaatttttaaaagactgctttttatggttacaagaagtattagggttggggtcactagtcgaatcaactcagcattaaaaagattttaacatcaggtatataaacactaaatgtcttgatagccatttttttcagtgacataatcaatatgttcagatatcaatggtgtttaagtcaatacctataaaatgttacaagaaaaatatctgttttagggggctttcccactaaggaagacaaaagagaaacactgaaagatggtatgcatgtaagtaaagatacaaacaatatcttatttgctttcctgacaaatcagatactgggcatgaaatgcattttacaattggtgtttatactcatgcagcaaaacatgaaactaaatgctattttcaagtcagtataagcaatcatttctcctcatcttataaagttctgcatttcatcctccagtatctcctaagaaatagtcaaatcagtacatttcaactgcaacaattagcttatctttctctttctcctcattttcaatgccaggttatattaaacagctatgtgatatgtattcccttattagactcacaagaaaatgatagactttatttagacaaatcatctacttcagctgcttcaagtgagtagactccatagtaatgttcgtagagatttttggaggcaattagtattcagaacctggaagtattgttacattctccacatttttaaacatttctgtttctctccacacatataagtattctctcatgataaaattaattatccctaatcatttaaattaattaaacctagtattggaaaaaaactaaacataaggactattatgggttgaagtcctaattcccagtaccttccaaagcggctttatttagaaacagggtcgatgcagatgcaattagttaatatgagatcaggctagaatagggtggacctctaatgtgactctaatctgacctctaatctttatgaaaaggggaaatttagatgcttgcacacaggtagaactgtcttagtccattcaagctgctataacaatattattataaatatagtggtttttataaacaatagaaatttatttcttataattctggaagtctgagacaagggtgccagcttggctgaattctggtaagaacctgcttcctggttcatagatgactgccttctcactgtatcctcagatgacagaagggaggaggaggcttccaggatctccattataaaggcactaatctaatttaagaaggctctcctctcatcacctaatcacctccgaaggccccctccacctcttactaccatggcattggggattcggtttcaacatagaaattttggggagacaaacattcagtctgtagcaagaacaccaggtgaacatgaaggcagagattagggtgagtcttcaagcccaggaacaccaaagcttgccagtaaaccaccagaaactgggagagaggtgtggcacagattctccctcaggaagaaccaactgtgccaacactttgatttcagacttctagccctcaaaactgtgaggtaataaatttctgttgttcaatccatccagtctgtgacactttgttatggaaatcctaggaaactaatatagggcacgtaacttaagaccacagaacttatagttaggaattggtctttcacacctggaatcataagtcaatttaagaattgtttgctccaaccttcatattaacaaaaaatccttaactagctcctaaggcatgcatgtacagttttgcccagtaaatctttacttaatcaacccatagatttttttttggaatattcccatagtcatggggatgccatctgactatggtacacttttcccttaaagtttttgtatggttgtccaaatggccctacacataataggttcgaataactacatttgacttatatctcaatatgcaaattaggtgagtttggtgtaggccagaaaatgcagtgtgaaatagacatgctattgagggttgtgatttttaaaaatacttgaccttctctgtttactagagaaataataaaaaaacataatcagaccattacatacaatataaatctattcatggcagcctccactaacttctgataatttacaacagtttatatggagtaacaccgctcttaatgattttttacacaaaaatgtttgaaattacatgatcaaggagacatgactacaaagtaattgaattggccaacatatcaaaatttatatattcaaataaatatttcccacttcagattagaacattagaagactatttatattactagtcttcatcttagaaatcagatgctctcttaactcttacgccctgccaatgcatgtgtttgatcccagtgactttgtatcctatccatggaagtttatacccagggtcccacaatcatttacagtcctagcttctgtcttttttagccttccttttcccagtataattgcagaattaacttttgagtccaaatgcattactaaattggttcctttcctatgttcctactgtatgcaactataagacaggtaaataataagggtccccttctctgaacaatttagtaaatccatctggaacaaacaatgaataaaacaaaggaatgcttgtgttacgtagccaaaagctacaaggatcttttgtaaatacagtcacatttgccaaatcttctctcttaattatcttatttcttaaaaatgttattgaaccattaacatctacccaggtttaagcaccataattctttaatcaccacctaatgtttcacagactttctaatctatcattcctctttgataaacacaaaaatctcaaactgtcctttaatgttataggaaagtaaaaataaatttaagatcttgactgaaaatctaaacctttgggccaagaacctttgttttcaaattatacttgacccataagagagtctatattcatgattttctctgttaaagacagttcagggcacaacctctccgctattgatattttacactggactgccctgtactttgtagcagggatccttagcagcatccctggcctctactaattagatgccggtaatgctctatcagttgtgacagccaaaaatgtcattaatttggggtaaataaacatttgtataatattgaattttctccaaccacgtacttaatttttcttttcctcaagccttgttatatggtctgcacatttctcattaggtttattgctacgtattttataatcttttccattttgatttttgttttggttgtgtgatctccgttcattatatatttagactaaccatgagtttatgtaattttaagttcacatgggaagatgtattgtctagtgggtacttgggggaaaaatccatccttcgctgataatttactggtgaagccaatcatatctaaaaggttgacagtgctttgtatcttatcctcctgtcttcaccatgtgaaattctatctccattgtgctgttagtagttaaacaagcaaggagctatcagacctacaacaaaatagacctctgtaaaggaaatacaattatggtgggataacccaatgctaggtgattatagaagcactcaacattcaaaataccataaatagactttaagacacaacacagtcctattaccagaaaacttgtttaaaatttgggtgctatatcaaatgcagcacattacttgaaatgtttatctctatccttctattttatttattttattttattttattttattttattttattttattttattttattttattttatttatttattgttttgagactgagttttgctctgtctccaaggctggagtgcagtgggacagctcagctcactgcaacctcctcttcctaggtttcaagcaattctcctgcctcagactcccgagtagctgggattaccggcgtgtgccaccatgcctgggtaatttttgtatttttagtagagacagggtttcactatgttggccaggctgatctcgaactcctgaccttgtaatctgtctgcctcggcctcccaaagtgctgggattacaggcatgagccaccgagcccagcctatccttctactttaatatcttaatcttataagtgagaaaattgaagttcattttacttcccagagcttactgctagataatgaagctggtatcctgactaaaatcactcttcttcccattatatgtgtactttccaaaaaataaaacaaatcagaatgatattctttatagcccaatgttcaatttttcagaaatgcaattctaagaataatgaaagtttttcactttaatgacacatctcacattgtggatactttttgggaggaatagcatgtacttttcaatcagagaaacataacttttaatcccaactctgccaatttctagaagtaaacttagaaaagttacctcattgaaggtaaaaaaagaatgaacaaaaatcttggataatcattcctaacacttgggacagtcattagcattgaatgttatcgtatttgttcactgttttctataatgcctggccagaattaagtgctcagcacgtgttggtttcctcccctttctggtcaattgtgaacatttattaaaagtttccttatgtgctaaagtaatgactgggtcaccctcaaactctccacatgtgctcaagtgattacttcgttacacagatttcaagtttgatttgtgtagtatttctttcttttcca

SEQ ID NO: 1206 - DNA, 1319 bp, Homo sapiens
gagagaccagaaggtgccaaccgcagaggggtgcagatatctccccctattccccaccccacctcccttgggttttgttcaccgtgctgtcatctgtttttcagacctttttggcatctaacatggtgaagaaaggagtaaagaagagaacaaagtaactcctgggggagcgaagagcgctggtgaccaacaccaccaacgccaccaccagctcctgctgctgcggccacccacgtccaccatttaccgggaggctccagaggcgtaggcagcggatccgagaaaggagcgaggggagtcagccggcttttccgaggagttatggatgttggtgcattcacttctggccagatccgcgcccagagggagctaaccagcagccaccacctcgagctctctccttgccttgcatcgggtcttacccttccagtatgttccttctgatgagacaatttccagtgccgagagtttcagtacaatgtggaaatggatactgacacattgtgcctcagcctttccccacctgcccggctgctgctgctgctgctttttgttgctgttcttggtgtcttccgtccctgtcacctgccaagcccttggtcaggacatggtgtcaccagaggccaccaactcttcttcctcctccttctcctctccttccagcgcgggaaggcatgtgcggagctacaatcaccttcaaggagatgtccgctggagaaagctattctctttcaccaagtactttctcaagattgagaagaacgggaaggtcagcgggaccaagaaggagaactgcccgtacagcatcctggagataacatcagtagaaatcggagttgttgccgtcaaagccattaacagcaactattacttagccatgaacaagaaggggaaactctatggctcaaaagaatttaacaatgactgtaagctgaaggagaggatagaggaaaatggatacaatacctatgcatcatttaactggcagcataatgggaggcaaatgtatgtggcattgaatggaaaaggagctccaaggagaggacagaaaacacgaaggaaaaacacctctgctcactttcttccaatggtggtacactcatagaggaaggcaacgtttgtggatgcagtagaaccaatggctcttttgccaagaatagtggatattcttcatgaagacagtagattgaaaggcaaagacacgttgcagatgtctgcttgcttaaaagaaagccagcctttgaaggtttttgtattcactgctgacatatgatgttcttttaattagttctgtgtcatgtcttataatcaagatatag

SEQ ID NO: 1207 - protein, 204 aa, Homo sapiens
MWKWILTHCASAFPHLPGCCCCCFLLLFLVSSVPVTCQALGQDMVSPEATNSSSSSFSSPSSAGRHVRSYNHLQGDVRWRKLFSFTKYFLKIEKNGKVSGTKKENCPYSIITSVEIGVVAVKAINSNYYLAMNKKGKLYGSKEFNNDCKLKERIEENGYNTYASFNWQHNGRQMYVNGKGAPRRGQKTRRKNTSAHFLPMVVHS
